United States Patent Application Publication US 2018/0305689 A1 - sequence listing, part 64

SEQ ID NO: 914831 - DNA, 4001 bp, Homo sapiens
caggagttgggaccactgatttctatgacctgggaaagtgaagcttgtgtactgcaaagcaccctcaggctctagagagaccttctctcctggacccaagcacttctactaccctttaaagcagctgtcactgccactatgttgaagaaaaaacaggtgcatagacagcttaaacagccactcaaggtcacagagctggtaggaagtgaactgggctttgaacccaagtctgattccaaggtctacatgctttcaaccacttagccccacataagagattccaagagtagagttttgttcttttgcttattttattgtttttaaatatgaaagcatcccaggagactcagatacagagctgagaaccaccacaccctgtcagaccacttcctgtcaatcatgccagttcagcaagggatcccaacccctggcctaggaggctgttgctcctgacctctactctcgcctaggaatctgcacctagaacagccctttgtgctgctatttattcacaagggtctcaaataccaatggcctcacccatatgatttacccaggctgctggatgcttccatgcaacatggcagtacttgtttatttatttttgtgcactgaggtgaacaatggcactgcaaaatgaaattcagtttcagtggaacacaacagaaagaagtcaattatccagcatgaattatttatctggagacaataaccatggtgttattccccacaagagaggccttggcagcttggaacaggaggaaagaagacatggctgctactatctgcctatcatgctgcttcagattgcatcataggcaaattaacacttctgacatcctgtaactacacatgcgccttctctgtgtatgtggaccatgcataagcccctagtacatacacaattaacaggctgctagatccagggattctattccctcagtgttctggctaggcctggcaatgctaggctttgaacgtattaaaggaaataccaccctctctctgttgctcacctcaccctatcagaactgtgaggatgaagacattgtgaaaaaaagatttcacaagctacatcttttatggccagccataattcctgatgttaagtcagtctggagtcttcctcccaattgatttgctgtgcaagatcagttagaaatcatgccttgcctcctaataatttgattcctaaatcgttttcatgtaatttaatttcttgtgaccttaagacttctgaagaggttgcaagtgggagagagagagggttcaggctccaggaccagccacatcaaacctgtacctgccttaccacatcttccagctgtgtggaggcacctctggtggccccaagtgtctccttcttcagacaggatgttctccagcccctctcccctcgttatccgggcttccccttcttctcagtatgtgcctttcccaccctccctcattgcccaactcaggacaacaagtacttcccaaggatcagctctatgctcagttttctccttgatgctctgggcaaaagagaagacatccaagggtagaatgacaccttctaggttgtcaccttctatgacatcttctatgttactagcacacccattcgattctttgtttcatggtcagcctcagcattagacttcagctcattagggactgggatatgcctgattcttcagtgtcccagggcccagttccattaatatttgctgagtgaacatgacatccccaataccttatgctcggcatcctccccagaaaattgcgtgggaagatggggtcacctgcagcctcaggatgctggaactgggcctcagtcacggttcagatggggcaggcctggcctggagtgacagctgtaggacttaccgctgacccggcagggtgacggagtccaggtggcgacctccaggcagtgccatcatgttgatcccaatctgcagcaaagcctgcttgcagcggtcgtgaccctgaaaatagagggcaggatggcacaacgagatcctaaaagaggaggcacaatcactttctctcccagtcccaggccacaaggaaccaaagcagacaaagaggtaagacttcttagccctcttcttctgttgaaccagtttacactccagtatcctcacacaagtaaggcagaacccagatttgatcttgtttctaagtccctagcccactttatatctctaaaatattttcttattccaattgccaaatatttgcctgacttattttggtatgtatcaaatattgggacacacagcccatacgtattgcacaggacatacttgtactaaaaagtatctatggtttatctgagattcacatttaactgggcatcctgtattacttgctaaaactggcaattctacattctaattccctggctgttaccactgtagaactcgcttattcactgtgattatgcttaagtgtgtcctggaaaatgtgaccctgttatcggcatagtggttgctttcccaaatccattccacttcagatgatgtaattgcacccaaattgccagtgattggttcagaaataggcatgtggctcaatttaggccaatgagccatgacaggattgcttctaggaaaagcgttctttctcccaacagagagttgcaagatgaggcagtatgtctcctgttggacccgaacaagggagcatattcacctcactgttgctacagaccatcttgcaatcacgagcagcactagctggagaacaaagttagcataccaagaaaaaaatgctgggtccttgatcactaagccactgaatcaactaatgctggagtctggcccagctctaggcttcctattatctaagaaaataaaagctcttgtcgtttaagtcagtctgagtgagggtttttattctacacagccaaaagcatcctaatgaataagagtaacccaggttccagggactcccaatcccagcactgaggatgcaactggcttccctgtgcctcacatttaaacccaaaccagctacccacctgtttgtatttttctccctcgccttgtccctgctgtgctcctggaggcctttttgtacacaatctctctttttcatttctctctctctgccaactcccccaagcccatgaataagccctccctgaggaatatgcagattctgtcacctttgcctgggcacatcaacagaagagtcttactccatgattacacgggagccctatagaaaagaatggaggaggagcactttaatagtgatgtgggtgaacacaaagcactcctcataatgctgggaagaaagaagaaaatggtcagtctgaaaagtgtggggaggcaggagcccagaataaactagggtgctagataattccagagacttgctgccgttgcctgtttcttggtctgtggagcttactagactgtgagcttcttgagggtagacaccacatgtgtttctggaactgagccaagggccaggcacatagcctgcactctacacgtctgttgaaagaataagagggataaatttttaacacattgatgttgagccccatctcttcatctgtaactgaggataataatatctattttaaagagctagtataaggatgacatgagattaggaacgtggaagaatatggccaacgtaagagctaaataaatagttagctgttattattgttatgtcctatgagtctgctatgtgctcagctctctggtcagctatgctaagggagatgcagaaaatgagatacagcaggtcacacacttagcacagcgagaggctcaacaagcatgttatcaccatcgttatttccatcattactgtcattattgagaaggtatatttttggaatctggtgagccagtaggctgaaagggatggcgcaaaagaaaaactaggaacaataaaatgaggcgtttgctcccttttgatatgtttgactaaagtacaaaaaaggaaaacaccaacttctcagggtaaaactaagatgtgattagatggcaggg

SEQ ID NO: 914832 - DNA, 4001 bp, Homo sapiens; identical to SEQ ID NO: 914828

SEQ ID NO: 914833 - DNA, 4001 bp, Homo sapiens
atgacatgataaaaagaataaggactttggagtcagaggaatttgtattcaattacaacttactagctggggaaggccttcttctataggagggcataccaatactttattatcacagagctagtcgataaatctgttattaaacataactttattatacgtatatgtaagtgctaggcacatatcagttctccctcctcatcttttcagcggagaaaaaagaacagaagcactaagatctcatttaatcactttatgttaacaactgatgaaaaattaagtgaagaaattagctcttcccttaaaattcttagccatttctatcctagtcctctcaaactcagttttcagtcttatcgaagctgtagttaggtcaaaagctaggaattttttccctaagtattatataagggagaggacaagcaatatcaactgtcattcaaccaccaataacactttagtgagccaggccctattgtccatctccaggacacggagatgagccaggcattagctctgccatcaaggacctccgactggtgggaagataggtacaccggtaatgacagcagcactgaacaaaaagtacaaatagattagtaccacagaatgctacagaaacaggtgaagaagagactaagctctcgctgaggtttcatttgggtcttgaagcacaaatgttaagtccactgggtggagaacaaaaagaaagggaagaatggcatgtattctgtgagaagagacaaccagtgcaagagttttgagatatgcaaacacaagaacacatggcatatctggtcatgtgaggatgggtggaagagggctgagcagtcttgggaaatgggaacaacagaatgttgggaagagaggaaatcacattgtgcaacagtgctaatgttcttaatgccactgaactttatacttaaaattgttaaaattgtaaattttatattatgtattgacatattttgtatttgtattaacatattttaatgctggatgaatgaatccatgtaatgtttaaggatcagtatcctgctggatgctctaagccttgccactctacaagtctaaggatctaagaatgcaaccaatgcactggtgtaaatttgggggcatgtcaggaatgcagaatcttgcctcacctcctctgcttgacttatcaaatagaatcgacatttgaacaacgtccccaggtaatttgtatacacattaatatctgagaaataggacatcaggatgatttaggatcaaccctagcaacatctacgtggagacacatggagcatcactgactcccgacagggactctgcccacctgtcacaacttcatggtgaggaaggtactgccctccttcctaggtgagctgttctaccaatagagagctcttcccctatgaagtctgtgacccccgcctgcttagactgcgcctgaaggaattctatagacccttctttcagccccttagaaccttgtgtatattccaactggtccctgggaggtttttttttggaacgggggtgcggggaggctagaaggggctctgctgctaactggctgtatcctcgtacccctccggaaggctcaatgtccacatctggaaaacgaggatgctaatgtaacgcgatggagcaaagttgtgtgagagaataaaatgaaataacggataagacagtttcgtaaattaaaaaacactgtttctcctaataatttttttaaaatcctgtcagacttcacatattaatgacaacagcggctgcaaactaacacgcccactaacttgcaatatcagagattatcaacaagtcagcacttaacacgggcgtatggagcctcttctgttccggcaaagtgcctgggatttggataatctaccctggtccggatcggttctggatctttcccgccagagcttacctgaaccactttcgtgaattcctcataaacccgcttcttaaggtgcgccgccatgcctacccgcgggccctctcagcttccgtacactaggagggaggcgggggtggacggatccggaaaacttgcgtaggcgcggggggtgggtggatgacttgccgagatcccacaaggcagtgggatttggggaaagagcgaccgcttcctgttgctcgactgcctcgccactgtacggactgatttggcggcctacgccggaagaacggaaataagagcttcgcttgtgggaggcggggcctctggcgggaggagctgagactgaaagggtgggcaacccaatgggagctttgggaggctggttggtggcctcggagtggctaagagactagcgcggcgcggcgcgaagggagggagggaggaagtacaggttaaagggcagaggcggggtgctccagagctagaggcaaaacccggagctctgtaaggggtttacgactcgtgaaaaaactcagaggctcggctgactttcccatcatcctttgctgtacacgatgctgtttgtaggtttcctgagcactgcctttgttcaagctgtgcgccacctctcttgttttggggtgcctttccatacttccttattccagttttgcaaaagctgccatcctttaaggcatcaatccctgctctgatagctatagtacagtagaagacttctgagaccaaggataaagcaacaaagctacagactacagctctggttcttgagcaaatggctcaactacaaatgcatttataataactaacctgacaaagatgtgacaatggagtgaaataatgcaggaacattttacggactgtaaggtgtagtgcacatgttagtgtcagtaaatccaaggtcaagttttacaacctacatgaaactagctgttcattattttggtctttcaaaagaatgtgggccaggcgcggtggctcatgcctgtaatcccaatactttggcaggccgaggcggatggatcacttgaggtcaggagttcgagaccagcctggccaacatggggaaaccccgtctctactaaaaatacaaaaattagtcggggcatggtggcacacgcctgtaatcccagtttcttgggaggttgaggcagaagaatcacttgaacatgggaagcggaggttgcagtgagccgagatcgcgccactgcactccagcctgggcgactgagcgagactccgttatcaaaaaaaaaaaaaaagaattaatgtgggatagtttaaaaaaaaaaaagcaggaggctgaggtggatacagaggacccaaaaataaacaaaagatagtatttatcctcaaggtcctacaatctgagaagacagacacccaaactgatggtgacagtgcaactgaaatgtgctgggtaacgggaatgaatgtggttcaaacagacctaatttcttcagagtgcctcagggaaggctttcctaaaattagaggaaactgggagtggtggctcacgcctataatcccagcactttgagaggccgaggcgggcagatcacctagttcagaagttttgagaccagcctgggcaacatggcgaaatctactttaaaaatacaaaatttagctgggcatgatggtggcccacgcctgaagtcccagctactctggaggctgaggcgggaaaatcgcttgggcctgggatgtggaggttgcagtgagccgagatccagccactgcactccagcctgggcaacggagtgagaccctgtctccaaaaaaaaaaaaaaaaaaaaaaaaggctgggcgcggtggctcacccctataatcccaacactttgggaggccgaggcaggcggatcacctgaggtcgggagttcgagaccagcctggccaacatggtgaaaccccgtctctcctaaaaatacaaaaactagccgggcgtcggggtgggtgactgtaatcctagctacacgggaggctgaagcaggagaatcgtttgaacccaggtggcagcggctgcagtgcgccgagatcgggcctctgtactccagcctgagcaacagagcgagactctgtctcaagaaaa

SEQ ID NO: 914834 - DNA, 4001 bp, Homo sapiens
gacggggtttcaccgtgttagccaggatggtctcgatctcctgaccttgtgatcctcccgcctcgtcctcccaaagtgctgggattacaggcgtgagccacgtgcccggccaaaagctatgtttctttcaatgacaacagtaataatatcagcaacagataactcttagaatatatcaggtactcttttaagtactttgcgtgtattatttcaatcctgacaacagttcaataagttaggtactattatgatcccattttacagacaaatcaaggctggcttcagtggctcacgcctataatcccagcactttgggaggccaaggctggtggatcgcttgagcgcaagagttcaagaccagtctgaggaacatagtgaaaccccatctctacaaaaataataataataataattagccaggcatggtcgcatgtgcctgcggtcccacctactggggaggttgaggcagaaggatcacttgagccctggaagcagggctgcagtgagccaaaatcacaccactgcaccccagactgtgtgcgccgtcaaaaaaaagaacgaaatcaaggttaagcaatcagactatatgcgccatgagtgtaggaaccatttctgtgctcttcaacactgtatccacttctattgaagtacacagtatatggaaggtagtcaataaatatctgttgagttgactatatttgtgtttctataatatctgctttaaaaacatttccaggctggctgaggtgcctcacgtctgtaatcctagcactctgggaggccaaggagggtggatcacttgaggtcagaagatcgaaaccagcctggccaacagggtgaaacctcatctctattaaaaatacaaaaaaaaaaaaaaaatagccaggcatggtgtaatcccagctactcaggaggctgaggcatgagaatcgcttgaacccaggaggcggaggttgcagtaagccgagatcacgccactgcactccagcctgggagtcagggcgaccatctcaaaaaacaaaaacaaaaaaaaacacacctttccactttatcaccttctaccaccacccccgccccgccccatcccacaacacaagcaccttgaaatctcttaatgggaaaaaaaaaaaattgtaagcaccttattaagggctctccctcctaacatctgtttcttcccatattctgcaaaatcttagtcacctaccaccacatcaaccaccaccacctactcagcaccctcaatgtgcttggacatcagggtgtcccagggcacagagtaataatgcttttcaaccctttccctcctaaaacatatatgggttcagtctcagaggttcagaagccaatgttatgggaggtggcaaatcccctttctcttatcgccttttctgtcaaagaagacagcatcctctaggtgctgataaggctctaacagtgccattcctctgtttcctccaaaaaacaccctaatataagggaatatctcagccggactgcattctgtttctgggcctgggttctcagggagtctctatgaagtcaggacactgggtttcctagggtcaaaaatggccagggcagctgggttcccaagagttcagatacccccgactcttgggagaggaagcccggggtcgagggtagttaggcattggagtctagcgagaggcaggcccgaggtcgggagggcgggcactggagccctgagttttggtgaagcagtccctgagttctgggaggacctgaccaagaatctgagaaccctgacgtgagttctcgaggtaggatccgggtttctaccgagaaggctagggatcggcgcggggccgcgcgatggggggaaggtgccaagggctctaactacctgagaggcgcgggaccgtgggtggccggggcaggcccaggtggccctggggccccgggagggtcgcacagcgcggacatcccggagcccgagccgagcccgaggcgcgagcggcggagcgcaggcggcgcatgcgcgctgacaggaaacgcgaaaggaaccagctaccaggcctcgcaggaaaattaatccggcgatgtcctcgaccctcttacattagttccgcaccctgtcggagtcccagagcataatcccgggacgatgatagcaggaagccgattcgccctatatgcaaccactttattcaaaagcctattgacatacagactaggccgggcgcggtggctcacgcctgtaaacccagcactttgagagcccgagagggcggatcacctgaggtcaggagttcaagactagcctgccgtctctactgcaaatacaaaaattagccaggcgtggtggcttatgcctgtaatcccgattactcgggaggctgaggcaggagaatcgcttgatcccgggaggcagagattgcagtgagccgagatcgcgccactgcactccagcctgggcgacagagcaagagtcccgatagacacacacacacagagagagagagagagagagagagagagagagagagagagagagagagagagagagagagagagagagagagagagaaactaaaacactcacaggggtattttaatcatttttcctaacgccaaaaatacaaaatgttcaactcaggactttttttttttttttttttttttgagacggagtctcgctctgtcgcccaggccggactgcggactgcagtggcgcaatctcggctcactgcaagctccgcttcccgggttcacgccattctcctgcctcagcctcccgagtagctgggactacaggcgcccgccaccgcgcccggctaattttttgtatttttagtagagacggggtttcaccttgttagccaggatggtctcgatctcctgacctcatgatccacccgcctcggcctcccaaagtgctgggattacaggcgtgagccaccgcgcccggcctcaactcaggactttaaaaaaatgaagcataggaaggtttttttgttggtgttgttgttgttattgttgtttattttgtgaccgtgcagtgataggatcacccctctcggcagccccgacctcctgggctcaagacatcctcccacctcagcgttctaggtagctgagattacaggcgtgcgccatcacacttggctactttttaaatattttcagagttagggatttgcatgtgggtggggcgagtgtctcgctatgttgcccagtctgatctcaaactcctgtcctcaagtgattcacccacctcagcttcccaaagcactgggattacaggagtaagccacgcacacccggccagtctctctttgtttttgttttgttttgtttcgttttccttttgagacagagtctcactccctcacccaggctggagtgcagtggtgagatctgagctcactgcaacctccactttccaggttcaggagattctcctgcctcagcctcccgagtagctgggactataggcatccactaccaaatctggctaatttttttatttttatagagacaacgttttcccctgtccgccaatctggtctcaaactcctgacctcaagtgatccatccacctcagcctcccaaaatgctgggattacaggcaagagccaccgcacccaggctttttttaaaatctcattctgtcgcccaggctggagtgcagtctcgtctctgcaacctccacctcccaggttcaagcaattctcctgcctcagcctcccaagtagctgggactacaagcatgtgccaccacgcccagctaattggagacatgttggccaggctggtctcaaactcctgacctcaggtgatccgcccgcctcagcctcccaaagtgctgggattacaggtgttagccactgcacccctcctacaaaaatacttttacgagagagagagaaaagggaagagagaaagcagaaaagagatggaaagaagagaaaactcataaaagaaaaagaaaaactaagaaagagaaggagggagagggagcccaaaacaaattgggc

SEQ ID NO: 914835 - DNA, 4001 bp, Homo sapiens
atttcccccatttttgtagaagcaaaccaactcttcaagtactcacttttaaaattaataattacatgcaagtataattagtcaaaataatacgcgattagagcaaagtcatggtagaaatgaccatgactaaacttttagcttttctaggcttgtaactgcattactatttaataagcaaaataattttcaacttaacccatgtctatcactaagcaaatcaaaacaaaaagtgatccattgctccttccatagtttggtaatggttcaaaatggtaatacggttcaactcactattttatatccaaaaaaatctaagctcctcccaaggtgactctgagtctaaaaatttgaacatgtaatcatcactttgtgtggtataataatgatctcatttacatataaaatagatttaacattctgaaataattttacatttaatttgtgtaaactctgtaggtagtcttcttgaactgtaagttccgtgagggcagggatctctagtgcagccctttacactgaaagtccagttagtaatatttctgctgtttctggtaagtcaatataaacaatgtttttaaattatttacttaccagctaaaagacgcataaaatagttgaatttctattttaaagtgtgatttctttttcagttaaaaaatgtacactaaagttcagtaaagctggcagattcagcagcatgctgaaggacagttactaactggcagaaaagttacagcagcccttttaagaaggatttaaaatactgatcattaatacgtaaaaatgcaaaagtttagaaacaaagaatgacactggagatagtacaataaatattcatgcaattaagctgttttccaaggagcggtccccacaaaatatgggggaaaaaaaaaaccttcagagaatgcaatatctgaactgataaggagctcagcatgttccaaggcactcagacttaacattatctcacctgtctgtcacagcaactctgtggcgtaattttatgaatgggaaaaactcaggatcaagaggttaagcgactggcccaaggtcactcaaggaatcaatggtgcagctatacctagaagggtgcacttcacctgatccttcccactacataagccagctccccgactgaagcattaggacagcggaaaagcagggatcagactctgtgagtgtcccgcactactcctatcctgccaaggaggcgcgggcttgcctttgaaagccttccctagcaactcagccagagaggaggaagttgtgcccgaggcaggccactgatcagcccagcaaagtgacaaggatgacaggcgcagcccccaaaggaccagccggcattcccaggagcccttccaaaccctgcgacggcgagactggtctcagaaacatctgaaaaacctcccagtaagtttcgccccctcctggacgtgaggaaccagctgggaatgagccagaggtcggccagccacccgagccagccatgtgtccaacccgtcacgcccgccccgcctcagccggctcctcatgcctagaccgcagccagaggcccagctcaggatccgaagcaaaggcagccttggctgcagccaccaccaccacaccacaccgaggcgccccggcgtggaagtcgccgtcagatgtccgccccaccctcctgctgggaccctcaacgacgtcgtccgcgcctccggccaggccccgggggctcggcctgccacttctgcccacccgcctgcccgccgccaccgctagccgggcgtccttacttcattgagctggcgctccgcggcctcacgcagggctgggtccatagtgccccgcagggcctcgataatggtgttggggtccatcgcagcgcggactcggtcaaacccggggctcgggtgctactgggccaggaatagcgccactcactgcgcacatggacccgccgcgctccgcagcggcaaccggcgcgaaaggaaagagaagcgccaaggccccggatagaacctcttcgcctcggcgtggaggcgggagatgctccggcgacttcctgtgggcgcgcctgcggagcactttgggagatgtagtccacaaacacagtccgcagcccacgtggctgcctgagctgtcgttcctacagacaagtctttctgttcaaaaacgaaaaatgttcaagttccacaaaaagaaaagcaaaacaatcagttacaaaaggtttcacatactatatccacaatgttcataaagggagtcagatacagtgtgtggtgcaatcgattgctaatggctgcgtgattgaaggaaactttctgaaaagcaatttgagatgtgtttctgatagccactaaaatatttaaactgccgggcgcggtggttcacgcctgtaatcccagcactttgggaggccaaggcgggcggatcacgagatcaggagatcgagagcatcctggctaacacggcgaaaccccgtttctactaaaaatacaaaaaattagccgggcgtggtggcacgcgcctgtagtctcagctactagggaggctgaggcaggagaatcgcttgaacccgggaagcggaggttgcagtgagccgagatcgtgccattgcactccagcttgggcaacaagagcgaaactccgtctcaaaaaaacaaaacgaaacgaaatgtttaaactctgacccagtaattccacttatgagactttatcctaaggcaataacacggaagattaaatgaactttatgtgtgaaaggtttttatcacattacgtattagtaattaccaaatactgaaatcatggctttttattgagtatccaaattttagttgggacttcatataaatcacctcttaatgcagagtaaaagcataatccctattaaaatacaccttcctgccaggcgcggtggctcacacctgtaatcccagcactttgggaggccaaggtgggcggatcacaaggtcaggagattgagaccatcctagctaacacggtgaagccccgtctctactaaaaatacaaaaaattagccgggtgtggtggtgggcgcctgtagtcccagctacactgaggcaggagaatggcgtgaatccaggaggtggagcttgcagtgagccgagatcatgccactgcactccagcctgggtgacagagcgagactctatctcaaaaataaataaataaataaataaaaataaaagacaccttcctagccaggcgtaatcctcctgttgaggcaggaggattgcttgagaccagaagttcaaggtgacagcctgttaagatcgtgcctatgagtagccactacgctacagcctgggctacatagcgagaccccatctctaaaaaaagagggaggtgggggagaaagaaagaaagaaaaagtcctcttttataacagccaagaaaaagtttgttttagaaaggttaaataacttacccaaggtcacgtagtaagaggttcaactaagatttcaaacctaagatctttgttttcaaactttccattgtttccactaaatcactctgcctctgaagagaaatgttgaacaatataggactggttaagcaaatagcaagaatccagtaaattaaatatttcacagccattaaaaaatataacaaaaaagtatttatggaaggatatagctttgtaacatggacaaagactgaaaagcaaggttagcaaatgaaaataatttattttctattaacaggatggtgagatttggagtaatttcctttcatatctgttattattgtaacaaagttatataaacagatatacttaaaattaattataagccttcaaatacaatgtgttaaatgatcacttattgtttttaatttacaaaaaaaagagaaggaaaggctcacgaaagcctttccctgaagcggtgggttttgcaatgttactaccttgtatatgccagccactgtgcctggaagtactggaagtaagacagaattattcctaatttaggccgggcatggtggctcacaaccgt

SEQ ID NO: 914836 - DNA, 4001 bp, Homo sapiens
tgcccacccgtacagctccccagcagggagccctgggcctgaggaggggaggacagtgggaacggtggtcccctcctaattctccagctccccaatccccagcccccttctaaagtgtccgtccaggtgcactggcccctcccgcgctccccccctccccgggcacgcccacacctccagcacaggccccagtcaggggaagcccttcttgtccctctccaggagccttggttgggactggatctgccccccatgacgctgtcagcagatggtctgccaggcagctctgttgcactgcctggagcaggaggtcccccttgtcaccagctggggcagggagggggcctggggcttggagtccagcatgtgtgtgtgccaggaatggccctgggggcccaccctgcagggaaaagtcagggtgaacgtaagcagctccgcggcctggcaggaggagaggcaggcagagagaagggtacctgtggtggtgggacagctgcgggggcctctgcctcagtctggtccgtgcctgggccttctgagagagaatggggcaggcgttaggccccgacaccagagtgagagatacaaggagagcctggtgtagcccccaccagcttcctggctgtgaacccttaggctgtggcctgaggaggtggggatgtggctctccacctgtcctgggcctgctggcagcctctcccagaacagcttctaaaaccacaaatctgacccagagaatgttcccctttgcccaagcaggacgaatgccaacgcccttggcagccggcgtcgctcacctcgccagcacagctcccggctgagcgcgtacaccttgtgcgggtcggccgggtcccccgagttatcccgcagcatcacgaagcgacgcgtgctgcgcagtgcgcagcggaagttggttttccagccggcgcgctccgcagtctcagcctcggggggcgggccacctcccctgctgctaggcggccacctgccgcgggccacagcccaggcctgaagagggggacagaacacgtgtgccgggcccgcggggtcctaggcgggctctcccacccggggcggggcggggctggggtccccaccttgaagatgcgcgcgtcggcctcgctcaggtccttgcgcgcgaagtgcttccagggcacgcggaaacaggtgcgggcctcgtccagccactgcagcccctcatagcagccgctgctgatctctccaaggagccactctccgaacagcacgcgtggggctgccctgcgggtgcccggccgcggagagtcagggccggctgcagggcgctcggggactggcatctggagagggtgggccgggctcttacctctcaggagccaaggccattgctccttctgcaggggcagttaggtggcggtcaggtgttataacaggggaggtaagggctcctgtcgcagcagacgccaggccgcggccacaggtcgtgtggccaggtgtcacaggtgtccacaggtgtggactgagggcttgtagccaccgacgctgcctcggtatggatctcttggcagagggggctacaggtgtgactgcaggtgtggccggcgcgcacacatgaagtcacaggtgttgaaccagtgtccaggcctggcgggaaggcgcaggccggaccctgcggagacgggaaaggcgacgtcaggggcgggtcaggctcccgggaaagcgaaacctaaacagtggcgcttcgcaccctcctcgatcccaccccgtccggttctcagctccgcggaaccccgcctccgcctccgcctccctccccgcccgaccctcatctctcaggctcccccagctcttggctctacccctccggggtcacggagcccccacggaggctctcgctcccggcctgcaccgcgtgggtctggggtccccagtacctgggtgccagagccgccgggacgggaagtttcgtctcgcggggaagcggagggccggcgcttttatggtggccaggcgggagtttccgggaagggcgcgcgccgcctgttcttattattggatgcgaccagcggaaccccgccccggccagcgcggagtagggaggagtggagggcgttgggagtggctgcagtgagccgagatggagccactccactacagcccaggggacagagcaagactcagtctcaaaaaaaaaaggaagtgggtaatgggaggtggacgtgcctcgaaaaaggggcagctgcaccgtttgcgtttctttttttgagatggagtttcgcttttgttacccaggctggagtgcggtggcacaatcttggcccaccacaacctccgcctcccgggttcaagtgattctcctacctaagcctcccgagtagctgggattacaggcatgaaccaccacgcccggctaattttgtatttttagtagagacggggtttctctatgttggtcaggctggtgtcgaactcccgacctcaggtgatctgcccacctcggcctcccaaagtgctgggatttaggcgagagccgccgtgcgcagccccctttgggttttttacattgttcagtcaagaatatcagatactctcacaattaaaacatttggaaaggaattaatggtgtatttccattagggaaagtgctgacaagccgcaagggatcccttgatggttctgggcatgggcgcccagcctgggctctggctttgggagcagcgaggggaatgtgtctctcacccctaggcctcctggtctggctcctgctcaggccacacggcgcacccacccccagcgcgcctcagtccaggtcactgggcagggtgtttactgctgcgctccaacccaagcatgtagatttcagaaggggactaggacccccggcaggtgtttgagaccaccggctcccaagtgcgtcgccttgggggtttgcatcggctcctcagcctccccaggcaatctctgtgtagggtcgggagcgggaggtctgagatgagccgggtgcctgagatctccggtgcaggtcgggggaggggagcccccctcgggctgtggttagagcgggagaggaacttcccagactagctggcacagagcctcgggaaggcggcgggcactgcaggtggtttacgggaagtgctgcagccttggggtggggacagcgtggccagacccaccgcctcatctgcacacctgggctcaagcgctaatgacgacaggggactgagtgaatgggacccccatggacccgcgcgcctgccccacgccatggcctgggtttcgggagccttgctttattctgcctcgggtcggaggctgggggagcgagacctccagtgcccgtgcggctgggggagagggtggaggggccacttagatgtaggagtcatcaccaccgggcgcatcgtagggacccccacccctccccgcgccctcgccctcatcgccgctgccggagtcactggcgccatccacgtccagggtgggcgcgttgagaacgaccacgtctgcctccgtcccgatgtcctcgccaaaccagacagccttgtacccgccctccggccgccgctccttggtcaggatggacctcaccgccgtggggcttccgccagctcgggccgctgcggggggctcaggggcaccgcctggggaggcagggccggggggtgcgggctctgcgggcatcggtgcctccgcgggcttggggtcgtgcgtggggctggggacgggcgcccagttggccttgtggtcagggaggaacgcctggttgtcaaagccttggggctggggctcctgcaggcgggagtcgaggcgtcagcggggtccctgggtctctgcagccttggccctgcacaccctcattccacgctggacacccctccgtctccacatctgtccctctgccctcccctctcctgtcccccgtcccccacttcctgcctggtcgcctgccctgttctccatcctgggcctcaccggagctttgccacagcagcacttgagccgggggccatagtgcttgt

SEQ ID NO: 914837 - DNA, 4001 bp, Homo sapiens
gccgtgagtgacgggggtgggcggggacaggctgccccttcctgggatgcactcaccttgcaccgcggtgcaggcgcttggggagggtgacaggtacggctctgcctggtgcggggactctggggccgcggcctcgcctgcatccggaagggaatcctgtgctggcacctcatccctagcctctccctgtgccccaggcctcccaacccctacccctctcacctgtcgttagtgccgcgggctggggcccggggctgggggtcgtctctactgcccacccgtacagctccccagcagggagccctgggcctgaggaggggaggacagtgggaacggtggtcccctcctaattctccagctccccaatccccagcccccttctaaagtgtccgtccaggtgcactggcccctcccgcgctccccccctccccgggcacgcccacacctccagcacaggccccagtcaggggaagcccttcttgtccctctccaggagccttggttgggactggatctgccccccatgacgctgtcagcagatggtctgccaggcagctctgttgcactgcctggagcaggaggtcccccttgtcaccagctggggcagggagggggcctggggcttggagtccagcatgtgtgtgtgccaggaatggccctgggggcccaccctgcagggaaaagtcagggtgaacgtaagcagctccgcggcctggcaggaggagaggcaggcagagagaagggtacctgtggtggtgggacagctgcgggggcctctgcctcagtctggtccgtgcctgggccttctgagagagaatggggcaggcgttaggccccgacaccagagtgagagatacaaggagagcctggtgtagcccccaccagcttcctggctgtgaacccttaggctgtggcctgaggaggtggggatgtggctctccacctgtcctgggcctgctggcagcctctcccagaacagcttctaaaaccacaaatctgacccagagaatgttcccctttgcccaagcaggacgaatgccaacgcccttggcagccggcgtcgctcacctcgccagcacagctcccggctgagcgcgtacaccttgtgcgggtcggccgggtcccccgagttatcccgcagcatcacgaagcgacgcgtgctgcgcagtgcgcagcggaagttggttttccagccggcgcgctccgcagtctcagcctcggggggcgggccacctcccctgctgctaggcggccacctgccgcgggccacagcccaggcctgaagagggggacagaacacgtgtgccgggcccgcggggtcctaggcgggctctcccacccggggcggggcggggctggggtccccaccttgaagatgcgcgcgtcggcctcgctcaggtccttgcgcgcgaagtgcttccagggcacgcggaaacaggtgcgggcctcgtccagccactgcagcccctcatagcagccgctgctgatctctccaaggagccactctccgaacagcacgcgtggggctgccctgcgggtgcccggccgcggagagtcagggccggctgcagggcgctcggggactggcatctggagagggtgggccgggctcttacctctcaggagccaaggccattgctccttctgcaggggcagttaggtggcggtcaggtgttataacaggggaggtaagggctcctgtcgcagcagacgccaggccgcggccacaggtcgtgtggccaggtgtcacaggtgtccacaggtgtggactgagggcttgtagccaccgacgctgcctcggtatggatctcttggcagagggggctacaggtgtgactgcaggtgtggccggcgcgcacacatgaagtcacaggtgttgaaccagtgtccaggcctggcgggaaggcgcaggccggaccctgcggagacgggaaaggcgacgtcaggggcgggtcaggctcccgggaaagcgaaacctaaacagtggcgcttcgcaccctcctcgatcccaccccgtccggttctcagctccgcggaaccccgcctccgcctccgcctccctccccgcccgaccctcatctctcaggctcccccagctcttggctctacccctccggggtcacggagcccccacggaggctctcgctcccggcctgcaccgcgtgggtctggggtccccagtacctgggtgccagagccgccgggacgggaagtttcgtctcgcggggaagcggagggccggcgcttttatggtggccaggcgggagtttccgggaagggcgcgcgccgcctgttcttattattggatgcgaccagcggaaccccgccccggccagcgcggagtagggaggagtggagggcgttgggagtggctgcagtgagccgagatggagccactccactacagcccaggggacagagcaagactcagtctcaaaaaaaaaaggaagtgggtaatgggaggtggacgtgcctcgaaaaaggggcagctgcaccgtttgcgtttctttttttgagatggagtttcgcttttgttacccaggctggagtgcggtggcacaatcttggcccaccacaacctccgcctcccgggttcaagtgattctcctacctaagcctcccgagtagctgggattacaggcatgaaccaccacgcccggctaattttgtatttttagtagagacggggtttctctatgttggtcaggctggtgtcgaactcccgacctcaggtgatctgcccacctcggcctcccaaagtgctgggatttaggcgagagccgccgtgcgcagccccctttgggttttttacattgttcagtcaagaatatcagatactctcacaattaaaacatttggaaaggaattaatggtgtatttccattagggaaagtgctgacaagccgcaagggatcccttgatggttctgggcatgggcgcccagcctgggctctggctttgggagcagcgaggggaatgtgtctctcacccctaggcctcctggtctggctcctgctcaggccacacggcgcacccacccccagcgcgcctcagtccaggtcactgggcagggtgtttactgctgcgctccaacccaagcatgtagatttcagaaggggactaggacccccggcaggtgtttgagaccaccggctcccaagtgcgtcgccttgggggtttgcatcggctcctcagcctccccaggcaatctctgtgtagggtcgggagcgggaggtctgagatgagccgggtgcctgagatctccggtgcaggtcgggggaggggagcccccctcgggctgtggttagagcgggagaggaacttcccagactagctggcacagagcctcgggaaggcggcgggcactgcaggtggtttacgggaagtgctgcagccttggggtggggacagcgtggccagacccaccgcctcatctgcacacctgggctcaagcgctaatgacgacaggggactgagtgaatgggacccccatggacccgcgcgcctgccccacgccatggcctgggtttcgggagccttgctttattctgcctcgggtcggaggctgggggagcgagacctccagtgcccgtgcggctgggggagagggtggaggggccacttagatgtaggagtcatcaccaccgggcgcatcgtagggacccccacccctccccgcgccctcgccctcatcgccgctgccggagtcactggcgccatccacgtccagggtgggcgcgttgagaacgaccacgtctgcctccgtcccgatgtcctcgccaaaccagacagccttgtacccgccctccggccgccgctccttggtcaggatggacctcaccgccgtggggcttccgccagctcgggccgctgcggggggctcaggggcaccgcctggggaggcagggccggggggtgcgggctctgcgggcatcggtgcctccgcgggcttggggtcgtgcgtggggctggggacgggcgcccagttggccttgtggtca

SEQ ID NO: 914838 - DNA, 4001 bp, Homo sapiens
caggatggggcagagctggcgaagaggcgggccacggccacattggggttgccctgagcaggctcaaaccacttctggagacaccgcccactgttccgtcgctcagggctggctttgaaggaattgctccaagtcttctcacacaggtcagctggggtggggaagtaatgggagaaagggaggcactgggcccctttggggcagcggttcttccctgcaggggatggaggagggacagcttacctcctactccctcattgctagcctttgcacctgcacccttgtggggaccaccaaggggcctcttcccgaccaaggccttgtcagcaccactcaccctgactccagtcccagccaccacgccagttggatttgcatgtgtaagacatgcgacagtcttcccaccactcctcacagtcctcctggcacagcggcacattcacaactcgctctccctgcccactcggggccacctgggtgcagtcatagccagagattagaacattaatagcagagatgtgaagactactaatagctacagtggtatttgtaccaggtaccatatgtacatcatcttccataaagcctctaagtgttattttacaaataataccaatgaggctaagagatttaatagtttgtcctgggctatacagctggtagggacagaacatgagactgaagctcaggtctgtcaactccaccaagcctcctgtggtgatagcccctcatcccactgttgtcagaacagtctcccccatgtgattctccagcaggggcctctggctctgctcttgtccatagggaaataacacctcctgttcctactagcatcctggcggcatcagcataagatcgggtgaaagctctggctgttaatataataacagggcatggcacagatctgcttcctacctcccaccccaggcttcccactggctggatccagggccccaggtttggggagcactcatagaagcagatagcctggatgaagtgcttccgacagccaggcatcagcagtccacagtgaaacaggctgaagttgtagagtggggatacatccagatgggcttcccagcttgtcgtgagggtgcagcaggcattgtccttccaggggatgcactgaaggcagaggaagaaacaaaaggcccaggcaaaaggggcaaggatcggcaagtgtctagggaagaaaggtggtgaaatgaaaatgtcccttaggaggcctgagcaagtgggatgcctttagctagtaagcccctacataagaggaaccctgataatctctcaatatttacccaaagggcagaggcacctgcacaatgaccccctgccacaggctgctacagtcctctagaaacacaacttctgggctctcagctcctgagaggcagcagaagccttttagggcaaagcaggtagaagagccccagagagacccaggggaatctggggttgcattgggtgggagggtctcataggccaaatgccagctgtgttcttcctcccatatccctggaaattgcctttaggagcttggggaggggtcacataagtcatatgttgccccaggacctgttggcaggaaggcttgttttcatctgtgccgagtcaacaatggatctctgggatcaccagcggtccctgctttcccagtggctagagcagctcagaaatgggaactttgaatcgcttggctcttatggtctcaaaaaggcatagtctctttccatctagttgcctttgcttaactcctaaccccaggaaccaaatgatcagggttgatgaggttcggagaccatcttggcatttgtgtcccttccctgatcttccccatcccatacccaggtctggcctctgtacctcctcatagagcttgtcttctgggctgggcactctcttgtggtgtttggcattcatgcagatgttgagcagctcgtccccagcccaggtgggcatgactgtccacagctctagcaggagcggccaccagcatgccatggcctgctacagagagacccatgctgcacacttgatggaaatgacaccccactccacccccttcatcatagcaggcactgggaaagggggatgggcttcaatctccctcaaataattgcaacactctggctgctcctaggaccttcttttggaggcagcatcacagaatgtcagggcaggtagaataatccttggaggcctgacacagtgctggaggccttgctggccctgcagagccaggggcatgccgaggcatgagtcagataggaggagccttctacatccaaagcctgatccccatcacaggaatgaggaggagggcccttcctatttccaactctgttctgggtagtagtggtaatgagaggtagtggaaagagagacaaaacaaagcaaaaggcagaggggccccaggcctcaagcacccaacctcttaggacacagggcccctcaccttcatagcccaggagcccatggctcccccagtcccccaagtctggcaggagcctgacctggacccatcatggtgaaactggaaacttctagcctaccctggtctaagagcctcaaacatcctggggaagaagagcccagcccccctcttcagagcccaacctcaagtccaaatctaaggctgttctctctccagacaaccagtttcaagctcagccatggccttgaatatttttaaagaatcagatctgttaggtaaaaggaggaaagatgctgccccttccagcactctcttcatactcactttcaaggcaggagccttcaggtgctcctgctccctcctccccctgagactatgaggctgaggggagttccatgtcccgcccatttattacccagtctgatttctactaggtccaggtgcaggaggagaactccacgtggctctcattaaacagcatctgtctcacccagctctgcaggcctgtgggttccgaggaagtttgcttcctcagagaaacagaccccatcgtaggcaagatccggggctctacaataagttaccgggttcggctgtcagctctgctacttactagctggctgccctggagaaaatgactcaaattctctgtcagtttctctctctgtaaaggaagtttttattatgggattggaaaaataaagagaaagttcatgaacaaaaaccttggcattgtgcctgggatagaggaagtcttaatggttttaaattttattcttttatcctctctccacacgcccctcctatgttctgttccgtagctctacctgccccttcactgttagccaagcatcagctcagtcacctggtggcttttctgacagtgtcctcgcacagcccacaggaactatggtccctgctggagcacagaccgaggacacaggatgcagagatgaagtgtggccttggggacccaagaatttaaacatacaaacaaagccaaagcaaacaaaacaaagaaagtccctccataacccgccaagcagcctcccttagcatacaggaatcgttgtcctgtgaaatattctacaagtgttctcagcagtgatcatatttgcaagactatccttttcagctaaggagagattggaaacttggataggattcttgggagagtcccaaagatgataaaaatgctggaaaaggagcatatttctttgtttttataatatgtcctctctttctctctctgaaagagaagtagctgaaatcactgaagttttattgatacaaaggaaatgaaaacaaaacactaaaagcgtttttttaatggaataaaatacattctgtggtgttcagctacaactgatgtgtaaagcatatactaatgttggaaaatgacattctccacacctgggtaatcacagccactgaatgctgagcacaaacaaggagccaggcactggcctggtactgtctacaggatctgaggtctcaaaaagacctccaatatgaacaccctccttgttttagctgtggggaactgaggctcagcggtgagtagcag

SEQ ID NO: 914839 - DNA, 4001 bp, Homo sapiens
agaactagtttgcaaaatttgattcttcctcctacgctctgcatgtgaatcccagcccctaccagcaaaaaagccacaaaactagtcccttaggggaaggaaatcagaggttaagggtaagtgaagctctttgcattttctagttttattaacaaactaccaagttgaaattcattcctgagctaaactgccaaatgcttctgcaacaaaaactgcaaactttcacgtgaacagatcttttcaacaatagagagttgttccaggctgtgaataggacagtgtcagtgtgaccaacacagcgggtgctggacattcctgacacccttgtcccctggctagcctttgatcacttatctcccaacagcatttggttttgggaatcactttcaggcaaagtatacagactttgccttagcgtacataatctatacgctaaaactcatcttttgtcacagcccatcacgagcatcccattagcataaagcaccaaacacaggaatgctttgttttccaaaatctgtccaccttcactcctaaacagtccctccgtgttttaatttgtatattctggaaaacatcatgggatgacagtggcaattcaaacaataaaataatctaagaaccgaaaaaggtcctggtctggttacctgcggatggctgccaggggaagagtgtggtgtcctgctttaggtaaatatgaagttgaggcttcactacttagaatgcagccttggaaagcagactagacttgactctgaaaatggattaatgaaacctatctcacagagctgctgaaaggagtaaacgagataatggctccaaagtgcctagtagacagtacaagctcactaaaggaaagctattttagtcctctgtacaactgtccaggaaaatgtggatctaatgagaattccaaacagagggaaagaaaatgcacaaaactatcaagtttattagtgtgtcttgatcaaatgccccgaatgctatttccggataagagtctgcgtggtctcctcggccaggccagagacaaaaaaggtactggattgatatccattttatttctgtaaaagaaaagcagttcctttgtgtcgagtcaaatgaactgcagatccccagagggctgtgaccaagcagcccgccaggcctcggagctctgcctcgccggtcctcagctacgtcccccgctcaccgtcccttctggagagcacagcactgctgcgcagggtcttccagcaagttccagcgcccacgccgcagctgccgcgctccctccagagggccgtgcccaccgcccgggaggggtccaccccggggacgagcccaccgcccagcacaggaccccgcctgggaggagcccacccgggggatgagcccaccgcccagcacaggaccccgcctgggaggagcccacccgggggatgagcccaccgcccagcacaggaccccgcccgagaagagcccgcccccggggtccgacggctgtccgggaccgactcactgcctgggacgggccccccatcccaaattagctccccgccccggtccaactgccgggcgtcccagggcccccgccctagccaggcccgagtcccagccctggctgcggggacgcgggcgcgcgccgcccctccggcccgggaccccgggagccctcggagccaggaccgctatcctcgcccggaccggctccagcagcttcggcccgctctgcttccgtcgcccccagaccctagtctcccaacagcggaaacgcgcaaactcacccctgaaaagcagcagcaggaagaagtcaggcagccgagcgcagagccggagtcgcggtggccgcctcagcgccatgtcgagggttgctgaggggccagcggcagcgcggcgcggcttgtagtccccgcgcgcatgcgcccagcctgccaggaccctgcgacccgccccagttaccatggcgaccgccgggcccagccgagccggcaccatggtgacagaggaagctgaggtctagctgcttacggatgcagcgatgctctggaccggcacatgggttctctttcaatgaacttggcgggaggagagtaaagaagtatgtacaagagtgaagcagggtatatttccatagctatagaataaatccatcacaacaggtcggagaaggaacactcctttaaaatttgggaaataaagtatttcttattttacaaataaggatgcagcccagttatcttggaagcattatcgccttcacatcttttgggcccccaattccaaattgatggaaggaaaagagctgaaatctgcttaaaacataagcaatacatacattatacagcatataaaagtgatgtcttgctaaaataatttgtttatgtggtagatcaaaagcatgatggcatacccaatagtttattctgcagaaaagcagactaattatttgctctgatttctgaatactgggagatagtaaaaccagggaagaacaggtaagatgaggacaaacaggaaaaatgaagagaaggataaattaaagcagaaattagatctaaaaaagcaagagtatttaaagtctcacttaatactatggaaaatacttgaaaagcttgtattttagcaagtatagaaagtacacctccaatgttcccagaaacagcagtctagcaacagaattctgaatataattgttagtaaaataagccagtttccaactaatatttttaatgtttaactttttcatatactcatgctacttttttagtatttttagttttcatgcaaaatagaagtatatttacatattatgtataccaaatttatatatgtaaaagccgggaaacgtgaaatagattgagattgttgccaagaatatgcttcagtttccatcactgtataatcttctttgtaaatctttataactgctcagatctttatgttaattgattaccttctcaaaaatcttataaagacagaataaaaattaaaaaataactcaattacctactatgattctgtctttcctttcataaatcttctttatgttccaggtcaccatgcactaaatcacaagtaaaagtgtgtaaaagttgttttataatggtggcctctttccctttatcaagcacaaaatcgagaaattaaaaagaagaaaattcgtcttatgcccactgacatttttttctgccctctgttttccctattattccctttagctcctggtcacatggccaggcatatttacctaactgaaggaactgtttgggttacttggaaatgtgagatggtgtctgactgtggacagagcacggttttcaaaaaccagtgcctcttttctcctgcggaattttcagtgtttgcgttgtaaaatggtctatctgttaaatggtcttcctgctagggaatcttttgaaactcagaccgagattacaaaaaagggctgcatgaatattctataaggggcagaggttcctaggagagtggatggcaggtgcttcattgtaagacattgattttcctctgcagatggagtcggcatgtcattaccaacagctgagacagttcctggaatggaagtctaactagggatgcagcagagtggggtaggacacacgtggctgtgaagtggtctgctcttccttagggtttcattgttccctggagagctctgaccctgtgcagaagggaatcagagctcaataaggccagcagcaaagtcctggaagcattccgtgagcagggctgaggaggctctgcctccatcacagcattactcatctgaatatgcttatttctaaggtgtggcttactagggagacatgcacttcttaaaagagctcggggaactgaatgtaaaccaacaataaaatgctaagccctggccaggcgtggtggctcacgcctataatctcagcactttggcagaccaaggagggaagaccatgaggtcaggagtttgagaccagcctgaccaacatggtgaaaccctgtctctactaaaaatacaaaaatttgcc

SEQ ID NO: 914840 - DNA, 4001 bp, Homo sapiens
tttcgctatcagttaacacttcatagcctggttcagtactgtctacttcaagccatttttcaaggttctcagtagtcacattttccaatcctttggtgtgttgtaaaatggcagccacagtagccacagaaatatcttcaacatcaaagtccaggctctctttctcctctaccatagggagaatcttcttccatgctctgctaatggtaactggttttactaagttccatgccattgctatttcataaagtgcatccaacagagttagcttcttccagaatgatttcaggtcattaccttcttccaagttgttctggagaagacctgcacgataatttctcttcatcgttgctatgactccctgatctgaaggctgaatcaatgaggccacattaggtggtaaatatttagcaaatatttggccatcatctgaccttaggacattttcatttggatgtgttggtgaattatccaacaagagcacagccttttcctgcaagcctttagatcttaaatactctcgaacttgcggcacaaaaattttatcaaaccattgtcggaaaatggaaagatccatccatgcacctttttggctgaaataagagactggcaggtttaaggtgtcagttgatttaaaggagcgaggtttctttgctttccccacaacacaaagtttaagtttgtgtaaacctgttgcattggcacaacacatgattgtgactctttcttcaattgatttgtgcccagggacagtgcatttacctttgattactgaaatcctagaaggcaagcacttccaaaagagtccagtttcatctgcattgtagatttgttcaggctgtaaattctctcgttcaataaaatctcgaaagttattacaaaaatcttccaccgcagtctcatctccatttaatctttcatttctaatgttaatctctctaatgctgtgccgctgcttaaaacgagttagccaaccggcagaggggttaaaatcaccatccattcccaaagcataaaagaagaactctgccctttttgcacaaattggtccagatatgggattcccttttgctctttgctggttgaaccattccagcattgccctgtccaattcctcatacatggatggcttcatagatttcctcttggccaaaagacttgtggaatcagaactgcttgcataagttataatcttttccttattttttcttatatcccgaactgttgtttcaccaattccataaatcactgccagttgtttggaagaacctccgtcttcaagtttctttattatatcaagcttatctttaatagtcaacaccacacgcttccgtttccctgacatagcgaggttctgggactcaccccacactcacaatgtagcaatccacaaaatccttccttctcttacacaggctcacttcaacagtcttaacacactcagtctttcatccttaccagcaacctggtggccctgatcccctcccgggctggggttggctggcaaatagactgcagaagaaggtgaaagaggaggaagtttgagagaacaggcctttctttaacttatacgggcagtagcggaggccccatgtcaccgcggataatccggattaaaagcatgtgttttattaccccagcagccgtgagaaagactatacccccattgtggccacgaacctcctgcacgtccagatcccgggtaaccgcgcgtcactaacccctgccacaccccaaagttacgacagagagccgaagagcctaggagtcaaggactggcacccttcctcaggggaacggatatattagattccttccccagcagcagggccctcccgccgcgcagccccagtttcccgcgccagctttagccgggacagtcctcccagtccctcaaaacccgccaggcccctctccccacctctcttgcaaccaggacccgcacagctccctgactatcgcgcggcagtcgctccgcccctagccacgctcccggaagatgatccctcccgccgcctggccccacccctcgccccacccagaggcgggacttcccttggtccccggaagggggggaggagcatcgcttgtcctgagctggttgccggggcaggggcggaggcggaggcagaggtggaggcgctttgaaaggtgagagcgcgagggcggtgcggggctgtctcccggctgggactcgctcgcgctcccggtgctaatggtttatgagaggggcgggggaagccgtgcctcctcgcggactaagagaaaaattcccgcgggcgctctttgggtgggccggagaacgcccctcagccctttgcgcctctaaccctcctcagctgagctgcagtgggcgcggtgcccgttatttccgccttggggaggtgcttggaactgatgtagggagctcggttggtgatttctcgggtttctggcctttccagacccttgtaattgttttctcggtgcagagctcttttggggtctgggggtttccgtcgtcctgcgcgcgtcatcgcgaagcttggcctgagggtccggtttcctagctactgtgcccctccctcctggaggcagagtgacggactagtgggctagcgggcgctgggttcctgcgtcccgccaaagaggtttgtaatcatgaaagtcacccttccgggtgttaattcctgagaggatctattccactgtctaccactcattcctgctgcattaaccttcattgttaacggattttaatgaataatatagttatcccggataccatgctggcaggatccactttgcgaaattgtggactgttggactgtgattctaagtgggggaaataggctttcctctctttatgtttattttcttatatcctatttctgtcatgttctgtcttgttttcctgccaatagaagaactatgataaatttattcatagcagtgtgataagaacttgatcttaatcatacactgtagccctcaaatcgtgtattatgctggcttgtttttggtgtccctagtaatttcatcagattgtgagctccttgggagcagagaccatgtttatttgaaatggtggcagcacagttcctagcaggtgcttgcattttggtagatattcaataattatttttcggcttattaatctttgctctccaaactgccatataaaagaaaacatcgaagaggagtgatgttttacacccaagaatggatccctcctggtagaatttcaaataatgacctggggttccactgcctttcaaatctgtaaagtgttaactaccacctgcattgtttatacagcaagtaggtgatttctagaatgaatcttttcttgagtatgaattaacctcaaagtttagaaggaactatatttcttctgatgagaaagtcaaatggcatcatcaaagtacttttagctatagagttactgtgttagagaaagaacacaagcaatatggattattgtctttaatatatattctttggcagataacatagctatgtatgtgcatcttatattaaccatgaaacacaaagatgtgatagtattgatcatcttcattcacttatttaatgctttctgtttggagtctctgtttttctctttgcttaaaggtaaggtatcattacagaagctcgataaaattctcatttcaggaaattaagtgtatattcaacatatacagaagtaacattcatttgcatggattctcttttgagtagattctgaagaccaagaggtatcttacccatcaaactagctttccttcacatttctcttccgaggttcactcaccttttccctccgttatcattcttcccttcccagctaatatagtaaagctacctacaatttaaaaagaagagccaaacatattcaaagtgtctttccttttcagtaacagaattttttaccttactgatataaatggtcattttgaaatatgagagaccctggcaatttggcagttggtccaatgaaacctgatttattttgtttaaat

SEQ ID NO: 914841 - DNA, 4001 bp, Homo sapiens
atttgaacaatgttctgcctgtctcctaatcccaccaacactagctctgcccaccaccccttctttatttttaaactcatcactaaataactctccaccctgcctgcatcccttccttttcacccagttcccttctgctgctccccagacccacctcatcagtgcccaaacaattcgattttcgcttccgtcctggctgggctgccactgccctacgggcggctccattctgccgagatagtaggaaaagaagggatggctgtgaaatgagcctgaaaaaagccaccagagagtagaagagaggaagagaacaagagatggtttggggaactcacctggggaaaaaccgaggccggggctgtctcgctgggcactggagttgctggtgaaaccacctccaccttccgtttctgcagagagaaaccaacaaaggtgggtcagaaggtagagaaggtgggacctgagaagaaagcaaggtccctggaattgctgagggtaccgttgagcggtggttgggctgcaggcaggagctggaggagagcggctggtcaggctcgccaccgggaatggcctcccgctccttgggcaggttgaagcggagtgtgatctggaccgggattggcaaggtcttcccgctggcctgcgccgaggccggctgtagagataggtccagggtcttcctttggggcggggatggcagtgggatggggaaggggaagaggggtccctcacctcaaaattatcaaaccccaccctcgccttctgaaggacacaggactagctactggactctgggagctacatgtgcaatttggcccccatcctttgcaagatgaagtcagggtgagagggagccgcctcctgcccatccaggagctcctaatgccaacagacaagagaaataggaggcaggagagaaaaggtgaagtgggggacctactcaccacctctctctctggagagccaggacgggacccaggaagtccgttcttagtgggggtcttggcctctttcttggggaactggatcttctttaggtccagccgctcatgcgtcacccattcatccagacgtttgttgactgtagcagtggggatggctcaggacagaatgccaaagactgtcccccaaccctaccctgatgccccacctcaggcccagaactcacagtcaatgtaatggacgtagaaaagcttccggccactgatgtccttcacgctcaggatctcggccagggctatgagaatagcatagacaggggccttagacaggccaggctatgagactccacccttccacgacctgaactccacccccaggccggatccctaagctccagcacttaggtctctcctaagcctccttcagtcacaagtgccacccctttccaggccccgccctgtacctctcggagcagctaagagccacgccccttcatcaaagtatctgcgcctcgcccgccccataattccagacgcccctccccatcccgggatttcagttgactcccgcccctcgccctcaggttccttagtcccgccccccaacgtcactcacgccactcatcttcgttgtcctggttccgccgcagcacgggtaggcggcagccctcgattatctccccctggggagacagcgcgacgccagggtcggctactggggggcctcgggctctacccacctcccctggctccctccgccccgccccgggcaccggactcaccacctccgccatcttccctccctccactgccacttccggcccctctgggagacgtcacttccgggaccgagcgccctgtgggcccgggcctcacgaagcccctgtagagggggacctttgagagacaccgcgacccagctgcgaggggcaagactgcccctgtgactcgggggaaaacggagtgttacaagcctcaggccgagccctaggtggaaaccccataacgtgcacagccagtggcggtctactgagtccgtcacgtgacgcccaccgggtgcgaagctggtcacgtgtatgcggagcgggtcacgtggcaataccgtttttggctttgtcggagggaagtcctcgggcgtctccttgtggcggcgggaggtgttgccgggagtcaactgggcgcgagaggctggagaaaggaagtggccttagaagggttcgaacgctcccccaagtctgtggacttcattccgtaggcaagaggactcagggaagattcctagctttattttgtatattaggcttttttaatttgtatatatttatttttgagacggagtctcgctctgtcgccaggctggagtgcagtggcgcgatctcagctccctgtaacccccgcctcccgggttcaagcgattctcctgcctcagcctcccgagtacccaactaatttttgtatttttagtacgggcggggtttcaccatgttggccaggatggtctagagctcttgacctcgtgatccgcccgcctcggcctcacaaagtactgggattacaggcgtgagccaccgccctcagccatattaggctttttttttttttttttttttttttgagacaaggtctggctctctcgcccgggctggagtgcagccagcgaggcacaatctccgctcactgcagcctccccctcccgggatcaagtgatccacctcaggctctctagtagctgggactacaggcgcgcaccaccaagcctggctagttttttaaaatttttgtgtaaacagggtttggagactgggcatggtggctcacacctgtaatcccagctgcctccagtctaatcatgagaaaaacatcagacaaatcccaattgagaaacattttacaaaataccccatgaatactcctcaaaactgtgaaggtgtcaccggtggagggtgtacaggttcttggcatctaaaataatgggacaaaacggctgggcgcggtggctcacgcctataatcccagcactttgggaggccgaggcgggcggatcacgaggtcaggagattgagaccatcctggccaacacggtgaaaccctgtctctactaaaaataaatacaaaaaattagctgggcgtggtggcaggcgcctgtagtcccagctactcgggaggcagaggcaggagagtggcgtgaacccgggaggcagagcttgcagtgagccgagattgcgccactgcactccagacagagcaagactctgtctcaaagaaaaagaaaaaaaaaaagaattggacaaaatgcacaaagcaaggaaggaatgaacgatttattgaaaatgaaagtacactccagtgttggggccggctgagcataggtgctcaagggcccagttacagaatttgttggagtttaaataccctttggaggattccattggttatttgggatatgccatatgtaaatgaagaggatgaagtaaagttacaaagtcatttagggtgtactccctaaggagaggatatttcctgtcataactgaagtgtgaatcagccttatatgttccctgcctccagaccctattttcctgcctcaaaggtggctgaacatggtggcttacgcctataatcccagtgttacaggaaaggggtccccatccagaccccaagagagggttcttggatctcgtgcaataaagaattcagggcgagtccagcactttgggaggccaggcaggtggataacctgaggtcaggagttcgagaccagcctgaccaacatgatgaaaccccatctctactaaaaatacaaaaattaggcaggcgtggtggtgcgcgcctgtaatcccagctactcgggaggctgaggctggagaattgcttgaacccaggaggcggaggttgcagtgagccaagatcaggccactgcactccagcctgggaacagaacaagactccgtctcaaaaaaaaaaaaaaagaattgagggcgaggccataaagtgaaagcaagtttgttaggaaagtaaaggaactcaatgctggttgcccatttttctggttatttcttg

SEQ ID NO: 914842 - DNA, 4001 bp, Homo sapiens
tgaacagagacattctgtttggtatgagatttgggcctgaatgatacagaggaaacaaggaatgtgataatgggagaaggggagaatattctagattctagaccaagtacaaataatccctacgttactgtctgtgtattaggctccatagatctaatacacagagatcttgctcgatggtaaaataatgggatatgaattcctgaatttaaacaaattctctttctgagctcattgtctccatcagtaataactagtgcacagaacatgtgcaataacgtacacagaagtgttttggaaacagaaacgtaatgtatcaaagttataaaaatcagtttaaaacgacaagaaggaaaggttatatgattcttagttaaaaatggagaagtgagttatgatcattgctgatatgggtattagtatcacttacgtatctttacactgtctcttattgtactttttatgcgtatgatttatttgccttaccagattgtaagctccctgcagctggtaagcagattttcaacatggcagctgacacaggcttttggttagctaagatgatatattaagccaataattcgttttactgtcctttggggatctgaatttgtgtgtgtgtgtgctcagaatcccatctactttcgagggattcggggggcttatgatatcacgaaaagttaatgaagacaagtatagataaaaacataatagaacccatcttaaataggacagaaatcataggcaggtaattgtgttaattactaccgctggcctttggctgatatttccgggcagtcagaggaagaaggaaatcggctgaatcccgcagtaccgcactttaatcgacctccaggtagtcatttacagtcatctgcagagaccaacttttccctggaccaaaacctgcagggcacttggatcgcgtgggctttcatacgagagtcaacaacagcctacacggaacaactaaggaaacagacatacatcaatatgacccttcgcaaagtctgagaaaataactgagcaaagttatttacttgtttctgttgctgttagagcaaggacctctgtcatgatggaaacactgatacctcaacaatggaatcctgttttctcgctagtgctctagcccaggcttggcaatagcaaaacagcacctgggtcgcttcatcgccccaaataaacagccagcattagctcagctgctcgctggcagcctcggatccaggcggggtcagtgttgcgcactggggatagtgcctctgctcggccttcggagggagggtttcaggtaggctgctgctaagggtcgggagcgtactgtgtgagggtgggtcttaggctgatgcggatgggggcagggaaagaaggaactcagggctgatgcgttgcacaactgcagggggcaccactgcagaccccctcctagagatggaaacctctcgtgccccgtacacgaagcagctgaagccaaggacattctcttctctgtgggtcacaggggccaactcagaccctgagaataagggctaccatcccactcctccctcagaccccggagctcacccacctgcaactgcagtctccgaagtctccaccccagtctccctgcctccagaggactggttgcgattggcctgcaccgctgtcccgttaactcttccgcaagtgtgagtggcgtaactgtcgggctcttggccttggtcccgcccttcgctcgcctccgaagcctcgcctacttgacgtcatacaatgccgcaaagcgcagggctgatctccgtctccgcccccagctgctttctccgagaggaggtggctgagtcgggggcgggctgggagggctgtcggtgggccagtctgcgtagcgacggcccgtcccctgcgcacggacgccgggaagaagggggtggggccacgtttgcgtccgcgccatcaggcccgagatagcggcgaggtccgctttcagtgtatggttttccctgccaaacggttctgcttggtgccatccatggagggcgtgcgctgggccttttcctgcggcacttggctgccgagccgagccgaatggctgctggcagtgcgatcgattcagcccgaggagaaggagcgcattggccagttcgtctttgcccgggacgctaaggcagccatggtactacaggtcttttttggtatttagagcctaggaagcagatcttgggggaggcgggccgggctgtggagacccgacactcccgcgctggccgcgaccctctcgctgtggagcctgtggccggcccgggcgacagcagccggcgctgcggagttgtgggcgacgcacggcctggtttccacggcctttgtaaccgccttggaggccgcgatggctgtaaacattatctctttccccttgttatttcaaatggagaccctcctaaaccatgaaataagtgtagggaaggccgacaaaattgggtttttctgtaatgaatgtttttatgtctttatctttaaatgttatttttttttgtttgtgtgcgttcatagcctatgcttattctgcctgttaaatatcccatcattctccaaggactccctgcacgtggtaggccctagaaattattgacagtatgatttagtttgtagccctgcgctccccgggattgaagccaatgaaattgaagccagagaggataccttcctcactagatgccatgggaaacagtattttacgtagatttatttattttagctatgtattttgaagcaacaaatggaaaactggatttcaaaacaagtaatctgtacaatatggtgcaatttgaaacaaccgtgaattaccatcatttaaaagacagtcctttcttaaaaatgtcccatattgaaacactttctgtttgaaatgtagactagttgataatttttaaggcacattggtgaaaattttttactcatttgtaaggaattgtaaaataagctacatttaaaagcctgcagtttttaaaagtcagtgttagaattgaagaagaaaaaaacctgaaagatatttttaaaaatatatactttgtcatcttatattcttgtttttttgtgtgtgtgtttttagtaattatttaaaaaataataattggaggtgggagagagcagaacaagataggtcatgccttgctaattgttgaagctgggtgatcaatatatgggatctagaaatacatatgcacagatgtaggtacagtagggttgctcactgcagagttgtttttgacagcaagtctagagccagcctaaaatgtccaataaaggggaaataatattatgaaatatgctacagttaaaactgcatggaccagacgtgtgtgtacagacataaaatacttcccaatacttataaatttaaagcttatatgtggtagaatactgcataagtataatctcatgtttgtgtttatatgtagagttagcaaaaacatgtaaatgcacatatatttaaatacagaaaagactgacaggatgccagctgttaactttggtcactagcaaaggagagggaattgctaaggcgggctttaactttttatctacttaagcattgcttaagtcttaattaacgtgtgtttaatacttaagtattttgaaaagttttaaaaatgaaaattttagaaaccaaaaaaaagtactattgcatacagtgtgcttgtatctttagtagacatcagtacataccaaatgttttatgtacttaacaggctggtcgtctgatgataaggaaattagttgcagagaaattgaatatcccttggaatcatattcgtttgcaaagaactgcaaaaggaaaaccagttcttgcaaaggactcatcgaatccttacccgaatttcaactttaacatctctcatcaaggagactatgcagtgcttgctgctgaacctgagctgcaagttggaattgatataatgaagactagttttccaggtaacgttgcatttttctagtatggcagttaagtgtctcgatgcctc

SEQ ID NO: 914843 - DNA, 4001 bp, Homo sapiens
cctggccaacctcacaccttaagtatggctatatctcacttgcaaggttaggattgtttcctaacgttggcccatcactaaaaaagtttttagtcttagatatcttgccccatcaccaatttacataggtaattagacccactgggacatacgaagtacaggataaattagagtataatacaaatcactcctcactactctgtgtggttaaatgttgtgctttaattttcctgacttcttcctctaacgcactgtgtctctgacagcaattacactgaatctcacctcaatctttctcagcaggttatctcagtaagaatgcaggaataataatgtaaactaacaccaggaagcttgagggttcttttctcctaaactagaacattcactgaacatcatagccaagtaactgggtatggtgtgtcccctccctaaacttacccgagatgatatctgtgagtaagcggtggggcaagtggagaaattcctctgtattctgcagctgggccaggtgggtcttggcacagtgcttggcagccgtatagagctcaggatcactgtgccgatctgccagccacatcacctgaaggcagtttcccacttgcactgtgcgggccaaaaaccgagagcattcctcaaagagagatgtcagctgatacatgtctgacacctcataaatttcctgcaactcctcagctcgaagtttcacagtcccatggtagatataatcaaccaggagctggaaaacagactcgctgacatcctgcagcacaatcacccggttgtgggcctccttcaggttggaagtgaacatggatcggaagaagcagctctgagctgagaggaccagccgatggagctgaaactcccggccttccaccgaaatggtgacatcagcaaagagctcctcctctagacacagtttcatgatgccttgagccacacggcctgaatgtgaccgatctttgaaagtgtagttcacaaagtagttctcatccatggatgctccaggctcctctggtgattccatgctagccaacttctctctctgccagctgtctgcaaagcaacaccatcttgagtaacctgaggaattcacagccatagtctgtgaatccaactgtccaactcagggagggaaaaggaagaagtgagagcaaagtgggtccagattggccttagtcctggccctgtccatgatgtccctgacgctatcctttaaccaaatctgggttcgttatccccagtggcgcccctccgctaatgatataaataaaagttccaactctgggtgttttcctgagaaaacacggaataattcctttccataatgttaacaaaagacttgggatttaggtcaatatatgaaagcaaagggctgggagaggcctgtgatcgtaaaagccttactaaccaaataactggggcataaaactagtgaagctcaggggcagtagaatcagacaaaaaggacccctggccccggcctagtggccaggtcctctccttcccagcgcatggagttaagacgctccatatgaagcctagcctgggatatccgtgggtcttacatttgctctcttctgagctgcttcccccacacttccccgctcgctcgaaagactccctatggctgcgtcccagaacttgagtccatccgcccccaggccggggcactgggaggcccatcaccctgtgcaatgtccccgctccaccttgagtcgtcttggaaacggtcgccagggaaaccgttcttcccgctcaggcccgcccgccctcgtcaaaagcttggctcagagagcgggggaggggtgtgtagcgtagaacccaaaacgcccgccccctcccctcctctcacccgcctggttcttcagcgtcctcgccttctctctaggctctgccacaaggagctaggaccacgctcacctcacgatttccctacctgcctgtctcgctttctcacctgcgttccctcctttcatcccggagcccggaacctccgcttccggctccacgtccgcccggaagaagatctgctgcacacttccgtttccggtccgtgcccttggggctccgtgtcctgctgtctttccgtccgctgcctagtctgcatctgagtaacatggcggcggcggcggtagccaggctgtggtggcgcgggatcttgggggcctcggcgctgaccaggggtgagcacgggcagccagctgagaccggggtcaggcgcagcggcgtgcccagtgcagagagctcctcagggctcatcccgcgcgtctgtgccttttatctccctgtgcagggactgggcgaccctccgttctgttgctgccggtgaggcgggagagcgccggggccgacacgcgccgtgagtatgtgcgggcagcgctcttctctgaactatcggcggggccccttagatgcctgtccttgccctaggatgcccttccctacgtcctcctggcaaatcttggagatctgacttgcagtggtcttcaccctgcatgcagaatcgagccctccctgtgcccttaggcctgttatggccctgattgttccttgtccatttcaatcatcccctttttgtctgattaaactgtcagctctttgaaagcaagcaatataacctttaggcctcagagccctgtaataatagtacctagcgttaattgagtgcttaatgtgtgcctggaacctcgctaagcgttttagtgaatgatcttatttcgtcctcacaacagccttatggggtagatagcatcttactcttcttactatagatcaggaaacagtccaaagaattaaactgcccagggtcaaagacctagtgaatgacaaagtaggcctgcctgctgccagaggcagaaacacctaaccattattctgtagcttgtgatgtgtgattgctcagtggtttagggttgcatgaatgagtatgtacatattatgttacagtcaagatacacggactgggagttaggagacctggcatttctcctttcctgggttttctcattgacacacacacacacacacacacacacacacacacacacacacacacctgggcctcagttttctcattgacacacacacacacacacacttttaaggagagagagagtctgtgagggatcttcaagccctgaagttcttagcttgagaacctggtataaacttgcgtgctaaggagctacagagaggcaaaagttcagttcccatcctcaaacagctcttagtctgacaggagaactgagactactgctttagcagaaatgcaggcaatgtgagggaagaactgtggagtaattttgagaagaggtgaacaccccagctgctatagtaagagtctttctgaggaccgtgtagttaaggtggcactttccccaagttttcatcactgtattccctagaagggaaacctttcacatgcacctttctcaaggtgcttcagggagcctttcctggatttgacatcccttacaagcctaagagactgcatgcagggctggcttttgccttctccatttcttttttaaatatgccttttccttccagccactgtcagaccacggaatgatgtggcccacaagcagctctcagcttttggagagtatgtggctgaaatcttgcccaagtatgtccaacaagttcaggtaatacttactaatgttatttgggtctgggtcaagaaagaaccatgttcgcagggcatgtgggagtgggcagacttgtttcaaagaaactacagattcctccatcccaagcttggacttttctctcagcattaaaccaggtgactccagctgaagttagctgttccctcagtagctctttgttccctctcccctcactttcatgtgtgcaggtgtcctgcttcaatgagttagaggtctgtatccatcctgatggcgtcatcccagtgctgactttcctcagggatcacaccaatgcacagttcaaatctctggttgacttgacagcagtggacgtcccaactcggc

SEQ ID NO: 914844 - DNA, 4001 bp, Homo sapiens
gttaggattgtttcctaacgttggcccatcactaaaaaagtttttagtcttagatatcttgccccatcaccaatttacataggtaattagacccactgggacatacgaagtacaggataaattagagtataatacaaatcactcctcactactctgtgtggttaaatgttgtgctttaattttcctgacttcttcctctaacgcactgtgtctctgacagcaattacactgaatctcacctcaatctttctcagcaggttatctcagtaagaatgcaggaataataatgtaaactaacaccaggaagcttgagggttcttttctcctaaactagaacattcactgaacatcatagccaagtaactgggtatggtgtgtcccctccctaaacttacccgagatgatatctgtgagtaagcggtggggcaagtggagaaattcctctgtattctgcagctgggccaggtgggtcttggcacagtgcttggcagccgtatagagctcaggatcactgtgccgatctgccagccacatcacctgaaggcagtttcccacttgcactgtgcgggccaaaaaccgagagcattcctcaaagagagatgtcagctgatacatgtctgacacctcataaatttcctgcaactcctcagctcgaagtttcacagtcccatggtagatataatcaaccaggagctggaaaacagactcgctgacatcctgcagcacaatcacccggttgtgggcctccttcaggttggaagtgaacatggatcggaagaagcagctctgagctgagaggaccagccgatggagctgaaactcccggccttccaccgaaatggtgacatcagcaaagagctcctcctctagacacagtttcatgatgccttgagccacacggcctgaatgtgaccgatctttgaaagtgtagttcacaaagtagttctcatccatggatgctccaggctcctctggtgattccatgctagccaacttctctctctgccagctgtctgcaaagcaacaccatcttgagtaacctgaggaattcacagccatagtctgtgaatccaactgtccaactcagggagggaaaaggaagaagtgagagcaaagtgggtccagattggccttagtcctggccctgtccatgatgtccctgacgctatcctttaaccaaatctgggttcgttatccccagtggcgcccctccgctaatgatataaataaaagttccaactctgggtgttttcctgagaaaacacggaataattcctttccataatgttaacaaaagacttgggatttaggtcaatatatgaaagcaaagggctgggagaggcctgtgatcgtaaaagccttactaaccaaataactggggcataaaactagtgaagctcaggggcagtagaatcagacaaaaaggacccctggccccggcctagtggccaggtcctctccttcccagcgcatggagttaagacgctccatatgaagcctagcctgggatatccgtgggtcttacatttgctctcttctgagctgcttcccccacacttccccgctcgctcgaaagactccctatggctgcgtcccagaacttgagtccatccgcccccaggccggggcactgggaggcccatcaccctgtgcaatgtccccgctccaccttgagtcgtcttggaaacggtcgccagggaaaccgttcttcccgctcaggcccgcccgccctcgtcaaaagcttggctcagagagcgggggaggggtgtgtagcgtagaacccaaaacgcccgccccctcccctcctctcacccgcctggttcttcagcgtcctcgccttctctctaggctctgccacaaggagctaggaccacgctcacctcacgatttccctacctgcctgtctcgctttctcacctgcgttccctcctttcatcccggagcccggaacctccgcttccggctccacgtccgcccggaagaagatctgctgcacacttccgtttccggtccgtgcccttggggctccgtgtcctgctgtctttccgtccgctgcctagtctgcatctgagtaacatggcggcggcggcggtagccaggctgtggtggcgcgggatcttgggggcctcggcgctgaccaggggtgagcacgggcagccagctgagaccggggtcaggcgcagcggcgtgcccagtgcagagagctcctcagggctcatcccgcgcgtctgtgccttttatctccctgtgcagggactgggcgaccctccgttctgttgctgccggtgaggcgggagagcgccggggccgacacgcgccgtgagtatgtgcgggcagcgctcttctctgaactatcggcggggccccttagatgcctgtccttgccctaggatgcccttccctacgtcctcctggcaaatcttggagatctgacttgcagtggtcttcaccctgcatgcagaatcgagccctccctgtgcccttaggcctgttatggccctgattgttccttgtccatttcaatcatcccctttttgtctgattaaactgtcagctctttgaaagcaagcaatataacctttaggcctcagagccctgtaataatagtacctagcgttaattgagtgcttaatgtgtgcctggaacctcgctaagcgttttagtgaatgatcttatttcgtcctcacaacagccttatggggtagatagcatcttactcttcttactatagatcaggaaacagtccaaagaattaaactgcccagggtcaaagacctagtgaatgacaaagtaggcctgcctgctgccagaggcagaaacacctaaccattattctgtagcttgtgatgtgtgattgctcagtggtttagggttgcatgaatgagtatgtacatattatgttacagtcaagatacacggactgggagttaggagacctggcatttctcctttcctgggttttctcattgacacacacacacacacacacacacacacacacacacacacacacacctgggcctcagttttctcattgacacacacacacacacacacttttaaggagagagagagtctgtgagggatcttcaagccctgaagttcttagcttgagaacctggtataaacttgcgtgctaaggagctacagagaggcaaaagttcagttcccatcctcaaacagctcttagtctgacaggagaactgagactactgctttagcagaaatgcaggcaatgtgagggaagaactgtggagtaattttgagaagaggtgaacaccccagctgctatagtaagagtctttctgaggaccgtgtagttaaggtggcactttccccaagttttcatcactgtattccctagaagggaaacctttcacatgcacctttctcaaggtgcttcagggagcctttcctggatttgacatcccttacaagcctaagagactgcatgcagggctggcttttgccttctccatttcttttttaaatatgccttttccttccagccactgtcagaccacggaatgatgtggcccacaagcagctctcagcttttggagagtatgtggctgaaatcttgcccaagtatgtccaacaagttcaggtaatacttactaatgttatttgggtctgggtcaagaaagaaccatgttcgcagggcatgtgggagtgggcagacttgtttcaaagaaactacagattcctccatcccaagcttggacttttctctcagcattaaaccaggtgactccagctgaagttagctgttccctcagtagctctttgttccctctcccctcactttcatgtgtgcaggtgtcctgcttcaatgagttagaggtctgtatccatcctgatggcgtcatcccagtgctgactttcctcagggatcacaccaatgcacagttcaaatctctggttgacttgacagcagtggacgtcccaactcggcaaaaccgttttgaggtcagttgggagatctgagaaggttttggggg

SEQ ID NO: 914845 - DNA, 4001 bp, Homo sapiens
caaacagaggtcttcccaatcatacaccccttcccaatcatatatattttcctagggcaagaagggcatttgattgcaacacaaactccagaaaatacaccacagagggcatctcacatgccatctcccttcctttgcctgactcctaacatcatctcatactctgaaatgtttaccctcaaggagtttccaaatccctacttacaaaaccatcctggggtgacattcgcagtggagtgtcaggccaacatcctttcaagaccggtacagaccaaatagcctgagagtttgctcagtttcttccccaactcccctaaaacaattataatttcaatgaagccccaatgtaacccaagttcctgtatagttgaatactacacacactgccttcccacccaactgactcccagaaggtcatgaattagcgagtcttctaattcaccatcagctcttcgggagttctagaactgccctctttctgctctacaccaaataatttcacatttatttatttatttgggattgttagtttttgtttatctaactccctcctccaccctacaagtagcaaattgccttccttttaatcatctactagttacttcactatccctgatctagaaagaaagggagagagaaagaaaagaagagaaaagaaaaatcattcctcccagcaaatcagactggtttaaaatctctcttctttctcaaggtactcttgttaggagaatctattcaagccaattcccaggagcctttatgagagagatctttgcagaggaatttgtcttcttctttaacaccattaaactaataggattttgcagactacctattccccaatcccggcgcccccaaacaacagccaagcatcccgcccctcctcctctcacccctccaacaacaaggctgttcgtctctcagtgctaattcctgcaactgtgtcactgtcagggtggtacctgaaccttagagagagagagagagagaaagagagagaaactgagagagggaatcagaaaagccaccaccgtgagaaatatacacttcaacgcacgccatttatgcagcccctatgtatgttgctcaaatgctcggaaaatgcacgcaaatccaaacgttggaagaggcagcaattcagacccgttcaccggctgttcccaaaagaagggaaccggtgcggctgggaggaggcgaaacgatgctaaatcttaacccccctctcgttgggaaacgacatctttaatcgcgccctcgcctccagacctcggttcccgctccagcacgttaagcagggcgcactcaccgcatccccgggtttgggaaaataacaactgttggccccccggagcgccgcgcagcatccgcacctcccttctcccacctcctggtttatttttaaccgccttccattcatgcccttctgtcacattcccgatattatttatccctcaaatgtccactgtttcttaacagccaaaataagaaggtagaggaaagatacaaaaaaaaaaaaaaaaaaaaaaaggtatcatacttaccgttccccggcggggcgaaaaataaaaataaagaaaatccaccggctggcttgtttttccccctcaagctgcaacagctggaggaggggaagaatgatcctgggtggggggcggggggtggtaaaaggaatcactcgggtttggcaggtggaggctccaaatatccacggaacaagttctgttgcctggcccgaggggtgcacagagtcctcgcggctggagcctgggggtgggggttggggctgccccagagaagaccccaagactcctggttcctctggagttcagcacaggagggattgcctgggaaaggaagtcaaggttcccccgaaaagaaacaaaatcctagacagcagcgatcacttgttaagcccgaattcctcctccaacatccatccctctctcgctctcgctggctgcgggagcagcacacgcctcccctggccgcgaacgcgctctgggcgggggcggggccagggccgaaccgagggtgtggcgttcgcgacggtcgccaggggcgcctcccggcgcggcggggcgggtgcagtcacgacgccgcgactccccgcaccccggctgggccccccgactcccaggatctgggatcgattccaggagtctttggctgtggtccccacaggcgaggagcaaatcctggagaagtgtccccgttggggccggaataggggtttcgacggcagcgcgggagtccccagagggcttgggagcggggagctccaatgggaggtgcagtcccgaaaatggggtcctctgggacatctcctctacctaacttgctttctctatatctcccctcgagccccgagccccgtcttcttttccccaccccatcccctcccaaagcgggtttgttgggttgggagccgggtgcatctccggcgaggccacgggcggggagccctcctgtgcctgccagagcgcccagatccctcagtctccgtctcctttgcacacaggagttgggaggcttcagcgccggggttgggcctcaggggcgcggaggagaccgactttcaacctgtattcaatcccgggcaggggaatgttacagaaattggaatcaggcccaggctaggggctgcgcacaggaggcagcagttctaggggaggagggttggagagatgagtaagttgcagggtgggccaggggctgagggctttggaaggcgggggaagagcccgcagccaacctgttgctgcaaaaacaaatacggctctggtatcgactccctgagggctctttggatccttcaggacagaaatcaagggatatcgcagcaaaaagcaagtttttttggttttctttctttctttcttttaattaaagcttgtgcgcacaagggagctaacaccaagaaaaaaaaaagtgggctgttcctcgaagtcagggtgtgggtttcttttacgggcctctcccgtaaggggaaataaggagaactatagacagggcatgtagaggtggagtttttctggtgcatgcatggtggtttaacatgcttcttcataggacgtatgtatcattagcatcttaaatctccacctctgggaaagattttttgcattaaattaaggaaaaggtcactatgagttgaaagttaaacctagccgccgcgcatgccagggcctcgggcaagtccctggtcccctaaagccgaaacttctggttaatagcttcttgagcttttcatgctaattggctggagttacagtttgaggaagggtctctccttgtttcttgtttatttcttcggaccacatcaaaacaggaaagtagacagtttgcctgtctcaggcttgccagaatcaaccgggcgagaggtttggctcccgggaggactctatcttagtgatctctcccactgcccacctccatttaaaaaaaaaaaaaaaaaaaaaagggttttgctgtccatctccaccccactcccacacacgcgagcgcgtgcgcacacacacaaacaaacacacacacacacacacacacacacacaaataaccagaagcccacgtggcgacggggtctccctagacacctctcccagctcgcccgatggaccaagcaggcagtggcagcgctatgccccggactgctggagcaaatccgaccttgggctggttggttggcgccaggactgtcactgtcgtcctcggggcggcagctttgttcaagggctctattgggcctcctccttttgtgatgctcaattaattattaagggaaatattcccgagctgaattatagatatgccttgcactcactcacctaaccgttgcgggctcggaaaaggacacctggagggctgctttttgttgctgtttgatttttcttttatcttttcaaataaccggacacacacacacaaaatcgaattgtaatcagtgtgaaagaaaaagaagaaatgaaacctggagtgcaccctggtttttccaacgtcttt

SEQ ID NO: 914846 - DNA, 4001 bp, Homo sapiens
aacacagactttctttgcccatgggcacttgaggtccccccaagtctcctccctccactctcctctgcaacttcctacccctccctagccctctacccctggctctggctcaggctccagtgcgcaggaggggagagatgcggagtaaaagacagcagggcagaggcagtgctttgcctggtagggggtgagggcagctcagggatgcaggaggggctctgctttaaattctctactctgcccttcccccacaggccttagggtctctctttaggcctctaaggacagagcccagtgaaggctgggagtgtctcttccagggtgggtggctgctaccagttcctctttttgggctcagtcactgatgttccagcagcaaggcccttaagagttcaccaggccccctcccccattttacagataaggaaactgatccagagaggccatctgagggaccaaggtcagcagcagcgtgtcctttcttcctaggaacaagctggtatggctataggggagtggcccatgaagacacgcccacctctcacacaccttctccttgcaggttcccccttaaggacccttaaggaccgaccccctctccccaccacgggatgtcccagaggaagcactggcataagcccagtgacccactccaacaccctccgctttcgacaaggaggaaggacaggctgtgatctcaggatcgggggctcagacggaccacccctaccttacagcccagccctccaccaacttccaagccaccgagattagccatggagatgccctcttgaccacttcctcaaaattgccggaggctgctccctgaggagggggtgtctgtctcaagctgcccagcaggcctcaggcctttttgggggaccatggctggctccagatgcgcctttacctggacaggaggaagggctcccagcttccctccccacactgaaatctcgagagcagtccatactttgacagtgcacctctgcaaagacacaaatgttcacgggcaggcgctcatgcacactcgaacatacacacatgctcactcattcccactccacactttacccacccaaatacacaccaccacacttacataaatatgcacacacaatctactcatacacacaaacacacccattcatactcatacatattaaacttggcaacacacagactgacatacatagaaaaccagaaccccggcggacacccttcctctcttaccctggtacgtgcacacatgcgcacacaccccctttcgattctgaactccctaggcgccagttctccggtccacccctgcccgcggggaggcacaggacgctgccttcccgccccgctcttctgatgggtaaattgtcacttacccgcgcgtagcgggacgagtacgggtcctcgaagagcgcccagatgcgcggctgccagcggcgccaaaagccgccaggccggccatccggggagtcactgagcgccaggcgcttggtcatctccagctcgtcctcgccgtcgcccgagtcgccagggccgtcggcgtccgcgtcgtcggcgctgttgtccagaggagcgccgccgaagctgtccagagcctcctcggcgtcgcggtgctggcggtacgtcatccagcagcagggctccacgtcggtctcgtcgatgccccagaaggccagctcctcctcgtagagcggcccgcacacgtcggctgggcagtgcagcttgcccgtgcggtagtagttcaggatgtgcgcgaagacgccggggtggcggtcgaagaagaactcgtcagcacgcgggtcatagtcgaagtggctgtgggcgtcgggctccgccagccaggcgagccgcgtgccgggcagcgtgcgcagggtcgagcggtacgtctggtggcgcgtgccgcccacgttgatcacgatgcgctcgctctcgtccccttggcccatcgcggcgcccccttaggcatggcgcggcccagcgacacccatgggagcggccgccagggggagttggcgccggggaggggggcgcgcgccctcttcccccctccccccagccgtcggggggaacagaggcctgcggctctggccaccccaacgagcgagccaagcctctccgggcgctttgtcgggtgccggtccaggggaatgtgcgcgggatcccaggggtctctaggagccagatgtgggagggagctggtccggcagcggaggaggcagaggaggaaagaagggagggagaaagggagggagaaagggagggagggagggagtgagggggaaagagggaggggggcgggctcagcagcgagccccgggaggtggggaaaatgggttggggggccgggctcccgtccccatctccgcgggaaaatggagaaatcggcacaaagcttttgggggaaaggtcagccgctcccggggccggactagaggccagcccccaggagggggaggggaggagacagggccgggaaattcgcgctcctctgtgaggtggtcgccgcggcgcgctctcggcgcgggggagatggatgccgcctgccttcctccctgcgtggccgggctgcagctcgggacgcagggcgggctccggccccctccctctctccttgcttggctgcctgctccccccggcggcgggcccgcctgcccgcccgccctcctcgttccttctccccgcctcctggaggagatggcgggccccctgggcaggggcacccggggtgttgctcgtgcggctaacgccgagcgctgctctccgtgagcccgggctcgagctggggttccgctgggctgcgctcggacttgggctcccgcggcggtgctgaagggacagctcccggcggtcgcggagctgcacggggccaggcgggggttctcctggctgggtttgatttgcggggccggcgggcactggctccggtgcctctgcgccccgcactccgctcctcgcttcgggcaggcggtgggcgctgccggccgagacgggggctgcggaggtcgggcggggaggcgggggtggcgggtccgggcgcggcgaggtgaggccagcgaggccggtgaggcgaggcgcggagcggccgctgccgccgccgccgcgacgctgctgccgcccgggctgctgctccgcttgctgctcgcccgtcgcctgctcgttcgcgcggtccgcgtccagcccgccgctctccggacacgggcacacggcgcgcgcagccgcactcgcccccggaggaaggcgccgcgctgggtcctaaaaagccctgattccgcgcccccctcccagccccgcaccgagcccggcctccctcaacctcggcgctgggggcgcccgccccgcgcggctcctgctgctcccgggggacccgcccacggtccgccctcggggaacgccactccaggggcgggggctccgagagacgtctgggcccgcgcccccgggtcagactgaggtgagaagggcgttggcaccctccccttgccttccaaaccagggaccatctgatccctggtgagacaaagctctcccggagttttgtcatcagagacaccctggcccggaccagtgctgaccgctccaaggaatcctttaataccgacccttctcgcggaacctggaggccccatgttccttccatgggtaatgtcttgcatgaaccccaacacacacacacacacacacacaccacgttatcctctacgccctccactaacaatcaatcctggacccctattaacccctttggactccttactgaccctgggccctttatagcttcagacagagggagtctcccatgagtgccacatccatccaagctcacggactctcccacactaaccctggatccctaggtggagaccccttatgaaaaggaccttctgccctcagaggtcagaagcagcaactgctcgtagtttccctgagcactgacacccccaccccgcacttcctagggcttcaactgccctgggtgataagctggtgttatgtctgggagc

SEQ ID NO: 914847 - DNA, 4001 bp, Homo sapiens
acctacccagggtgtggccacatacacccacccactgcacacacacacacagtccaactccccagtccctcagcctgtgatcttgccgttcaagtgttcctttcatgattctaatcttggctgtatgcttggctctgtgtccttgagcactgcatttacttcctctgaacctcatctataagatggggataatgatccctgccctgcctaccacacatgagaactagaggagacaagagatgggaatgttttagaaattgcaaacatacaagataattatcaggcaggctggtcacactgttttccttttctgtctccacatctttcctttccccccatattaccaagaacaaccatctctgtgtctcctttcccactccaggtctcctagcctcagaagcagccaggaggttcttattattcttcttgattcccaggaacctcaccttctccagaagccttcctgtttcctaccctctatgatcattcccgcagtcccttatcattgaggggtaccattctgtagtcctgtagctggtggagaacacatcagagggggaatcaggagacctgggttcctgcccctactaggccaacacgtctagccgtgcgttttggttaagtaactttatcactctaagtctatatccctctaggcctcattttcctcatcagtaagatggagtttcttgtcttgcttccctcttagaaggtattttgagcactcgcacattaagtttatggatgtgctttgagacgtatagactgagtgagggatggagaaggtgatggttatcatctcaaggagtcaagaaaatctgaaagcagcttctaggcccccagcatgggtcttcctccatcaggaacagacaaagtggacggatgcaaggaaataaggaggagctcacacgtttacaacatgcctttgtaggtgaagtggagagagccctgggctaggactgaggaaacttgggttctaattctgtttggtctctgttgtaaccttaggtaaatcatctcccctggggcatcagtttccctatatgcaaattagtggagaggattttaggagggatactctggtgggctttcacgcaagaactaaactcatttattttcgagataagagactctgaggtccaatccccctttccccttctgtcccatggggtatgcaggcaacaggagcaggaggcccgttttacaaatggtggcccaggaaaagcgagcacaaggcgcagagctgagggatgactgcccgggtttacacagcctgtaaactagaactcaagtctcccgactcccagcctcgacctatgttactggcagcagaagatgcttttgggagtcaccaggtttcccgggactaggtcagacagggtgaaggacacagtgaggtgtagagggaatgggcaagtcagctccgcagagccggtggctccagccaaatgagactgtgctgggtcctgaaatgtcgtttctgcgtgtgcactggctgccagctgcaagtgttcgcttgcacgtctgtgggtgtggaggaacttttcttgtggccgtcttgagggctgggaataacggcgcaagtccccacggtttccagacggggcgcgcagagcccagctccctactcccacatgctgctccacgatcactgcgctcgggaggatcggggaggatccgggaggactagcttggtatttgcagcgcccacccctcccccactccccctcggttccacagtctcacggagagcgcgccgtggcccttggaagggaggcgggaagacccctcatttccaccccaggccgcagctcagccttcccagctgggtgggtgccttacctgcctctcagcaaggctccggggcgcccgtttgctcgctggacacggcgccctctgaccgagggtggcccaagcgctgcgaccctgtgcattccaccagccccgttccactccgcgggtgcccagcaccgcccagcgcgctctctggctctgggctcccacccgcgctcggctcccttttccctcccccgggcgtcccctccccctgccccgcccgggccccagcacacccacttctccccgggctggcctggagtgcctccgcccagctccttggcctcccccggctgtgggctccgacccttccgtcccctgcagcgcctgcttcctggaccagagaccgaaagcctctcgctccgctgggcctcagcaagcccagcatgaggccgatctccaggagtcggttttgctccagtgtggctgtgtggtggtgggcgagtcgctgcccctcactgggccttggcctggctgtaaagttggtacagttcctccatgcattcttcacaggcttatggttgaggtcagatgagacctttgagtccaaagtattaaaaccaaagggtcaacagcaaaataatatgattcttacacaaactcttttccacacaggacgcagaggcccagttggagaagggatttgcccaggtagcagagcccagacccaaaatccactacacacccctctgtctctgagtagcaccagcaaatgtttcctccaccaagcctcaaaagttcgtgacagtgcctgaccaacttgtgttcagccgcaccttactcatctctgtcccagaacagtttattttcccaccaccatgccctcactcaaactgttgtttccttgctggtgacattgcaggcttcagagaactggggcagccggggcagctgaggaataagagccaggaggctagtggcagaggaagggacagttgcagagaatttctccgggggaccctgtggggtgcccttttaccagctcactgcctcagaataattaataacagcctcaggccagctctttcactcccttgcaaaggtctgctccaggatatctgaagcacatactctcaattacagaatcccagaatatatctaagaagtgctatcgttttaaaaagacctactacaaggtgggtatattgtatattgtatacaatatacaaggtgggtatattgtacccaccttgttttgaccctactattcctttttctcagtctggagatcacctctcagaaaagtcatcctaatcacctaagcatgcaatctcagtttccttccttccttcctttctttcttccttccttccttccttccttccttccttccttcctttagacaggatctcactgtgtcacccaggctggagtgcagtggagtgattatggctcacagcagccttgaactcctgggctcaggtgatcctcctcccttaacctcctgagtaactgggacacaccactatgtctggctaatttttgtattttatagaaattgggttactccatgttgcccaggctgatctcgaactcctgggctcaagtgacctgcacacctccacctcccaaagttctgggattacaggcatgaaccactgtgcccatcctgcaacctcagttttcaatctgcctaagaatcccctggggagcttgttttactaagtagacttttgggctccactccagaggttctaattcaggaaatctggagtagagcctagaaatcagcattttcaaacaagatttccaaatgactctgatgcaaatggttcttgagactagccatgaggaagcagtcctggcttggtcagggttctttctcagatcctgcccacggccttgcatttactctgtaggactgtctatgacagttatagaaagtaaccatttgtccaccccatctgctaggttgtgagttctttgaagatagggattgtcttttgttctaataaaatcttagaaccaaagtcttagaatcatatcatcttagggttctggaatgtaaattggaagaactctcaagagtttcctagtcaaatccctcatgagcctaacagattctcccatttctttatttttggaaacatatcacccaggctggagtgcagtggtgtgatctcagcttactgcaaactctgcctcccaggttcaaacaattcttg

SEQ ID NO: 914848 - DNA, 4001 bp, Homo sapiens
gtttcctgacctcaattagtctcacacaaccttaaatatgtttgtaataaccaattatgacctgtatttttatttattgaatattacttaaatcaccttctcataagtttagccttatgttaagcaataatttctgagaaatcacaaacttgaagcattatgtatgtttttgagatatagaaaaatgaataactgaccaataaaacactcatcaatatactacctaaatcatctatgtacttctattgatactcatatatcaagaaaaatcctaattcaattctgttctctcatttatcaaatgagaaaactgagatttagaaaatttaaataacttgtccaaatgcatgtacctagccagtggcaggatgacaactagaatatagggctccctgcctctagtctaggggagcttctaccactccgtgtctcagttatcaaatgttatattctaaagtcacacttccctaaaatattttcagacaagtattggtcatatttctttttgttaaatgctgaacactatttagaacagagctcagatccaaccagatggtctcatagggcttctccataaatctacaagcctgttcctactctctccccacggtttcccaagattcccaaaaggaatagtatgagagccaccatcaacacatctaacacttccttccctactccaaagctggaggactggggagcactgatttaagtaatactccataaagacagaccatactttattcattcctatatcacaattgctagcacagttgatgagtgcctactgtttattcagtaaacgtaaatgaaataattcagtgaatgaattacatttttcaaaatcctatttgctcaattgattttttatagatgacattactgtgacttccattgtacagcaaaatggtgaagggcctgtcccataaacacctgacagtggtgaaacccaaagtcataaacgctagattacctcctcccccatgcccaagaatatcaaggtgtgcccaccctggtccgcaatgtcttcagggtatttttcattaaatgcaaatatgtttttaaaatagatttcaaaatcccccttgaaaaatgtgtttattcgtaagaactaggaagcgaaaccaactgagtgatacattttaaataatagtgatatcccacagtgtcttgttcaaggccttaacccagctgaaaacacaagaagccaacgccaagtcgaagcggtgatgagaaaaccacagctgtggtgatttgaaatgttgagggcaggttctaaagacataaaaaaagaaaatgctgccaagagaataaacagcaatgcacatagtcaagagggccctcctctcatcccacactgccctcactgacctcaagtccccagtgaggattaggggatggtgcatgtgaggtacagagaaggaaatggtcttctcctttccttgtacacacatcctttaccctggtctacacccatgtggactgacctctctcccaggtgcattcagggtcacactgtttacccagctctccagagagtgactctcagctcaaatagtaaattctaaaaccaacatttatcaattgaatccacattctctttgtcatacattataattccagagatggctcctaacacaccaacttctgagtttttttcccagcaccctgctcctctagcctcccttaatttcattttacttttaaaggtaaagaagatttctgtagagtgaagaagtaccccctgattgatcacttgaataacgttgagtttccatgactgcattaatgatgaaacattatctgcctggctttccagagaggtgatttccccagcctccacttaccaacgtgtcaaacacattccgactggaagcattcatggctggaaaaagcaaggaagtggtgctggttgttggtctttctatgcagactgatttcttttagactcagcctaatttattgtaggcgacagtcagtggactgacgctaatttgtgtaaacttggaaacacttaatttgatagtggagtcgtgtgatttaaaccaaggcaattggttgttctcagaccaagccccaagctgaataggtattttttctttccaacatcacatggcttgaataccaacatgctaagacatgacaagccatcagctaaggtctctgggcagcaggcatggattgggttccagcattgccttcctctccttggccacgctctatcgctcacttgtttctcctaaaagttgtgcctaataacaactggccggaaacacttacttatcatcaatctcccggcctattctctgaaacccactgaaatactgagttttccaagggttcacaaagatgcaggtgaacatacagacataagtacatatttacaagacaaaagtaagatcacaccaggaagaaacaagataccatgttaatctctccatacaacagttatgtaagaaacagacttaaaagaagtctttattgttggaagtctttattattcgggaaaacctggcatttactgaaggtgttttttacatgcactgggttagccaatgctattgatttatttgttcagagtgagagggattattcttagagaatgcaatgatacaggataaattcatccactaaccaaaactgtcattcacatggcagacctattattgcacagatcctactttttttagataatggcatttaatctaaccacagacagagccaatatgtattttatgaactcttaggtgattagagattgtccctggtgtctgggttatataatatgctcagtttttaggttcctttctattgaaatcagtaaatcttaatagcaagcaaagggctgcacattagctaatatttaccaaggtatttttagtggcttggcaaaacaagcggattacattactgccactttttctttagtgcctcagcattcttgttctataaacaatccattctcagaaaatagacattttgtgcacttcccaaacactgattgtatgcttgttctgtaggatttcaaagacaaatagaactcttcctgttctcaaggagttcatagtctaatggggaagtgaactaaggaaatcaaccacaaccgagcatggttggtataatgccaaaaagaataactttttaaaaagatccccatcagctggggatccaccctttctttgcaaacatacttcaactggcagaaaactcattgcatttatgtatacattaatttatttatcaatcactattcaatgatgatatgttgatacccaatgttgactgtgtgtgctgaccattgtgctagacatcagagaagtaatggactcagtccttgttatcatgcaactcccatttcagcagagagggtggtgcaaatgtgtcaataatctatgaaatgaccagtgatgaatgccaggatatgaaacagtgggagcactctggggagcacctattttgatgagcagaactgtaaccctgaggccaagccctgaagatgagttagagtcacatatagtagaaactctataaatatttgctgaatgatgataaatacattaatcaatgagaatataaaatcaatgagcttactgtcacttatatcacatagtatctggtggctcccactctaatggagatgtcttgtgtgtgcactactaaccacactacagggtagtcttctgtgtgacccaggcaggggcaaccaaggaaagaaaacatgggggagctgaaagaagttccaagtaagcaaataatggagcatagaaagcctcagtgagacactgggctgcaaaggcaagctagggccaacggactctgcacttggtgtaccatttgacaggtttttttcatagaacgaaaggagaaactgttataaagaacattgttctagttgtgcttcagagaaatctcattaaaattctaaataagtctgaagtctcctccatttaacagcccttcaaattcttgaaagcaaacatattttcttcctgaatttcctt

SEQ ID NO: 914849 - DNA, 4001 bp, Homo sapiens
caaagcatttcccaagccattcagtggtttcccaggacctagcatccaaaacacaatgagttctaattacaagcttgttgaaaggcaaatgaagaaaaaaacctgtatgtataataataatagtcatgagaaagacaagaatgaagagaagaaagacaatagtcatcactggcatcttaaattatggagccaaggggagaaacatttgggtcaccctcaggatcaaactgccaggccagaagcaattccactgagagggcaccaggaagccttcaatgcatggaaaccctggagcaagtaaaaggcaaagcatgtgagtcacagctgaatccctggacaatcactgagctgtgacaaggtgcagggtagactcataacctagcacagaaaaacacattactgaggaaaggaaaagaacgtgaatggggaattttgagacttagctcttcacagaaaagcatgcttggcaattacaaacttcttatattaaaaaaaatcaggcaaaccaaaagtcattaaagcattaaagattaagacccactcacaaggaattcacatactctgcttctttacaagggcagtcttgcacctacactgacttggtgcacctccttacacagaagaaatccaccttcatgacttgagtataaaaaaatgcttttctgatggcccatacgttcccagatatctccaccccatcatgctcttaaaagctgaagctgacttagtgagaatccatttacactaaacagtgtagagtaagacaacacaagccaagcccatgactgaagggagcccacaaagactgggcagctcctccaatgtaaccgaagattcaaccaaagattctaactgccctccagccccagggctacggaatggcccagggaaggcagcgtgcagctcgcaactaataatccaggtacaaccagcagatcaaaagcatccagtgagtggctctgccaagtccctgtccataaaaggtccatagcacaatcactatgttttgctccattttgtaagcccagctaaaaggagaaaaattcaatcatttttcctaaagattgctggttgcgaaagaccaactccttttaagcgtctatgcaccaaatctgtaagatacagatattgggagaaggggctccatacctgttcagagcagagataaacagttggcattcactggtatagagcaattgtcacaacagtcattaggaagctgaacaaatgttgagaaatccaaatgtatccattcagaatggtgcaaaattcctataaagtcctacatcagaaaatgaaagaaagacatttgggtgaaggtaatcaaaatgtctggctaactcttgccttttcctgatatatgttttccataatagaccccactagcaccttgatcctctaccttaaagatggaaacggcttggcagaggttgtgttactaggcaaggtcttgctacaattgaaaggatgccaccagagatgaaaaccctacatacatctctgccaccaaaagaagactttggaatcaggcatgatgcaaccaaagattcttactgccctccagccccagggctgcggagtgacccagggaaggcaagatgcagcacacagctaataatccacatgtaaccagcacaccaaaagcatccagtgagtgagttaaaaccatgcttctatctatcccccaggagtggacagacaagtctgcctagatttgaggcggggaaaagaggtctaaattttcacaagaattaacttctttttcctacaaagagacaatgaggtgtttctcctcttacctcatggattgctggagtaaatgtagaaacaaaaactcattttcttggtctccaagaaagcaaccagattctcgatgtgagcaagtccctgcacctttgatgcaagagtttggatatgctaggtgagggtacccgaggccctgttgattttatgagtctgtgggccagctcagaccggctgccaactcatctgtatgcaacagttctcaaagaacatagtttactttataaccggatccaacaagagtaggcgtggcagttaagtgagtgagataccaaaggtgttgagctaccaaggctaactaagaaggatttgtttatggaaccctggcttggaaccagaaggccggtatgctcatgtcgatgtgtctaagtcaaaggcatgaagttgaacacgtgcgcacatgaggctggatgttacagggcagggaagtaggggtccccaaggagcccctcacaaatgtctcctgtcctgtgaatcactcagtggccctagaacagcagtccccaacctttttggcaccagggaccagtttcatgggagacattttttccatggaccagggaggtggtgggggaggatggtttcgagatgattcaaacacatgacatttattgtgaactttgtttctactgtgtttacttataataattactttacttctattatattctattatattccttatttcattatatattatattctaatatataatgaaataatattctattacattatataatattctattctattctataatattatagaatgaaataatgaatatgggatgaaataatgaaatattctattctattatagaaggaaataatattctattctattctatgaaataatattctattatattccttatttcattatgtattatattctaatatataatataatatatattatgtattatattctaatatattatataacatatattatgtattatattctaatatactctataacatatattctgtattatattctaatatattatataacatatattctgtattatattctaatatattatataacatatattctgtattatattctaatatataatatatattctgtattatattctaatatataatatatattatgtattatattctaatatataatatatattctgtattatattctaatatataatataatatatattatgtattatattctaatatattatataacatatattacgtattatattctaatatgttatataatatatattacgtattatattctaatatattatataacatatattacgtattatattctaatatattatataacatatattacgtattatattctaatatattatataacatatattacgtattatattctaatatattatataacatatattacgtattatattctaaatattatataacatatattacatattatattctaaatattatataacatatattacgtattatattctaatatatcatataatatatattatgtattatattctaatatataatgaaataattatacaacaccaccataatgtcgaatcagtgggagccctgagcttgttttcttgcaactagacagtcccatctgggggtgatgggagacagtgacagatcatcaggcgttagattctcataaggagcgcacagcctagatccctcgaatgcgcagttcacaaaagggttcaggatcctgtgagaatgtaatgccgctgctgatctgacaggaagcggagctcaggcagtaatgtgagccatagggagtggtcaaaatacaaatgaagctttgctcacctaccactcacctccttctgtgcagcctggttcctagcaggccacagaccaggtgtggggactcctgccctagaaggtcaggctgacctgactttctcttggccattcaccagccaccctggtcccggggcaatgcagaactttacatcacagactttgcacttcagtggtggggttgagaccctgctctaccaactgcaagttacctagcttctcacctcagaagtctacagtgggaagctcaagagatagcatatgtaatacacttgtcattgaatgaacagggttgaaatccaacctactccgagtgtcagccttctgtcttcctcctcagcccaccccctagggccatctcccactaggagactgagggag

SEQ ID NO: 914850 - DNA, 4001 bp, Homo sapiens
cagcctctgcagccttgggcgggggagaggggtgagccagtcctgaattgggttgggaggagcagggacaaaaataacccagtacaggttcctgctgaggccagaaatagcatagtgacaagtgccttgtaacaccctggatgagcagcagggggaggctgagctgaggctggcccagcctcacaccaggccctggccgggctacataccacatggtccgtgtgtacacacgcgtgtggggggcccgagagaccatggctcaggacagggaatctggagagatgctgaacttgggcttggccttggccatgggcacgctgcgcttgcgcaggggcccgcgggctgaggcgagggtcagagcttccagtaggctgtggtcctcatcaagctggcgggccgtgcagagtggtgtgggcactttgacggtgttgccaaacttggagtagtccacagagtaacgtccgtcctcctcagctacaatgggcacaaagcgctggccccacaggatctcatcggccaggtaggaggtgcgggcctgggtggtgatgcccgtggtttccaccacgccttccaggatgacgatgatctcgaggtcctggtggtggtgcaggtcgctgggtgccaggtcgtagagtgggctgttggcatcaatgacatggtagatgatcagcggggccaccaggaagatgctgttgccacccacgccgttctccatggggatgtccacctggtggaggggcaccacctcgccctcggggctggtggtcttgcgtaccacctgcatgtggatggtggcgctgatgatcatgctcttgcggaggtcacccacacgtagcatgaagcagaggcggccgtggcgcagggcgatcaccgcatgcttgctgaagatgagggtctcagccctgcggtgggcttgggcagtcttcatgaagatgcagccaagcatgatggcgttgatcatgagccccacgatgttctgcacgatgaggatcaggatggccagtgggcactcctcagtcaccatgcgccccccaaagccaatagtcacttggacctcaatggagaaaaggaaggcagacgagaaggagtggatgctggtgacacagggctcagcagtgccctcgctgggggccaggtcaccgtgggcgaaggcgatgagccaccaggccatggcgaagagcagccagctgcacaggaaggacatggtgaagatgagcaatgtgtgtggccacttgaggtccaccagcgtggtgaacacgtcctgcaggaagcggccctgctcccggatgttcttgtgggccacgttgcagttgcctttcttggacacaaagcgggccctccgctggcgggcacggtacctgggcttggcagggtcctctgccaggcgtgtcagcacgtattcctcggggatgatgcccttgcgggacagcatggctccggtgacccccagggaggggcttcccccatcggaggcacccctcggacgtggcctagggcctcactgcagagtcctctcggtgggcaccttctcaccctggggctgcactcagcctgtgctggcctcacttctgagataactccccaccagactcttccttacctccacctgggtcccacttcacttcttaataccagcctcaggccgggcgcggtggctcacgcctgtaatcccagtacgttgggaggctgaggagggcagatcactaggtcaggagttcgagaccagcctgaccaacatggtgaaaccccatctctactaaaaatacaaaagttagccgggcatggtggtgcgcacctgtaatcccagctactcaggaagctgaggcaggagaatcgcttgaacccgagaggcggaggttgcagtgagccaagatcacgccactgcactccagcctgggcgacagagcgagactccgtctcaaaaacaaaaaacaaaacaaaaaaaacagcctcacccttgagcccacctgcctggcgcctagggagcccccaaccctgccggctctccacctggccctgcgtcctcccccagcttcccccaccagctgaccacccctgggcctcccgctaagagcccttctccccgcccagcctgccttcccagcccagctcagaacttaacacctccggatctctcccactaaccggacctcacccccacctccgggtctcccgcctcacctgtctggccttcgggctcccaggctccagctcaggtcctggccacccccgccccgtctctcctccaggtgcgccccctatgtcctactccacccctcccggagcgcccccgccgctttccggatccccctccagctctcgtcctctctgtctccttgggatcctgcgttctctggagtcaccaccccacccggctcaaccgcggctccccggacctgcgcgcgacccggcggggctgactccgagtcgcggcctcccggtccctgccgcccgcccgcgccgcggctcccgctccgcgccgggtcccggccccgcccgccgccgccgctgcacctgctcctgctcctcacgccacggccgtcgcctccccgccccctcccgccgcccgggcgctcgcggctggccgtcctcccgtctgtctgtccgtccgtgggtccgcggagaccgacctgggctaggcaggggtctaggacggcgggaggggggcgcacgaggagaggaacggggccggggaccgccagggggagcccgacctgcaccggagcgcagggggcggggccggagcaagcccccgcccctcccgcgcccctccccgcccccgccctccacctcccctcccgggactcacaacccggcctttggagtttttctgatccgcggaacccagaggttcctcctgcccacgctctacgaaagtggggggctgggagggatctgtgacccgccctcccagtctggggccgccgccctgtcgccctggctcccctcccccaatatccccatccgtatttgggtcagtaatccgcctctcggccgcgccaggtttgcaggttccccgggaaaggaggcgctgagaggcggcgccaccaatcccagggctggcggaaattaggcggtccgaggacttctcaacctgcagctgcttctctttgggggatgctcttaatcttagtcttgaatcctttgacaatctgatggaagctcagactccctctcattaaaaaaaaaaaaaaaaaaaaaaaaaaaaaaggcctcggcaggaaaggagcacagtttaacacctgctactgctgtggggcagcctgggcggctccatcttctcagccattccggccctactttaaagaaggtttgagccgaggccacttgctttacactttctcacacctgtcacctgacttcttccacgttaggtcatgggtggtatttaggcctgaacagtgtgttagggctgcctcgggcactgggggacccaggctcttggtcccggcatggtggtgtttctgttcaggcatcagcctgaggctgccctgtggcatggacccgggttctcagctgggagggaaagcctgctagatctctgttgttggaacagtaacggctttaccgctgtctgtggctcagatccttatggaagaacccctgaccatctgcggccattttgttggagtgggggcttgagacagggtctggaaaaggcagtgtggctgtgggccacagtgggggcaagatatgcattttatattggattttcctttctctccctacccacctgcaggcagagcgaacaccgctacaaaggatgggtgtgatcatgggctatattaacaaagatgcagtgtctaggaaggggagggtaaaatgagatgagcagagtgggaagctcaaggagacagggttacatggggaaatctctgaggcaactacaactgtccagccatcagaaaaggaaagtcccccagggatttgggcactattgcagaaacacctggccttgaaggaggatgaactagtagttttttgtggcccaaagggtagaa

SEQ ID NO: 914851 - DNA, 4001 bp, Homo sapiens
gggccaccaggaagatgctgttgccacccacgccgttctccatggggatgtccacctggtggaggggcaccacctcgccctcggggctggtggtcttgcgtaccacctgcatgtggatggtggcgctgatgatcatgctcttgcggaggtcacccacacgtagcatgaagcagaggcggccgtggcgcagggcgatcaccgcatgcttgctgaagatgagggtctcagccctgcggtgggcttgggcagtcttcatgaagatgcagccaagcatgatggcgttgatcatgagccccacgatgttctgcacgatgaggatcaggatggccagtgggcactcctcagtcaccatgcgccccccaaagccaatagtcacttggacctcaatggagaaaaggaaggcagacgagaaggagtggatgctggtgacacagggctcagcagtgccctcgctgggggccaggtcaccgtgggcgaaggcgatgagccaccaggccatggcgaagagcagccagctgcacaggaaggacatggtgaagatgagcaatgtgtgtggccacttgaggtccaccagcgtggtgaacacgtcctgcaggaagcggccctgctcccggatgttcttgtgggccacgttgcagttgcctttcttggacacaaagcgggccctccgctggcgggcacggtacctgggcttggcagggtcctctgccaggcgtgtcagcacgtattcctcggggatgatgcccttgcgggacagcatggctccggtgacccccagggaggggcttcccccatcggaggcacccctcggacgtggcctagggcctcactgcagagtcctctcggtgggcaccttctcaccctggggctgcactcagcctgtgctggcctcacttctgagataactccccaccagactcttccttacctccacctgggtcccacttcacttcttaataccagcctcaggccgggcgcggtggctcacgcctgtaatcccagtacgttgggaggctgaggagggcagatcactaggtcaggagttcgagaccagcctgaccaacatggtgaaaccccatctctactaaaaatacaaaagttagccgggcatggtggtgcgcacctgtaatcccagctactcaggaagctgaggcaggagaatcgcttgaacccgagaggcggaggttgcagtgagccaagatcacgccactgcactccagcctgggcgacagagcgagactccgtctcaaaaacaaaaaacaaaacaaaaaaaacagcctcacccttgagcccacctgcctggcgcctagggagcccccaaccctgccggctctccacctggccctgcgtcctcccccagcttcccccaccagctgaccacccctgggcctcccgctaagagcccttctccccgcccagcctgccttcccagcccagctcagaacttaacacctccggatctctcccactaaccggacctcacccccacctccgggtctcccgcctcacctgtctggccttcgggctcccaggctccagctcaggtcctggccacccccgccccgtctctcctccaggtgcgccccctatgtcctactccacccctcccggagcgcccccgccgctttccggatccccctccagctctcgtcctctctgtctccttgggatcctgcgttctctggagtcaccaccccacccggctcaaccgcggctccccggacctgcgcgcgacccggcggggctgactccgagtcgcggcctcccggtccctgccgcccgcccgcgccgcggctcccgctccgcgccgggtcccggccccgcccgccgccgccgctgcacctgctcctgctcctcacgccacggccgtcgcctccccgccccctcccgccgcccgggcgctcgcggctggccgtcctcccgtctgtctgtccgtccgtgggtccgcggagaccgacctgggctaggcaggggtctaggacggcgggaggggggcgcacgaggagaggaacggggccggggaccgccagggggagcccgacctgcaccggagcgcagggggcggggccggagcaagcccccgcccctcccgcgcccctccccgcccccgccctccacctcccctcccgggactcacaacccggcctttggagtttttctgatccgcggaacccagaggttcctcctgcccacgctctacgaaagtggggggctgggagggatctgtgacccgccctcccagtctggggccgccgccctgtcgccctggctcccctcccccaatatccccatccgtatttgggtcagtaatccgcctctcggccgcgccaggtttgcaggttccccgggaaaggaggcgctgagaggcggcgccaccaatcccagggctggcggaaattaggcggtccgaggacttctcaacctgcagctgcttctctttgggggatgctcttaatcttagtcttgaatcctttgacaatctgatggaagctcagactccctctcattaaaaaaaaaaaaaaaaaaaaaaaaaaaaaaggcctcggcaggaaaggagcacagtttaacacctgctactgctgtggggcagcctgggcggctccatcttctcagccattccggccctactttaaagaaggtttgagccgaggccacttgctttacactttctcacacctgtcacctgacttcttccacgttaggtcatgggtggtatttaggcctgaacagtgtgttagggctgcctcgggcactgggggacccaggctcttggtcccggcatggtggtgtttctgttcaggcatcagcctgaggctgccctgtggcatggacccgggttctcagctgggagggaaagcctgctagatctctgttgttggaacagtaacggctttaccgctgtctgtggctcagatccttatggaagaacccctgaccatctgcggccattttgttggagtgggggcttgagacagggtctggaaaaggcagtgtggctgtgggccacagtgggggcaagatatgcattttatattggattttcctttctctccctacccacctgcaggcagagcgaacaccgctacaaaggatgggtgtgatcatgggctatattaacaaagatgcagtgtctaggaaggggagggtaaaatgagatgagcagagtgggaagctcaaggagacagggttacatggggaaatctctgaggcaactacaactgtccagccatcagaaaaggaaagtcccccagggatttgggcactattgcagaaacacctggccttgaaggaggatgaactagtagttttttgtggcccaaagggtagaaccaggacactaagtggaacagaggcaggctttggtttcacatatgcaagagtcagttctaataacaataaccagagatgagccacatctgtggggtacccaaatcaagtcggtgggccatgagggatgttatacagggattttgggccaggatgaccttgggcatccctgcaacacctcactgtgggcccagccctgcccctgctacttcccttcaatctgttgaggtggggtggctttggagcagtggtaggcttgtggagtcctctttcagttccccggctctgctcttgggagatctcacagtggaggaagctgctgggcccctggggaaatctcagagctggaaaggctgggttctgcctcctggtgcagccttgaggccttacctccctccctgctgctcacccttctgagaggctgagtctcccacctgaaaggctcagcctccccttttgctccatcctgcacttgcttatagtcatctccaccaaatactgaacttgtcaagtcgctttcttgctcaaaacccttctccctttttgtccatgggcatagcccacactccttgctctggcattcagggctctctgatatgatgccctccccactgctgtaatctctctcccacctccctgatcaaccaacactcttaacacacttccaccatcac

SEQ ID NO: 914852 - DNA, 4001 bp, Homo sapiens
gctatgttgccccagttggtcttgaactcctgggctcaagtaatccccttacctcagcctcctgagccagcaatttctctatgtgttgtttcctgtctttcaatggtggccctgctgctgctcttccaagaagcacatacgctgtgccccaggcctcccactgaaggccttatgcctctaggcagaatggtgccatctcaggtggggtccatagatagtttaaaataccagccaagctgaccaaactctttatgccagagtccaaccatgggcctctaactcccacatcatttgctctgccctgttcgttcctcagattccaggaagcctgagcgcctcattcagccagatgatgcaatttacacctggctttgaggaaaagcagggatgtggaaagacaagagcagctttcagaattagcttttgttagtggaaagaccctggatttaaagccagaggacaagagttttggagatagcagtgctgctgccacttagtgcctggaattctgttacccttactctcatctataaaacagaagaaataagctctgccccacaggactggtgtcaagatgaactcatgtaaacgtatatagctcggcaccttggtttcataaatattagccttttcctcacatggaaaagtgctttgagaaccagaaagcccgataaaccatatggcttttgatgaaaacgaggcacattttggagtcagatataggagagaatctccctttatgagctgtgcacctgaggcaaattgcacagcctctctgggcttcaatttttcacctgtagaatgaggatgataatctcagcttattaaaaggattgaaacagagtaaaatacttggcgtgttcctgttgatcttcttctggtgtttgaaaaggctcctggaacaggttttgggctggtgttgctcaccctgatgttcagggtaggccctagaactttgggggccggacctgaggccctccacagcccctggggttggagagccctgtttgagggaaggcacagataaaaccagggggccaacagctctgcagggagaagcactgacttgaagagaaggggagcaatgacaaggccggccttctctgttccctatcctctgtcctcacaggcttgacccctggcctttctgaaccatttgaaagctctttaaaaggagatagggaggtacgcaggaagtgacttgggcagcgaggggggcagaaatcacaaggccgtgtttccagtttggccacacttaaaagagaaagcaagattaggctggggatctaaggctgaggggggcaccgccccccatcctggccctccctgctcccatttgaaggaagagtcctaccaggtgaaaaatgtcctccacaccccacccactcctggccactgttgcctctcaaaccactgctgggagatctggggcacccccaggtagccctggtctagtgccagaagtgaaggtgtttatggctgggctcccaacgcacagggcagcctgcagccacggagatctccaatttcctaaacttggacctgccctaagcttttccttatcccccctggctcccagtctagcaggttccctgtgaaagcctgctgcccaggtgatggacacctgagggtgtcatcctgccctccagaacccgcgagctgggggagaaatggaggaggaaaagaagacaacttacttgttgagatcggagcttccgagtcccactgatgctaacttctggggtgtcccttagcggcggtgcaggggggctcagggcttttgaggggactccccagcccctgccatgaccccacggaggagctgtagctggaacctctccctgttgtggggtcctgtgggcagaggtacctaagccatcctgtcccttcactcgcggccccttgggtcactccctttctctagcgagagcagctggaacaatctctctctctctctctctctctctctctctctctgtgtgtgtgtgtgtgtgtgtgtgtgtgtgtgtgtgtgtgtgtgtcccctcctccctctcctctctccctccgtccctggtacaaatgaatctctgggtagtaacgcgactggaagggccaccggcgttggcggcggggggcgggctggggtggggcgggggctccatgtgatccgggacgccgtcagctcggcaggactgggagggaagaggaaggcggagagagagcccggcaggcatccagccctccgctcgcgtccccgcggccccctgcgccctcccccggctccccctgcccccggctgcacccctgctgcggggtgccagggacggagacccgcgcgcgcgcgtgtgagcgtcccatgcctgtgtgtgagcgccgcgtgtcacgcgtgtccgtgtgtgagcgccgcgtatttagtgggtgcggtggagcagacagaaagaagggagaaactattagggcagaaatcttggctcggagcctcggcggggctgctcagtcgctccgcggtgcgctaagcggacggttggcagcatttcgccgtttcccgagagggatggagcagatggggggattcctttgggaaggcgggggagccacagtctgggcgctgcatcccccgcccgacggctctgattcccgccgtggagtgagggtccgggggcctgatccgccagctgcagggggagtaggtccagggacaggacccaggctagctgtccccgggctcgctgctcaccccggacgatctctccccggcgtgcggcggcggctgggcggcgatggctggaaacgcgccctgcacggacaggaggcgggagcagcccggagggaacggagctcaaccttgcccaggcgtgggcagagccggcgtcctccgcgccacctcccggctctcccttttggattcctacctgccttgaggacagatgatgaccagagtgtgttctttaattcgtggaagccgtaggaaaggcagctgccagggcaggctgaaagggagggctgctgtctggggagggccggcaggtgcctctgaggaccggtctgttcggggtggcccttctcacccggtggtgttccttctggcccctctccgttacccagccttttggggtcaacaccccccctgccagccccctctctcagggcagacacagctggtcaaacgtggggtgccctagcacctagcacaagtgctaggtgaatgatgtctacgaccagaaaactggtttattacgttgcaatgagaaaaatgcttgtcactaatactggagggcaccaagtccatcctctcctgtaaggacagtgacagggaaacttagtctctaacagtggcctgggggtcctcttgcctcggagaccagcgtacacacagcccgttgcccaggcaccctcccctgggacagagcacagagcggtccggccagagtgggcctcctgattgcccctcttctctctgtagagggggtgattgttaaatgtggctgcaacaggccctaacaggaaagctctgtgtccccttaggggactcagcttgcctaggtgctcacgcactgcaccatatgttgtttgacctcagggcttaacactattgtggagaaagttcttaattccctaattgcctagttcttgggagaggctttggctgtgcagttctcaggtccagataacacacactataatcatctgctgagccctgaggaggggctctgtcctggggcagcagttgcttttggattaggtataaagaccatgatattccttttgccattacggggtgggggtcaggggacctggactgactttaaagcaaaatatagggtgctctgggaaatactgttttgcaaagattttctcagtgatgggaccttggatcgggagacagaaaaatttgtgtccaggtctcacctgagaactgaaaaacgcgaaatttggggattctagtcctgagcaattgttgcaacttggaggagctttgagaggcccaagcctctcaaagagcacagacaacatctgag

SEQ ID NO: 914853 - DNA, 4001 bp, Homo sapiens
cccgtcctcagggatactgatctgaaagcagcactggcacagggcctcactggcacacagctagcgccaggggtgatgggtgacagctgaaggggctgcggcccacccacgcaccttgatgaggaggcccagctcctggtcgctcacacacggatgggccctcaggaacttctctcggacctcccccagctccctctgggcctgctgctcgtggggctgctccagggcccggaacaccagggcaccagacaccaagtaaagcaagaccagcgccagcagggccaggagcgtggtgctgcgcatggcgcgcccaggcgccgggccagctccactgcccgcctggaggggccgggcggggggctcctggggagctgtcgtcactgcgggcaaaaccagggatgctggggtcactgagctggcctgacacccacaccctcctcctctatcccctacacacccaaagatccataaagcccccagctgcactgtccacagacatccctctggctggacacacccagtccccctcctatctccagccttccccttacctccgctgcccggccctcagcccctgtctgggactaccgggtgaggaaagagaggagggcaccgagaagggaaaggaaggcgagtgggaggccgaaagagagcctaagcctgcctagggggaagcggggcgagcgaggaaatgtgtggagcttggtgggggtgcggggagctggccctcgaggaggaggctgagggggctcggaggcgtccgaagggaaacccggaggagaggccggacagcgcaaggcggggacaggggaatggtgggtccctgctcgcccgctgcggctgtgacagcatctccgcggcttctccgtcccctctcgcctcgccctgcttcctggctggccctccagggtgcccccgcgccccgccgggctttcgaggaacccaggggcgggtcccggccgccgcacccaggcgaggaggggtgctggggacgcccagttcccggaaaaagcggggcgggggtccgcaaaggccacaccggggcgacagcccccgagacagctgtcagtccgagacagcgggcggcggcgcccacgcgcacacacgccccggcacgcgccgccaagcgcgggcacaaagacccgcgcgcccacgctccatcccgaggctgcagcgccgcgccgccccgctgcacgcacgcaccccacctgcactctccgcagacgccccggcatccccggcccccatgggcgtgccggccgcgccagggcacccagagcccacgcacacgtgtgtggacactagcgtgcacacgccagacagcagggccaccgcgcagcgcccgcagctcgctcccaccgcctcccccgcgtccgcacagcgacgcctcggagcgtggcgggcggcgggaccggcggccacaccactcccggaggcgcccacgcgcgagaggtgggcaccccgcccggccagtcgcccctggggcgtccctgcccctgagtcctgcccgcgcaccggagcccgcaccgcacttactgtcggccccgctgcggctgcggctgaggcccgggttccagcacggcctcgccggtgccgactgggccgcggaggcggcaggggcggagcgggcggccgccggggctgggacccccctcccgccggcagaagcccccctcctcccgcggttaacccctccggcgccgcgcttccctccgtgcagcgccctcgccgccggcgccgccccaagccgtttacctgcggccgcctggctccccacagccggccagccccgggaggtgggtggcagaggagccggagaggggttgcagcaggggccagccttctagccttggaccggagcccagtgtggccagcggcagggccccgacctgggcatcagctggcccgtctctccggacaggcaccacgctaatctggcatctcccaggcccattaccggatcgggaagggtccgcaactctccgcccctggggacagcctggcccttgggctcagcactcatgagggaggggctccgcgggacaaaggggtgggggaaacccggtggggccacctggaattggccgacgtggaggttgggacccacctctgggggagttgctgctggagcacctcctgcccccactccaggttttggccctctacctgctccccggctatccctccagggtgctccctgccccagcttttggttctcacttccatgcccagaaatcagccccggaaggctgtggctgaagctgcctgcagatcccagcatggcactggtgccagcatccactctcccactgcctgaacacccaggccctggctggtcctgaacttgccccgccctgttctcacccacttgacaacctgtgacctctccaaagaccctctggtgcctgctggggtcctcagccctcatgctggatggctttcagcctgggctttgaggctgaccacccgctactggtagggaacctgaacaggttaccaaactctggagtctccctgttcccacttacagaaaagggatgattaatcatcacttcggggtgctgttctgggcattaaggaggccagtgtttagaaatcctcaaaacagagcctggcacacacaataaagtgccccacaaacgttagcagtttttatttcaacaaaaagtgattgtccagcttcaagctgattctctatgagtctcagatgccctctctggaggccctgagggcctggtgcccaggatggtcccaagtaaagggttttgaagcaggcccagtgataagccaagggaactctgaaaagctgggacaaccacctatgtgggcaggggacagaccctccagcaaaggactcctagccatcagacagacctgccagggccatggaagcagagggcagtgactatgctactaaggacagtggagaagagggctaacgggagggcatagctaggggaccacctgtacatctgggcaaacccacgccctggtaggaagatgggggctgctcagtcactgcgccaactccccagcaagccctggactaactcctgactcctaaagaccaggttggggtggtgatagggaaacagggcctccagaaagtctaatccattggggttaagactcagaagctgccaggcatggtacctcatgcctgtaatcccagcactttgggaagctgaggtgggtggattgcttgagcccgggggttcgacaccagcctgggcaacatggtgaaaccccacctctaaaattaaaaattaaaaaattagtcaggaatggtggcatgtgcctgtattcccagctactcgggaggctgaggcaggaggattgcttgagcctggtaggttgaggctgcagtgggccatgatcgtgccactgcactccagtctgagtgacagagtgagaccctgcttcaaaaaacaaaacaaaacaaagaacctcaatggccacataatcagtaatgtggagctgtggggcccagcagaggggccatgtcccttgaccaggagacagaaggcttcctaaaggaggtaacagttgacgcaggtcttgaggaaagagtagcaactgttcaagtggagagggatctggaggtagtggggcaattctgggccaggagagctttgagaacaaaggcctgtgtggtctccttcccttgcaaactgcaggcccctcctctcccagcccaccagccttgatggggtaagtcacccctgcccagcctagcagcccacttcaagggctagtgtctgttcagccttaggccaaacaggcaaaagtgataggaacacaaggcagatgacagacaggtgcacaactgtggggcgcagacactgtttattgagtggcaggcacaggagaggtagctggctccggtgtggaagcagaggtggcaggtcatgccagggtgctgtgggcatctggcagccagggccatgccccccatcctagggggacggcacaagctcactatgacaggagcagcaaggagc

SEQ ID NO: 914854 - DNA, 4001 bp, Homo sapiens
ccaggttctagctggctctgctcctcttcgtcaggggatcccttaccctctctaggccattcttttcttttttggaaaatgaaaggatgaaagaagacagttcctcaggccttttgtagctgggacaattctgagaactgcgctgcccttaacagatactcccgattccacagctggtggaatatcatccactctttccccaaatgtgtgtcatgtcctgtgtgccaggctttgtactgggatctgaatcagcccaggccctgccccttctggtgggggagtcgggcaggcaaatcatgaagggctgcaaagaggcagcatgggcgagagagggcatgtgccaggcggggaggggtgggagtgcggggtgtgctgggagaacaggatcagctaatacagagctgcaaacgcacatgcctaccggagccagatgggagacaaacaggagtggtggggacaggggtacactggaaagtgtgagctgtatccaaagggcaggccccattctgctccagtcaggatgttgccttgcagggattctggctcagtgtgagtgggtttcctgattttccaaaagaagttggaaatatgagctgggcacagtggctcacacctgtaatcccaacactttgggaggctgaggcaggtggatcacttgaggtcaggagtttgagaacagcctggccaacatggcaaaaccccgtctctactaaaaacacaaaaattagccgggcatggtggtgcatgcctgtagtcccagctactcaggaggctgaggcaggagaattgctagaacccgggaggtggaggttgcagtgagccaagatcgcaccaccgcaccccagcctgggtgacagggtcagacaccgtttcaaaaaaaaaaaaagttggaaatacaaattccaattcaaaaaatactgagacactttgtggggcaaaaaatacgaaaacccagggctgtgggtctcattgctgcttttccctgggcctgtgcccacgcgatttctctgcaggactccctcatccctgtctgtgccctcctgatccacaagcatctcatgccgacttcctcccctatcttccctcactcccccacccgaggccatggtcctgatctgtccttcccaggttcattctatttgcttccatccaagaatccatcccactgtattgtatcccctatctggccacaggctgtggcatctgggcagctctcctgggtctcaaagggtgcctggggtgggactggggaggccacacccttcctggcagttgaagtggaggcaccagttggggtgtgttggtggggagccccagctgtgatgtcaggcctcacagggcctgggctccatctggctctttggggctgaaggaagggctgcatgaaccccaaagcccccagggagccatggcctcttggagccgcaccccccgacttggctgcctggctctcttacctgtggtggtgaggatgctggcagcgaagagcagggctgagggaaggtcccaggtcctgccctctgagctgttgcccagggtggagaccccatgggcctgggtggccagggcagtgcccagcagctcttccagagctccgggtggcaggcaggccctatgctctgcctggaaggctgccagctctgccctgagctcagcctgaagcctgcatgcaggaggcccctccagggcctggaacaccacagccccaagccccagggccagcaagtgggccacaaccaggagcccgtatcgggaccagggccttagaccccccatggcaggccgctggggtgctgtgggaactggcggctccacctcaggcacctgggaggggctgggcagggcggggccaggaggaggtgctgtgtgggtggctgggacccggctgggatggctggggtggctggggtgtgaacaggagggaggtgagctgcatcacccttcccaggtcctggaggcaagacatttgcccatttcacagcagctgggatggtggggatgggtggaggaaggcggctgcggtgaggggaggaggcggaggaagctgaagcctagagaggacctcacacttattcaaggtcctgctcactcaggcacccataccacattcattcattcattcattcattcaagtgcttagggaagaggacaggcacaggtcctttccttcctggtgtttacacaagaaacctcttagcaaagaaacatggcaacctcacattgtcatgagttccatgaaggaaacaccctgggtgatgggagagctctgcggggagcgggggggttatctcactgggaaagctctgctaaggaggtgatatttcagctggggagtaagaggccagtgaaggtaggaatgagcttggggtgtgagaggaacagagggctggctgtggcaggggagagttgggggtgaaggggggataaggacacaggcccttgaggataaatgtggtccagggagacctacgctgggctactgtaggcgtcatggatggagtgattttggcctgggtggtgtggtgggagaggaatggtggcagctgggaaggatcaggtgggggtgggaggtggggagaggactccagggtgcccagagcacccgggcagatgatacccttgcgcccgattgccagttcttcctgagaacgctttgtgcctgccctcctgactccctgcccctgaactgcagacacagagtctgggctgccatggggcacctgggagaggggaagggggagcctgggttccaactcctctaacgtcagaggggctgaggacagaggccaaggaagggacccagccctagggtatggtgtgggagtgccagagcccccatggcagtgtgaagagaatggacagaggccgagggagggaccctgccctagggtatggtgtgggagtgccagagcccccatggcagtgtgaagagaactgtcaggggtgccagatgccatggcaagtcaccatactgggaggtgggtggaacttactactcttttttttgagatggagtctcgctctgtcgcccaggctggagtgcagtggtgcaatctcggctcactcaaccttcgccgcccgggttcaagctattctcctgcctcagcctcccaagtagctggggctacaggcacctgccaccacgcctggttaatttttgtatatatatatatttttttcagtagagacggggtttcaccatattggccaggctggtctcaaaatcctgaccttgtgatctgtccgtctcggcctcccaaagtgctgggattacaggcgtgagccaccatgcccggcctatggttttttgttttttttttttttgagacggagtcttgctctgttgcccaggctggagtgcagtggcgtgattttggctcactgcaacctccaccttccaggttcaagcaattctcctgcctcagcctccagagtagctgggactacaggcatgcaccaccacacctggctaatttttgtatttttagtagagatggggtttcaccatgtggccaggttgaactcctgacctcatgtgatccgccggcctcggcctcccaaactgctgtgatgacaggagtgagccactgcacctggccgagaagagccttgaatgactgaccaaggctggtggatttggtcccaggagaggcatgcagtacaaggcatccaactgcctattgttggggcatcaggacaccagggttgtatgataggttgggtcacctggttacctccaagaaaggtgacaggctacatgtggggagacagcttttgagtttatttggcttctggcttcactggatcccgaggctaagactccaaccctggctggggcagcaggaaggcatccagagagccctggccccagatgacccccagggcaggaggtccatgctctaagccctagggcaggggccgcagtagcaggacttggtcaaaagtgctggtgacagctgaggccggcccctcttccctgcacctcccctcctccctgcatc

SEQ ID NO: 914855 - DNA, 4001 bp, Homo sapiens
tctggggtccgggaggcaggtggccaccagcacacagcacctgtgaacctggcatctgctagacatttgcacagtggcatcggactgggttcccctggggtcactgcacacaaatatctcccaaaccccaagccgagcccccgctgttgcagccacgagcagagccagctcctctcacagaccagcagcggctgtggctcaggcacccactgacatgtcaggagacaggggcttgggagctggggtggggaaaagtctccaagatcaccccccaaccacatctttgaggagggaggtgggtaagacttccccttcctgatgtggaaggccacctcttagcaaggaaggcagtagccctgcgacccctaccccaccccctcacctgagacgatgcttgaagccatttggggcctggctcctgctgtcacccgccctgaggccctggtggcagctgccagcaggcatggacaggcctctggatgccctccagccagttctctactgagcctgcccgaggcagaggagatgcttccacctgaggacgctcagggagaccacccttcagccctcaggtgagccccacagccatcagccatgggatgtctgggtagaggctcccaggccagaggctggcaccacaccaaaaggccgctggctgggcagccaggaagtagggccactggggcagcgggggaaggccccaggcaggcatggaggagagcagcctggaccttcccggaggtgacttcccaggcctgtccctgagaaatccagtgcccagccctgctcaggcacgctgtaccgggaattggaaccacctggtaacaggggggccaggtgcctctgctaccagcgctgctttctccgggagcacagctgcctcttagtgagagctgcaaacgtgcctctccgctctctgcatcaagccaggttttcatgagcttggttcaattagttaatgtggggcccgtggggacggcccgtggcatgctgagccctcagggagcaccgccaccgtcaccttcctatcctggacagccccctgccccagagtccacctgggcctcagggggtctgagatgcggcaccggacatcaggggccttctctcttgggggctcctgagcctcgagtctcagccgaccttgaggagttatcttactgcacccaagggtgcgctccccagcacgcttctcttcccagaaggattcacacctggactaccctcccggaggtgtggagccaaattctgggctccaggtggtcccctccccagccggctccctccccacgccgggcctgcgagaagatgcgcacccccagacacagcagcgcctctgaacttcaagggagagtgcagagtttgtgtttctgcgtttccccacttccttccctcctctgctccggggtcgcagctccgacggggcaggtggcgctgggacagagctcccccacaccagctctcaggaagcaccttcgtgccggccgtcgccggtggcgatactcacacggcgaagtggtaaacgaagcatttccagccggtgggacgctcgaggaagttgtagacgcggccctggacgtgggtgcgcgccaacaccgggcggcgcgtgctgtagatggagacgcgcgggtctaggctcaccggcggccgcgggccaaggtcggaggcaactgggggcgcggcgggcgcggccggggacgcagggggcgcgggacctggggcgccgggcgcgatgggcgcgtagagcgcgccgcccgccgggccgccctccgccagctccagcgagaaggggcacttcttggccaggcccgcgctgccccgccgggcgcctggcaggcggccccaaccccagcgcttcctctcggccctgggcggggaggaggccgcggccataacgaggagggcctgccggggggccggcccgagcggcggcaccgggagctgcagcgaaggcgagcgcccgggcgcagtgcgggcagccactgctgccagccccgccgcggggggccgctgccggcccagcccgggcgctcggggcggggccggagggggcagtggccgagggccggtcccatgggacggcgtgccccgcccccgcctgcacgccccgcccccgccggtccggcgcgcacagggcgtccctgcccgcgcccaccggcttggcccgccctctccccacggaccggcctggccctgcctccgcctcaccccctggcttggcctgtccgcgcccccgcccccgcctgcgcccccgcccccacccccacccccgcccgagcccacctgcttagccccgctcgtgtcatctatcccgcttggccccgccccctcctcgcccacctgtttggccccgttccagtgtgcatttaccccgcctggccccgccccctccccgcccacctgcttggccccgccctcacccacctgcttggccccgccccgtctgcatctcccctgcttgctcctgccctgccctcacccacctgcttggcccccacttctgatgcccgcctgctctgcctggcccggaggaggaccccagctgcgccagggaggaaggggtaaggcctggccgataccacgaccgagaacggcacagcgggggcaggaggggcggggtagggtgccggcatctactttccctccctctgagccactccggagttggggttggggggaggaaagggatgtcctgggtgagggtgtgctggccccgcgatcactgtgagcgcccccgggtgcccaggcgcgcgagctgcgggcggcgaatacgctcgggtcgcttcccaccagggcccttggaccgggagggtgagatgggaccaccactgtcaggtacctcccagtgggagctgtgtgggtggggagccggcagggctgctggggggtgggggcggcacagccggggtctggacctggtttgactgccgggcatagcaggcggggctgcctgggcagttaaagggagaggcgcttgcgccaccctagtaacttggagaatgggcgccttgtcctccccaccgtcgagaccgcgctgccgctgcgccccgtggattcccctgggtgggggtgggttggtcacatcggaagattttcacaggtctctgcactgcctcccgcccgctactggcatttgggtctcagcacgtctcaggcttggggggggggtggggggcagccaacagaagagaccggcttttttcaggatactgcacacagccctgaggcagggactaaaggtggagctcagcggtgactctccgccccgccaggagacccataactcatgtgacacttccaggtcgtccctgagcaccctgggtcaatttgatgtatctaccaccccctgccaaaagtctgctcttttatcgtggacggagtccagcccaggcccttgacgcctgactccccaccctagtgaggtgccacacaggagtgcacagtctgtatttgcagcaagagtggatggagtgggtcccagcttgtgctgggcgctgtgataacacaagggaggccgaggagagggtaccttcctgggaagcatatcagtgaaggtgcagaagggcagcgggtcagaagatgggggcagtcagtcagctctgcagggcacacagcacgcattcagcagttactttccgggtgaacatacatacacctgcatggagtctctgccttcccctcccacctcagcaggaggaaggtgagctttgaataagcagcgtttggacaactggacagtcataaagaaagaaaaagcataccttgggtccatctcaccgcacacgagaataaatctcaaatgaatcagaggctcaagtgtaaagggtgagatgaagccatgcaaattctacaagaatgtacaggtcaattcctcaagaacctgtgaatcgggaaaacatttccaactatgacttgaaatccaaaagcaacagataaaataagaaaaattaaaatagaagcaccattagcaaagtaaaggagacaaatgaccaaatgggaaa

SEQ ID NO: 914856 - DNA, 4001 bp, Homo sapiens
gcaccaaggacaaccagaacattccaccacttgtcctgtgggtgctgcgcctccgtgcagctgtaccaggctccttgagcagccgccgatctgggggatagagggggcaaatgtatcctcagcagaaaacagcctctaccttgcaggccagtgagaacttctgaaaggccttctgcattcctgccttctgtgtcacccactggcaggtagggattaggctctccaggcacacagtaaagtcaatggtcccccaaggtcacagccgggagaggctgagccagggacggagcgtccagttccccactctgaccaagcacaacccggaatcctggaatccaccccgtcccccacttcccactccccacaccctgacagcaggtatatccctgaaggacccctgaggacccccgactggccccacttccctgggccccctgccgccgctgccccgcttaccagttcaggggcctcacccaagactcttccacccaagggcccacagccttcccccaagaccctccctgtctgctcagctcacggggaagaaacctgaaccccaggctgggcacggcacatggacccaggtttggtccctgtcactctgggctgggccccgactcaccagcccagggagggtcaagggtctactttctgctcctcaaacctccaggccttccctgcccccggcaccctctttgcctgtggttcttgccagcagcgcccaccctccccttcactccaccgccccctcccctcagtcctggccctccaagctgtctaagtcacaggcagggtcaacccctaccaagagagcaggccccagggcacacagaagtcagcagaaagcacctgcaggatggcgcatgggggtgtgggagcacgtccctgccactcagtaacaggtgggggcctcacggggggcacatggtgggatcatgacagctgctgcccagattacagcgaggtggtggcaatgtcacaggtggttcccgtcatgccaggaagagatggtgcattctagaaaccagcggccttcgccgggagcccccaggcaggtgtcaagctcaggagcaggcccgtcagagagaggaggcaagtcagaaggaggaggaggcaagtcagagggggtggccctagacatcgcctctgatggcgacgctgccctcgtccacagccacactcaagtccagaggcctgtctaccttgcaggcctggcagccccaagaacagccatgaagacccacccagcacccaccaatccagaacccaaaccaccagaaggctcctccctggctccttggggctctccatgagatacacccacagcaacgccccctcagcccagggaaggattcttgtgaatcccagaaagacacagtggggctgggtctcatctctggacagctgctgggatggcggaaggagcagcaatgcatcccagctgtattgggactaggctggctgagtccacactcaccgagaggccctctccagaccttcccccaggacagcagacagcagacagctgcacccagtgggtgctggaagcagcatgccccatccatttctctccctgcccatccctccgtccacccacccctttctctctccacccacccagtacttcatctatccagctgtccacccatctacccgccacccataactgaccacaattcagccccccatccacctgcccatcccttcctctgcctatctgtccacccccggggtacctactccatgccaggccccgcactggctcaggaagcacaggctctttcccagggtccacagcagccacaggcctcaaattcccgagagccagaaacctggagttgtgggtgagagcaggggccacgtaaacaaaagcagccgtgatctgggctgagtaaatccaggcccggcaccagtgccatcctacactccagacacacacatgtgcaggcgcaaagacagtgccttcccgggcctctcacagccccaggccatggaagctgcaggggaggaagggaagaggggccacccccgccccggccggctcacccagtcagcaggcttatctcctccacactcaaggttcccttcccggacagagcttcagaggctatttcaggaacgacagcaaccagactacaaatctgctgcgaggcggcctgagaagccatcctctccaaggctgaagaaaaggggggcatcagatggccccacaggccttcaaacagccctgcacatgcagaccgagccccacacacctgatcacacctgacccatcaccaggtcggacaccgagttccagccccagagacacatgaggacaaactcagagaggcaaggtggctgcccagggcctctcaacaccccaggctgcccccagccacggccattggctcacagatcgccactcctggacccagtggaggccaggagagtgaggcccatccgactcccggacacccccggaaacccaggtcctgcagcagtaccacccaggacaggggccatccacaggaggccacacccccatgcagcagacaagaccgacaagagggccacctgcacaggcagcaaccctcaaccagaagcagtcacgccccagcctggggcaaagtgctcctccagaggcttgaagcagtctttggggccagagagagatctggtcccccactgtggagacacacctaccaccctctcataagggcctcggccacagccacccggatggggggttgctcccacccagccccactgccccacaagagcggagtccccagcgttccccagcagtgggcacagggctttggcaaaggggcccatgcaaatttgcggtccaaggtccacttacagctgggctgacagtccctgtacctgagaggcctccaaaacacatggacacagactggagcctttctactgtgggccttggagccacaggaaaaaagggaaggagggagggagggagggagggaggaggcctgtggaggccagggccttgagctgggaagcaggactgatgccacagagtaaacaagtacctgtacccgcagggccacctgggggcttgggcacctgctcctcccttggggcattgctgccctccaccagccacagagccctttgaaagaccagggatatgggcgcagtatctgtccagccagagaaatgcaggccagcagcacaggctccgccgccctgcagccaccctgcccggcctgcccacagagaatcaggtcacgcagggactcaccctgccccggagtcctgcccccagctgggccacaggctggtaggggtctgggccctgttgcatctccggacacctctgctgcccatgggcactgcaagcaaggactcgagtgaggggccccctgggggtggcagtcaggacaccaaggcctgtctgggttttggaggaactgagcttccacacctgcactggggtgcggctctggagcctagaggagaaacaggggttcacgtcagctactattaaattcagtttgtctgaaagactgcgaaaccacacaccttttctggctagcagataaccacatttaaaaaaaaaaaaattcttactaaaccagtcctctgacccagccgcaggttttggccacctgtgctgcatgggaaggagagtgggttttaagcagaagggaatccctgcctgatttcacgactccattcatctacctctgagacccaggcctctcaacacaaagggggaactctttgtaggcaggagggcggagggggcctccggggtggtctggggggagggaccacgccctcacggtcagccgttcacccccagggccgccctctactgtggacggaacaacaagctgacttgtccctgcccggttggcttagaggaagtcagtactgccagtcgccacagtgccacagcctgcccccacagagggagctacagactggcagtgacccctacatacccttaaaggaaccagagctgtctcagacccgcacagctcctcattacc

SEQ ID NO: 914857 - DNA, 4001 bp, Homo sapiens
accaggtgagcgaggctttaggagaactatctggggagtcttggaggtggagactctggggtctggaatctgcctggcacctagcagggtgtggaggggctgctaggaaggggctgcactgccagctgtgtgcttcctgtgacccacatgtggaccccgcagaaaaatcttcctgaaaaggacctggtggaagagagcttctatctaggggtgaggggactccggcagaatgagactggaggtgtgaggagggttgtagtagctgaggggcagtaagtgagtataacccccagtaggttcttccgcccactgcacagacaaaaccaattcactgagaccacgcagcattgtaataaagatatagtttaattgccacaaggccagccatgccgcacaggagacggagttatttctcaaattgttagcagtagtgaatctgtacgggtctgtagtaacctccattcttgcctcctcagaggaaagaattagtcggaggggcataaggcagagggagtgaccaaggcaagttttagagcaggagtgaaagtttattaaaaagttttagagcaggaacaaaaggaagtaaagtacacttggaagaggaccaagcaggtgacttgagagatccttgtccggtttgacattggacttggagctttacaccttggcatgcttccggggttttgcgcctcccctcccttgatatttccttggtgtgggctgtccacatgcacagtggcctgccagcacttgggaggggcccgcatgtgtagtatgtttactgaaattgttcacatgctcatttcaggcatttttctcttaccagtcaagtgttcctagaggaaggtcacacacaagttaagctgtgccattttgcctcgtaggtgtgaatgctcaagcccactcacccaactcctgagatctttttttgagacagggtctcactttgtcacccaggctggagggcaatggcacaaacacagcccactgcagccttgacctcccaggctcaagcaatcctcttgcctccgccctcaagtagctgggactaccaacacatgtcaccacgcccagctaatttttttgtattttttgtagagacaaggtttgccatgttgcccagagtggtcttgaactcctgagctcaagcaattgcctgccttggcctcccaaagtaccagtcttaggttctacgatagtgatgttatctgcaggagtaattggggaagttgcatatcttccctctgcctctggaataatggttggcaatcgtttatgtctgcaccttagcagaactcaggctcaacatcctcctgacctggttggtctttcattagctttacaaaggcagttgagttttggagaagggctgctatcatttaaactataaactaaatgtcttccaaagttagcttggcctaaacccaggagtgaccaaaggcagtttggaggttaaaggcaagatgagggttggttagatcagatgtcttttgcggccctaattttctcactgttatagttttttcaaaggcagtttcataagcagccctgggggagacagcccctctttataagggtactactgaggagagatgtgagggttttcataacgcccgtcaaagtgctcccaaaagcccagagtactcaggtcctcctcagacgttgctgcccctaccgcttctcccccaccccacccaggaagagtccgaggcagcctgtgtaggggcaggaggagcagaagagctgggtgaggacgcagggaggctgccggtcctctccccagtcagcaggtgtcccagttagaggcagcctcaggaggggagcgtttgccagaataatggcctgcacttagacacaagctggaattacctgacagtaaaccggggaggactccgagaaaagcgagtgatctgccgagatttcccccagaaacagcaaaaaaggagtccacagaatcagttcgcaagggcaggagcaggaaagaaagagatcggctcagtgcttttccctgctaagtcaagcccctttagtaaaccagctacagaacatcgacgctgtctatgtggtgagggtgtcttggaaagatgagaggatttgacaattgtgagccggaaagctcgcgtgttggcgggaggccagggtccccgccactccaggcctgggcctgcccggcagcgccctctgctggccggagccgcgacggcgggggccccgcctgaaccggagccctgagcctggggctgggagtccaaccttcccagagtttgcagttctttggggacaggcatacatgcatggattgagccacccacgataagaggcgcaccttgcaatgagaggagagcctatcctaaaggggaagggggctgatctggcgaaaatgtcagcgcgggggctgaggctggacttaagggggcgaggttaggaagaggtgagcaaagatttggaagttatggtggagtttgggagagagtgcaggcatgctggagaatcatcagtatatatgtatgtatgtatcttgctatttcatgcctctgaacttttgctgaggcttgcatttattcctagaaaacatttctcacttttccttttctgttgttataagtacttaatctattcaaaaatattagatgatgaatatataaatattcatgtagccattactaagcttgggaaataagacctaatgaatataaagtactcatgtacgcttccttttttcccctccctccacccagatggctccttcaatttgctttttcattccaacgtttaagtttgtgtttactacctgtgtaggtataaagaatatacagatacatgaaatcataattttgggggtttttttgagacagcgcattgctctgtagcccaggctggagtgctgtggcaatgatcacggctaactgcagccttgacctcctgggcacaagcaatcctcctgcctcagcctcttgagtagctgggaccataggcgcatgccaccacacccagctaacttaaattttttgtagagatggggtctctttatgctgcccaggttgcaaaaatattttttagtagagatggggcctctcactatgtcacccatcttggtgtcagactcgtggcctcaagcaatcctcctacccaggcctcccaaagtgctaggattacagcccaccatacccagccagaaaaattttaataggtatatattttattaaatatactatatcctggccaggcacggtggctcatggctgtaatcctagcacttttggaggctgaggtaggggcatcacttgaggccaggagttcaagaccagcctggacaatgtgacgaaacttatatttctttttttttttttttttttgagacagagtctcgctctgttgcccaggctggagtgcagtggcacaatctcagctcactgcaagctccgcctcctgggttcacgccattctcctgcctcaacctcccgagtagctaagactacaggcgcctgccaccacacctggctaattttttgtatttttagtagagacggggtttcacgatgttagccaggatggtctcgatcttctgacctcatgatccacctgcctcggcctcccaaagtgctgggattacaggcgtgagccactgtgcccagccaaattatatttcttgtctctacaagaaataaaaaaattagctggacttggtggcacatgccggtagtcccagctactcgggaaggctgaggtgggagaatcctttgagcctgggaagttgaggctacagcaagccgtgattatgccactgtactccagcctgggtgacagagtgagatcttgactcaaaaaaaacaaaacaggccaggtgcagtggctcatgactataatcccaacactttgggaggccgaggcaggcagatcacctgaggtcaggagttccagaccagcctgaccaacatggtgaaaccccgtctctactaaaaatacaaaaattagctgggtgtgatggctcacgcctgtaa

SEQ ID NO: 914858 - DNA, 4001 bp, Homo sapiens
gtgacagagggagaccctgtctcaaaaaaaaaaaaaaaaaaaaaaaaaaaaaaaagtttcctgcactgacatcttcagctccatttctttatcaaacaagacctcagccgtgttcctaagcttctttttgttttttgtttttgtttgcttgttttttgttttgagacaaggtctcactctgttgcccaggctggagtgcagtggtacaatctcggctcactgcaacccccacctcttaggctcaagcgattctcctgcctcagcctccagagtggctgggactacaggtgtgtgccaccatgtccagctaatttctctattttttatacagacagggttttgccatgttggccaggctggcctcgaacgcctgaggtaggtggtccacccacctctgcctcccaaagtgctggaactacaggcatgagctaccacgcctggctgagagtacgttttctgaagtacaaatctgatcctgtcactccctgcattaaacacttgagtaacttttcattcccttccagataaacagcagactccataacaaggtttagaggccctttgcaactaggctgctacttcacccctcgcaatcaactaccagaactgcctgctgctccccactcctccaatccagagctgggcaagccccctcacctccagaagctcactcacttggccatccgcactcctttctctgaccccactcatccttcagatgaattcctctgggagtccttcggggtgggttgtctcactgtgatcccagaaagtcctacactactatacttccactggcctggcagttcttcccttgcaattccctgtttcttcattgactgtgaggttcctggccaagtgctgtgtttcatgcctgtaatcccagcactttgggaggctgaggtaggaggattgcctgagcctaagagtttgagaccagcctgggtctcaccaacatggcgagaccccatctctattttaacaaacaaacaaacaaacaaaaactctgtgaggctcctaagggaggggaatatcctctgatttacaggagcatctagtattctgttcaaggccaatcttgccctacctggcatcatgcacagtgccttacacttccccagtaattcattcaggcatttatggaacacctagggtggtcctggcactaggcatgtggctttgtcaatagccaacaacaatgacgtgatcatggccctattagagagagccacgctgccctgctgctggatctgctttctcttcctccaggtcttcaggatgactctcagtgcaggagagaacccgaatgttctgctcccagagtgcacgcagccttttccccatcctcctccccaactcccctcacccaagctggggaccaggcaggcaagcagagggatttgggacccagccagagggcaggggcaggctgaagacccagccaaggggcaggggcaggctggagagggctgcaggtgagggaaagatcctctggccgagctggttggatgggcttctcccaccgggagcaagggagaaggtggggcagaggaggagtcgtgggctaggacaagccggtggggaagagacaagggaaaggaactaaagacccaatgtagagggaggaagcaaaagggcaaagaggaaaggctggacagagccaaaccagaaagggacaccgaggcgcgaaaggagagtgatcccagcaggagggacggcaaagattgaagagagcgaccagcccgaggtgaagggggacagcgcgccagaagcagggggctcgggcgtctgggagggacgggcaggagaaactggaagggagggaagaggcggagggaagaggcggaggacagaggcgcggggacgcagctagcctcgcacttaccgttggccgcctgggccggggggactggggcagaggggtctggctcgtcatcctgcccactggccgctccactgcgcagccctgccacatgcagatcacttgggccagcggaagtgcccctggctgcccgcccctaggtgggaacaccgaggctcaaggcgggacggggctgagccaggcgtggcttgcagtgagactgggccaagtgcagaaagaaatggacagtctgtctatttggggcttctaaaagttgttaggccctgagaagggctgactttggagaccgagaaatggagcagaccccttaaggactgaccttttgatatagattaatttccttccttttctttctttctttcttttttttttttcagagacagggtctcactctatcgctcaggctgaagtgcagtggcggatcaggctcactgcaacctcaacctcctgggctcaagtgatcctcccacctcagcctcccaaagtggtgggattacaggcctgagccacggcaacttgcctcttcctatattttcttttacgcttaaataaattacttaaacatattgcttgaatcccgttattaaagttgacattagttaatgcccctctctgggcctcggagttcccagtagtgaaatgggggaggcagaaggaattgacattgactgacattgacaaccagagactttctattccctacagtcctagggagtgaaagatccgcaacacccattttacagatcagaaaactggcgctctaggaggtagggtggtgttaaaatgtaaagtctgaggatcaacaaaacttttttaagagtatacttgagtaacaggcaattcttgaatcggggaacaccagatggaaagaggttgagtgttcccatgacaatgcatcagaggcaaatatttatggggagaatatggaagcaagatattttgttggggacaggcatggtggctcacgcctgtaatcctagcactttgggaggccaaagcggacagatcatttgaggtcagaagttcgagaccagcctgaccaaaatggtgaaaccccgtctctactgaaaatacaaaaattagctgggtgtgatggcatgtgcctgtaatcccagatactgtggacgctgaggcaggagaatcgctggaacccgggaggcagagattgtagtgagctaagattgcaccactgaactccagcctgggcaacaaagattccctctcaaaaaaaaaaaaaaaaaatatatatatatatacacacacacacacacacacacacacacacacacatatatatatatatacatatatatatataaaattggttacagttaaaaaatctccttttttggtttcctttgttgaaaagtccacagctacttaattgtatgttagttggctgcttgtggttggctaatgttaagtttcgtttctgtctaacattagcatttaccagaaatgactctattagtcagggttctacagagggacagaactaacggaatagggttggacacggttgctcacgcctgtaatctcagcactttgggaggccatggcaggtggatcacctgaggttaggagttcgagaccagcctgactaacatggcgaaaccccatctctacaaaatacaaaaaattagctgggcgtggtggtgggcacctgtaatcccagctacttgggaggctgaggcagaagaatcgcttgaacctaggagacggaggttgcagtgagctgagatcaagccattgcactccagcctgggcaacaagagtgtaatcccatctcaaaaaacaataataataaaataaaactaatggtatatatacatacacatatatttgtatatatatattccattacttttttaactccccgttatatatatacatatgtgtgtatatatacacacacacatatatacacacgtgtgtgtgtgtgtgtgtgtgtgtgtgtgtgtgtatatatatatatatatatatatatatatatatatataaaggggagtttattaagtattaactcacacaatcacaaggtcccataacaggccattggcaggctgagaagcaaggagagccagtccgagttccaaaaatgaagaacttggagtctgat

SEQ ID NO: 914859 - DNA, 4001 bp, Homo sapiens
cactctatacatgttaatctctttcaatctcacagattaagtagatactattatatacctactttacagaccaaccatactgggccctcttcgacttctgcaatttggcatctgccatcccctctgcctggaccttgaagacaaatcccatgcatcggccaggtctctcagctggaattcattccttctcctctgcatctgcggagaattttagtctaaccccttaccacagccaactttacttaagtagatggatgcctggctcccttgctggggctgggggtgcccctttctatatccacagaagcacgtagaataggggaagaggaagaaatttctctcctgtttagtcagatccattttccccacctggattttcaaaactttttaattttgaaatgctctgttcaattttcaatctggaatctaaagggatgtgacaaggccgaggtgattacttgggagtaaatgcaaggagagtttccactgcgtaagggaatggacagcacgtggctgggtaaatttcaaaaaagacaatgctcagagtgagtactgtgttttccagtaagtgggagacttccccaccttaccccaccggagaaaggactctttgccttgaagcccctaggacgactaccctttcttcacctcctcttcctgaccaccccacatcaaagagctgcgtctataattctgtcttgcccagtccatatctctaagaaatccgaaggctgctctattaccatcacaacccatagggaggagagaaaaggtgcttcctagacacagggaccccagaatgagctgcgcaaaaggcaggaggagagaaaggtgggctggaagaaggagaccacggaatctggcacggcaaggtattctttcatctggcgtagacctccaacaaccactaccatcccccagccccttccagaactttccttcaccttctcggctcactctcacgcttcaccttgtgcttttcctccggcaccagcaccccatttcaaaccgctctcttcctatgtctcctccaaacagtaatttataaacaccgtgctttcaaatccatctcatttcatcctcacagtactataggagggctgccttacaggctgtcattcggaagggttggggggactggtcctgccagacaatttgcgaaggtcggggcatcaaaacttttctttcctgcctcccacgccaagctaaacctctgcctccccgagtgcagggagaaaagcaaggtctttgaagtaaggagtcctgagtggttttaggcaagtcccttcgcttttctgagcctcacattcctcacctgtcaaccgctatagtgacgcctctacttttcagggcgtgggaggtcaatgagatcactggtgtgccgcactgaactcggggatggactctttatttccagtcagtaaagggaggtgttctatgcatcacaggcttttgcccacgccgccacagcgcggccggcccagggctctccagagcggggcaagttccctgtcatctgtgtctccgcccttccttccccaatctcacccaggctggcctcatcggcttgttccgcacccactccccagccctacagcccccactccgacctgacaagtgccccacccccacctagagatcccgcctctccttgccccacccaccaaggactcctcccacagtcccgaccctcattatccgggcttttccgactatcaccatccgcccttgctctcccaacagccccgcccctctaagagctctgcccacttcggctcacctcgctccgaaacgcgccccctcccccgcaccacaggcgatgccatccccatttcacagatgggaatggcgaggctgggatagattagtctcatggtaagacaggtgctcagtgggcccacgtaccctcgccggtagtccccgagccccgcgaccccggccgtgccgcacccacctcctgccctcgctctgcagcctctccctccgcgagcggccagcgcagctttgcgaggggggcggagggtaggagcccagcccaggggcgtggcggtccggggtctgtgcgctgccttccgggactggtagttctctctgggctcctcgcagctcggcgcgtcgagagcgaactccatctcccaggaggcattgcagcgagttgctctgcgccccgcctcgtccccgccggtgtccggccggctggccttaaaggggacgcggtcagagtggcagctcgcggggtggcccccgctccggctccgccccatttcacgcacctcgcccctccccatgcttcatcccgcagccccggggccgcgccgcagagtcgggcttcctggatacatagaggcttgtgccaggcggggtgggaagactggattttgcagtggaagcagcatctcttccgtctgggacctggctgagggcgtccccaccctggggggagcagaggaccagccctgacctagccgggcccagcctcgtcctgcccggcctgagcgccccgcccagcagccggctctggcccaccggggtccgggaggtaagggggttgggggcgtgtgactgtctttggggggcggtgtctgcaccctggcctttcgagaaccctggacttgcgagcccagggctgggagtcgggagatctgggtgcatcctgggcctcctgggcctcactgtgtgaccttgggcgagtagctattcctctctgggcattaatcccctcccttcatcaattgtatgtcgaagtgatcctgctccctcccctttcaggtaagagggcattcgcacccagtacctagtacattcgcttgctggcttttcgtggggccctccagctcaagcgtgggctgggcgcgggtgcactggagggagggaggtggcacaaactggggggcccgaggccaccattgcttggaatgggcttttcctattctcagtgtgctgggccctgggataccctccccaaccccctcttacggccctggcccttgcaaaccggagaccctgatgtgtcagcttggtgcccttccttccagaaagcttggggtggagtgcggccctcacaggtttgtgaggggtggccccgcagggataggtgtgtgtggtgggttcctgaggaggaatagctgctcctgctttcttcccttctctctcctccttatcctttgaggaagagcagctgctttttaccagtgaaacccttttttctttttctttccaggagacagtttggtggcccagacatgggcctcccggagtagggtgaagcacttcttcccagggttgccttgggtagaagttcagttaaaaaatacctagagagatgctgccattcagacacctgaggggccagagatggagggcaccacctggtgtcgggaggggcagcctggtacccccaaggaagctctggctcccaggggagtcaaaggagggaggctggcttcgagggtcagagaggggaggaaatgtgctcctcagctcttaggtgctgagcagaggctgggaggggctgctctgacctggagcagggagaggttgagtaacaccatgaagccttcttctcaggtcctaggagattctgtgagcttttgacctgaaggctaaccaggaacagatttttgttttgttttgttttgtttttgttttgtgctttttcttttgctttggttgtttgaacaatttctagaatggctaaagcctcagtccagtccagtgacctctgtaggggctttcttgactgatgtttaagattttcagggtttttgatatgcaagaccaggcctgggcaaaggagggggtggtgactggaccaaaggttaggccagtttctggaaggtacttttgtggttacatctttggttttctctcatcttgctgtcacatgtctctcatgagttgcttgacgcaccttcacggacacctcagtccttggttctgtactgggcactgggctcagagacggggattggacctctgccaagggaggtcccagcctggtg

SEQ ID NO: 914860 - DNA, 4001 bp, Homo sapiens
ataaacgggtttgttatatgtccatggctacaaagcacagctgaataaatgtgagagatgatatcacctacaaagcctaaattatttactatctggccctttaaagaaaaagtttgtgaaaccctgatatacacacatgcgtttctgtcaatagagtcggaattattttacctaaatgcatatcatgcatatgaaaccagttgtctgagtatttagggtctaactggtagacacgttatcaaagcaatgcccaaagacaacttcaggagtggtgttctgaatcaaatgtagaaaacaagccactgaggtagttaagggagaggcagattcttgcctcagctcaaatttctccagtggctctcttttatctagttataaagtcatttgcttggcattcaaggcgcttgaagaccagaggctacaatcaaccaggcttttccgctcagtatcattaaattacagtacttattttcccgaacaccacggtctcctacgcctctgtgcttctgcacatgccatggcgtccttctatatgcctgcccagcaaaccttctcatccttcaagtctctgctcctgaaatcttcctggatttctccagtctctggcagtgcttcaatgttgccactgcactctgtacataccttcaattatcttgtacagtgatcagttatttgcatgtctttgaccaacagactgtaagttccttgatggtcaggcattgtcttttcatccttagattcccagcagaattaccaaacacagaagtagacatcaaagaagtatttcttgaatgaatgaaattttaaaaatcattaaatctaaaagtgaattatgtttggttcctaaattctctgctttgcccagctgtcaagacccccttacccctttcccaagttgggacacacttctggcagctatgttcccagctggactagcaggggcagaggcactggtttattctaattgtctcttcgctgatacaacaaggtgctagttggccagagccccaaattatacattagcaaatcctgactgacaacagcgtgaaaccagcaggacaagttttaagaagttgcaaaggttaagacgtgaaggacaacgtgggaggaggaccgggcagaaagggattcaggacgagatccatctcaccctccgtggagggaaaaccgaatgatttctactgagtttccctagttcctgtaatctgctttcaaaaactcagaactaaaaaggaaacaaaaaactaacacgtaaacccctcctccttcctacggctctgacatttcctctgcgtaggatttcgttgctccaaacccaccaggcctaagccatgtaatccgacgcgatccgtcggcttgatgactcaccactggaaagcgctccctgcaatccctcacagttcagacaactaagtccgagatggaaggcaacgtgtgactcacggcacactccttgtaacgcccgggcgccgtccattcgcaacatcagtccctgcacattaaatgcggaagggcccttcaagttcattcattcattcattccacaaactttcgtggtgatttttgcccgctttgagtatgggcgggaggagggaagaggagctgaccagacccaaaaaggggcgacacacgccggggagggacgccacgcaggccgcgggcggactcccgggcggcggggacgcgcggggacccggccgcgggacgagggaggccggcggctggacactacctgcgggagagcgagtgaggttctggccctccgagttgaccgcctgcaggtagaaatagcggaccggcaggacgacggccgcctgcagcccgggcccccacaccaggctccgcggcgcgctgaccagcacctccggggcccccgcggccaccagcagggcgaggcgcagctgcagcagcagggcccgcgggaggcggcgcatggtcggcggggcacaactgcggtccagctccgcggcggcgaggaggggccggcagcgccgcggaccgggcggggactggggcccaccgcggggcgggtctttcgggcgggaaagattgcggcgcaggctccctttcccgcccgctgtcccgcctcgtctccctcgggcgggaacgcgagccagtgccgcaatcacccactgcgcgccctgtaggggtcgacgatgggtgcgccccttcctccccgcagccccataggccccgtggaggaaaggggtggagaggcccgcccagagaccgaggctgcgagtgtgcgctggctgttgattgccaaggcttcaggcacgcctggcctccacttccagtggtctttccctttctttttcttccttcctttccttctttcttctcttttctttctctgtttttatacagacaagggggctggctctgtcgcctaggctggagtgcaatggcgcgaccacagctcactgcagcctggaactcgtgggctcaggagatcctcccgcctcagcctcccgagtagctgggactgactgtaggcacacgacaccacgctggctaatttaatttattattattattattattattattattattattattattactattactatttgtagagacggggtctccctatgttgcccaaggtggtcttgaactcctggtttcaagcaatccgcccgcctcggcttcccaaagtgccgggattacaggcatgagccaccgggtccgccgctcaggtgtttttaaaggacgtagacccggtggtgattgttgtgggacgatgaaagggtccggccccaagatcgatgtagtttagggaaatatcttttcccaaggaatgtctccgagtttacaagatgagcgccaaggtcacgccccccgccctccctcacagccctctgttcacagcagcaccgttctcttgtggccggttttgttgcttttctgcttagcagcctccctcacagaaccgtgatccccccaccccacacatccctttccccgcttcctcccgcactcctcttcttccagcaggtgtttacagaacatccacggagtttgggccaagcccagagtgaggagctgggcactggggtggcagaagaccaggccttgccttgagcccttgtgcgagctttacctcaaagcctctgtaatcgaagtgggagaaggggtggtggtgcgtggttggtctcagccacctccaccactcctcagaagatgaacgctggatccaggaagagattgtcaaggttactatctgcctctcttttttgatcattttatccaatttgttaatggatacaaatttgttaatggattgttaatagatctgaatttatttaaagccaataaagattctcctctggctgaatgatccagaaggaactcacaccccagaatggacacaggatttctgcaccctcttgggggaacttaatgcccaaaacatcagagccaggcactggacaagcctttgtccgcctcacggctttaaccgtgctactcagcattcttgctgtgaccaagttttaccagggcaaaatctttcccacattttcacacttctcttgacctattttagtaatgctaagcagtggttatggacagtattctttgtactttggaaaggtttcaggaactggtagtcagttgccggtaaattttagggctaaagtgtaacattacttggtattactttcactgataaattttattttgtggggatgtctccttgctttaaatagaaagctttgctctgttccaactatcgcttaaaaaaattgtatggaacacattttgctcacactctttcaaaatctgacttaaaacaatttccagagaaataatctgaggtttagccggtactggattatagtaaaacatggcctaataaattacataacatttgggttaacacccagtatttttttttttttgagaacacgtcagggaagccatataattgtacctgaacacactagcgtttagcaatactaagcctgcaccaacctgttttctttctcatcttaacc

SEQ ID NO: 914861 - DNA, 4001 bp, Homo sapiens
gtggcgctatctcggctcactgcaacctccgcctcgcctcccgtgttcaagctattctcctgcctcagcctcctgagtagctgggattacaggcacctgccaccatacccagctaatttttgtatttttagtagagacggagtttcaccatgttggccaggctggtctcgaactcctgacctcaggtgatccgcttgcctcggcctcccaaagtgctgggattacaggcatgagccactgcacctggccaaatcttttcgttttagacagaaactcctgaaacccaaatcttctagtataatggaatccttcttcttctgaccttatgagccctaaagcaacaccaacagcaaaataaatctgggagacaagttacatgattccttttctggctaccctaggtatgtatgtacaggatggtaactgtttcggcaaacactaaactctgatcctggacaggttagcaagtctgggccattgctaataatttttctcataatcctgtgtgctctgtcccggagaccaggacttttatgtattttcattcttaacctaaggatcctgctccaaatcccaaagttgggtctcagaaagaccctttcactcatagccaagaagctcctctactaagatccccttttgccaagtctccagatgcctctcaccttcccccaaactcatttcatctgcggatgttttatttacttcaagttgctatggcatccttttctgttagtaccatacagcgtgggggtgaagaggcggggtgtggtgccacgtgggacaaggctctggtatgggctcctaatctccctagggtgaaaaattcaggtccattcaaaatgtgtgctagggagtgcatggctcccctcccccacttcgcactgacgaagagtaggactctgcccatttcctctgctgaagtgaactgagctgtccacaaacggggactttccactttcagcaaaacagactgcacagtaagatctgcgattgttcaagagtagaaaaggaacttaactgttcaccaaaagcagtctaattctacctgcaagatttttgtggggaatagggaagggtaggcggaaaactgtgtcggtgtgtgtgtggggggtggcagctgttcacacatacaagactcagttactggggtatgtgtgggtgtggagggaaatgcagatttccttccaagccttattttgctggggccattcaaccaagcacgccctgctttcatcaaaaaaggcagactccagctgaggccctacaagaaaccatataaagaagccaccacccttcactagagggggtttgggataggagagcgggggtggagtgcgggaaaggctgacgcctatctcggctccaggcattcgggagaacatttaaacacaagcccacaccctacagatcacaggaagggaaagagaacagaaggtgcctgggcagagagggaaaggattctcaaaagccaaccaacccaattcaaaagcacatcccaccaggtgagggaacaagtgcaatgacggctcaagcaacacgaagtaacatagcattgtcctggactcgcccggcaggcagtttctcctgcctcttcactgagacaaaagtccctatagttacacgcaccccaaaccagaaagggtttgccgatcgaccccctgacctttcgtttcccgtcgctctggagctgccgaggctcttggtgaagtttccccagcgtctttgttttgttttctgtactggaagttctcctgaaggagttagatattctgcctctgggaaaatccggatttacttgaatattctggaatctcccagagcacatagggcagggcagtccagctctgacccttcagactacccagagggagcagcgtgcagcgctctgggctccttctcgagcccttcagctcagccgcggcttcctgtgcctgcgaacaatgctgctgcgtcacccacatgcagctcccagaaatgctttgcaacggaagatggcaggagggggagccgagcgagagtgagcgagccaggcagagggcccagccgttctgctgcagagccgggagggggtgtgttcagcaactgctttcttcctcgcgattggaagaggccctgccagggaggagagctcagccacagcccccgccctgtctccctcccaccaccactgcaataggagaacctagggccagccccctgagggctcccggtggcagacttctgaaggcgccagccaaagggaaggctttaactcattctgcgggctacactaggcaccttggcccacatttgtccttgtttcagtccacacccttcccctcagggtcacctctcactgttaccactgttactgccagagctctctggctgactgcacacacacttctctctcccctctcagcaagtagagggggtcgcccaaagttccgcctctctggatgaactaggcacaggagctgagttcctcttgagttatcttctctctccggcacactgcctgcttcacctgccctcgctgacttgctcccagcccacaatccagaatctgcctatgtgttccaaaaaaccttcagaaatggcccatgtcagccaatattgagatattcaataaaatacggctaacatcaactacatctaaaacagatgcctgcttctgattctgacaaggactccacccccacagtacagtactagaaatgtctgcgcagcaatcctgcagcagttccaccgtgaccaagtcaaacaactgaggcacaacacactttgccctcctgcctctaaacaaggtgcaggaagccagggaacacacattctcccaattccagcagtctcctctgcctgtaagattatcctaccctcagaataccagtattgtactcttggatttccatttctattcaagtctgtttgcctgtctcattcttgatattccccagatgaagcagccagtcctgcatcctgtcaagacacctcactgccttctcacagccactcggactgacaagtattgctcacacctctgcacaacaaaccctgatccccggatccccagctgggatgaagctcagactgaacacacactcctttcagtctacaggaggaaaggagggtgcacactctggttgagtttctagtgatccacagtgtaccaaacatcagcatgggagaacctgagtaggaatcaaatacttagcagaaacagtttgggtcttttttagagccaatgtgatttttatgtgacttttagacccttacaaatgtataacttgccttttttgcagatgctctgatttaagcatctagctcttaagcattcttatttatttccaggacagttgtttgagtgagtttctggtacagatttagtggctaactaggctttctaaagtctggagctttgctgccaggggctacatatgttatttttatagtagtttaccaggggaaggacagacttttgtgctctcggctgagcttctcctggaaatgcttatatggtcatcctaaccctaaacttctcccggacactgtatcttaagactcaagacccactgcaatcggcttattttgtttgaaaggctttccttaacagtgatctagctattgagaggtcttcttggaaaatgcttattttgatcttcagtgctatctatattatagagatagtaaagtatgaatacttaagagaaaacatattactttaaaacaaacgtaagttcaagttgcagcaagtgcaaattctagaggccaccaggaaaggaaaaaaatcacatcgggcactaggaaactcactcccagtaagtttccaaatcacaaattaaacaaggcctaactttaccccctcctgctaattgagaataaaagataggcaaaaaagataagaattactaagaccatgacattacataatacaagaatataaggaaaatatttaaaataattatatgtaactttaagcatatatgcctcataactgagttacattacttaaaactttc

SEQ ID NO: 914862 - DNA, 4001 bp, Homo sapiens
gccttcctcttcctccttaggaaccagattgcaacactaaagaataatgatataagcagaaatgagaactcattctcaaacttgtgctttctgttcacggaaaggagtatttaaggtaagtgttaaaggctctctgaaaaatcaggttcctcttcatgagtttgggacctttctgctcttgggcaagtggttccatgtcatgttcaacattaatcacattacaactgtcggaggcctagacgaaacgagatgttggtttcagttccttgtggaagggccacaccaccagtttctccccacaggattacaactagcaaggatctccttcatggcagcatcagcaagaaaaaaaaaaagcccaggacttttatctccagagagctgaccaggtgaagcaccactgaactaatccagatcctaaccaaattagttctctctcaccggtaatcagaaactaaaggaaagaagggcaaactgactatgtaaaaagaggacaaaaaattaggatttaaatgaccccaaaacaatttcccatacccctcctgtaaggccgtgcacaatcgtcgccttcctttctagactccccggatcttatcattcccaaatctaccctccaccccaacacaagatgtgcacaactctgaaacaaatttcagaggtgcaaatcaaggaccaaaattccatctgatctttttggataaagtaataaaataaacgattgcatctaaggatacaaggaaaatacatcttgtccaaaaattaaataaaagaccggccggcgcgacggtcaatccgtaataccaagaaagggttttcttttttctaaatattctcgtggataatggcttccattgagaacacaggttccccccgtttttgtcactacattacagccacgttaacagcatcctttcaaaactgctacgagaccagaggacccgatgacacagtttgcagagcagttagaggcagagccctcccggaggaagccctggcccgaagtcgggagggaaaccgtgcttgcaccccctgggcgacgaccgcctgggcatggagcagccagggccggagaggaaaaagggcgaatctcgctgggctcccccaggaaaaggcgtttcaatggttcacccatcggaaaaagagatagaaactttgcattcagtctttggataacacagtcaaccaaacttccaaatgaggggggggagggggaaactcaccggagattctgctcttgagttcttgtccaagtgagaagtaaaagattccaaagctgagaggaataattaaatcccaaacgtcgtcttcggtttttccgtggatcaacccagtatccagagagggtcagagcgaccaggaaaagggagcaaacagttgctgaatcaaaccttctcttctggctttggagaccgggagtcggaggcgtcaggagagaggagcgcgacccctcggcgccgagcccggggcgcccccgcctcccccaggccagcggtcagcagcccgggcccgagccccgggccggccccggccgcagggagcgccctcctcgccgtgccctcggccagcaggggctggtcgcctgcgggagcagcggccgatcagctgagaccggccggcccgaggctccccgcgccgccccggccccccggaacgcgggccccggccccggggggcggacagggcgggagcggcgcggcgcgccgggatgggggccctggctcccctcgcgtctccccctcaggtctggctccgcgctgcgggacgagccccccggctactccccagtcgcagaagagggattccgggggatgggccccctggcgttgcccctcctcccggagcgtcccctgcccaggaaagacagagcggccacgggcccagccgctgggaaggtgctccgagagccgccgccgccgccgccgctgccggggaggggtgttgtttccctcacacaggaggagccgctgaagcagccgccgccattttgaacccgtcagactctcacatacacacagctcctccgaggcgcactgcgcaggcgccacctccccacccctcctccagctcgcctctccacccccccacccccttcaggcctccctgcgcttcttaccgctctcccgggcgcgcgtgaacgcgcacgcgtcactcccctctaacgcggacacaccgccggcgcgcgcacgcgcggatgcgtcggcctcgaatcgcccgcgccccgcgacgccgacgcggctccctgcgccccctcgcgtcaggccgcccgccctccctccctcccgccagcccgccgcccccgctccccgtcggcgttcttccagggctcgggcctggctggctgctcgcgcctgcgcgcagggcaccgatcctcctccgcgcgccctccccccacacaccctcacacacacttcgcctctgcgaccccgcccctcgcggccagctgtgctggccgccctcccccacccccctgggagggtggtgacccccgaccccccacaaagcacatcaccccccccaagcagtgggagatctgcgtccccttccccttcaaccgcctttggccccaggctgcccgtcacagtcacacaacctgagggccgggaggcctgggccagggcaaccgatacccgcctcaaagcagggtctcccggggtcaagccgccgggctgggcccgcgggacctgggctcccggctcaggcctgcccagggcgagagggcgcagggaaggggcgcatggccgccggctgccctcccttcgcgtgccggccggtgggccgaggccggcttgcccgccattcccgggcaggccccggcgccgccgccacggggcccgtctgccctgggcccgggggctcctcggtgcagcggcctggccccgcctcacccactgctcgtcgctccgaaggggcaggaaacaggagtagcatgtctgtcctgggctcggctccccgggggtgctgcaggcgcttaacaagggcgtccacaggtaccaggcgcagaagcggtctccgcgacggcccgggggcggtggcggccggcgcgcccaccgccggccggaggcgcccggcgaggtggcccaggaagcccccgctcctcggccacgctcagctttccgccgcgccggtgcccccggcggcccgggtgggacgtgaccccgcccccggcgagtcggggcgccccccacggaggggtgcgcgggccgcccccggcccccggcccgaccctgccgccctgggccgtggcgggcgcgggaggcccggccgggaagatgtctcctgttggtgcgcgcagcttcgcgcgggggtcagcgacggggcagcagccgcccgagctgcgccggccctgcccacggaccgactcccgcggcccgacagctgcccgacgggccagcaggctccgaacgtcgacggagcccggccggaggtacccgagcagtgccatgcgagcagcccagccgcgatccgggcatttccccagccaatctcttgctctggggcccgtttaaattctaaatcccacaaaggacggtggctggggcgttacacatcggggttggcactattggctccactacgcccttgctgagcggtgtcacacaaatctttttctccctgccttggtttcccactctttaagctctgactcctggaagcagggaatggagcagagaggtagggcatggagtgaatcatataacctgcataaacagccatcaactctttcaggaggacgttagcgagacaattaaaataatgataccttctaattctatcaaggcttgaactccaaggtaaaagcgctacgtaaatgcaaggtattattatttattaccacagaaggtttttctgcatgcacaacttggggagtttgtacagacattctctgctttgtttcacaacatccttaggagacaagctaaagtgcctgttagcgctatattcattttaaagatagacaactgaagtatagaaaggttaaagagcttgcataattactccaa

SEQ ID NO: 914863 - DNA, 4001 bp, Homo sapiens
aggttcctgctttcctggaacttatgttctaatataggaagatagacaataataataaaaataatattaataataataataatagctaacatttatttagcaagtactatttgctgagacagttctaagcactttacaagtattaattcacttaatccttagagtagtattacaagttagggactagaattacgcccattttacacgtgaggaaactgaaagcacagaaagggaaaatgacttgcctaaggttatagagctaggaaagggcagaactggaatttagaacaaaaatgggcaggctgaagatccttttctcttaatgaccttcgcatgctgtctcctgagagacatggaaataaaaaatgaatagaatagactctggtaatgtttagtggtatgaaaaatgaaacagggtgatgtgatggtgtacaaacacaagtgttggaggggtgggggtaggaaaacctcactgtgatacctgagacatgaaggatggtgatacagttactttggggcacaggcaacagagaaaagctagtgcaaaggccctaaaatagaaggaatcttgccctgttttataaaacagaaatgcccacttggctgtgtctagagcttagtgcgtaagcgagtgactgattggaagtgaagtctggaaggtaggcaggaaccagactccgtggggtctcaggtcacattaagaaatgtgatttttattctaagtgcagtgaaattgtacacaggatagtaacaccattttattaattttaaaagatcactctcttggctatatgcaacactgactgtaggataaaagatgacgcaggaagatataataggaagcaattacaatccaggtaggagatggtgttggcaaaggcaagggtagtggcagtagaataaaattgcgggtgagttttaaaagtagaattgttaagacctgtaaatgaaccgtatgtgaagagtgaatgaaaaggaatttaagtaggcactccgggattttggtttgagtaactagcatgatgatcgcgtcttttagtgagacttgttaagactggaggagggataccttcggtaagaaaaatcaggattttcatcttgaactctatgactgaaagggctttttctgcttttctttcttcattaaaaagttgcaaagaatttaggggtaagaaagcatttaaatattcaattttgtgagttccttacattttaaactaagttggggaagttgaattttcatttgtttaacaaatattaattgagcagctactatacgtcaaggtctatgtgatgagataccaagatgagctaaacaaccaagatctctattctcagaatttgtttttatggaagggaggagagacgactggtaggtttttggttttcgggttttctacttttcgttgtcttattaaaacttaacacttaagtagccatcttaataattacatcttgtgctcctggtagttgggcccaccattgtaaacgctctcgtaaatactgacatctcccctcccactaaaactaacgttttttaaataagaaattttagcaaacattacgaatacaacctttgctttgaagtgttaatatttttgcaggaatggtacctttgtaaagatcgtggttgccccgtacatatttgttctttcttcatatccaattaaatgaaaacactagtttttccgaagcccaactctctaggtttgttggttctagctcaggagaaaggatggaagcaggagtcgttggatttaaacagtttggtgtaatccttttccacgctctctcccgctagccggggacgtggtgtcggctacccggggctttccgtccacgcagtaccggaatgaaggagtctgggagggggtcggggacggaaaagacggaagagacattaagtaattggttcttgaaggtataaaatgaggtttagggtctactctaaggcactgatttcaaacgcccgccccctgggccgcttcggccccgccccttagtgccgttacgccgacttccacttcggccactgcggattggtcgttgcttccgcccccgaagcgcttggattttgcttccgggtcgtaggcgctagctctgggcgcagaggtttctgggagccaagagtggtaatggcgtctgtatgatcttcggagcctgctgcatcggacctcggccagtgtgagcggcaagaggataggagattatctttcttatcgcgatgggacgggaaagggcagttggggtcggagtcggcggcagagtgcagagcgcgggcggtggaggccctggagcagcgggctaggggcggaaccgagtgcctgtcaggcgcgtctggagctcttgggcccgccgaggagatcgcagcgtacaggcagctcgcctactgcgtaaagcgaaccccaggtcctcccttcactacccttcgcacccctgcagtgctgggcacgggtgaagaggcagcgagtttctggttatagccaaagactagctcacgggaggccggagtgataattccgtgggtgtgtgggaaggggcggcgcccccagcgccagataaccctgttttcttctttgtatacatgtctctaccctttttgaaagttgagagaattagcatcgccccccccccaaaaaatcctcccaattcgcccaccctccccacacacttgcttttccgacactaacagggttttagtgactgcatctgctgcacagtattcttgtgactgctccaagcagaaagtaacttgaggaatgagtccctgatttttggcatcagaatcctctgggggtgaggttcctgttttttttgaacaggccttaaattataacccacaaacgatctaatttatagtatgatgcctgttgtaggagaaaattggctcaacaaacggttgtttaagaatttttttctgtgtaactgtcattgaagtttaacacacttttctctgggacatttagtaactttgtcagtgatattttttgtttgtttttagcttttgtttctactagcctatttgctattgtgtgaagtttagataaaatgcaaaccttacagagtctggtagagtaaggttgagttggaaatttttaaaactcagtcatggcagtactgtattttactagggttttgacatgtcaagtgtcataattcttataatctatgaggaatatctccattccacagatgacaaagttaagccaggtgacttgctcaagcccatatagtcagaaggagaatagggatgcaaactcagatcttcatgacagaattttttgtactaaggcaagcctgagaagccatattccttgtacagcctaagcctcataatttgttttcttgaaaacttttgtttaagaagattaagcaggttttggggaatgagttttagaacttattttaccagtatggatattgattaatactctataaaatgagtgtttgtaatgttggaaataacttgattatatttttcttcaaagcataaaagatgacaacagcagccaggccaacctttgaacctgccagaggtggaaggggaaaaggagaaggtgatttgagccaactttcaaagcagtattcaagcagagacctaccctctcatacaaagataaaatacaggtagtaagactttctttttttattgttcacaaaacaagaccagatctgttaaatggcatggtcatgatatagtagtatgtttgagttatgtcacttatctattttcataggaatagaatgcaataggatgtttaacactaaaattctgctgtgattttaaaatgtgaaattcctactaaccaggaattttcatatgtagatagaacaataaataatagaaataataatgcctcagagtatgcactatgagcaccagtcagtatattaaaagtattactgttaagttctgagttgatataatcctaataaaaattaaagacattttaatcactgtaaagccttattataggaaaatatgtgattgaatttggact

SEQ ID NO: 914864 - DNA, 4001 bp, Homo sapiens
caatgacattgggaggagtcatgcagacaacatcagggagattactagtagtgctgttgagggatagcaggcacaggccagggtgcatggtttcatcacgatccagtgggggccccaggagttgaagatcagggacacagcagcagccagaagccttggcaagatgctgaaggccaccactcaaagggacagatttgtcatcaaatcattggcaagcgggagctgaggcctgtggccttgagctctactccttgtacccattaaaaggcgcctcttggatgcaggctgaacagttggctcctcagtccccagttctcgagtacaacaaccatgaccacgaccacgactgcaacctcgaccttgaccttgaccacgaccacgaccacgaccagaaccccagcttccagtggaagggagaagaaccctggctgacatccccagggtaagtgactgggtctgggtatgatatgcagagctttggaatgcggatccaggcacagcatcagtgccacagccttttgggttgtaacagtgccctgaggacacaggctgtgtgggacactgggctgtgaggtttgggagaagcctcaggcccagagcagctcttctaagtactatatcatctctccagttgctcagctcttggctttctgcaaccctgggctctgtgtgttccacaatggccaagtcttgcctgtgtttccagagctcataactctcgggttgcacaatgcgcacaaaggggtccatggaaaaggtcactgtcgactccccacagctacactgagaggccattttgccataatcaatccatcgtggagtggcaaaattaatggcttctgcgcagttgaagccgtgattgaagccagcatggtagccatagggaaaggtcaccatgaactccccagcctcctgagtcatgcaattgaagggaatcccattttccttgagaactgtaggcgagatgagggccactttgtgccgcaggaaggcctcacagccccgagaaatgtctgggaagagctccctggccaggcgttccaggtgctgaccatgttctgggggcaccacgtaccaagttttgggctccccaaagtgcaggtagttgatgctgtaaaggtccatgtcctctgtgtgccaggcaaacgtggtcttccacatgccaaagtacaggtagggtgtgttgacaccctcgatgacaaccccacattcctgctccaacaggtccagaattgttcccaggtgtcctaggttccattgtttagtgctttcttcaaataaggagccgctgatatcagcaccataaattggtggattaccggggtggctcttccagtatcgttgctccaaatctgcaaaattctggtgtggcggagtctgatattttttactgtttgccaagcggcgatactgccccaccctcatggctttcttctttttatggtattgagtaaacacacctccctgcccagaggtcacctgctggaggggagtggctattaagatgtcttcgatatcatcatacatctgtctggctttccattccttgggtggaattaccttggcaaggccagcttgatgtgcgccttgggactccatgtaagcaacatatgtgttgaaatctgcaaattcttccatggttgggtaaaacgtcatgatggtatgactcgtgttctggggactggagtgcacagacttcatggctgcacacaagaagcagctgactcccacgttcttgggtgtcctctagatgcctgagagttctggggagtaatttcttttctcccctttgtttttcaaaatactttggtttatctgtgagacagtaattcacacttggacttttgaacaagtgagatctttcacaggctttctgactccccagggggactccactctagtcagtatacttttttctgaagaagtagagtatgtcccagctctgtgagtttcctcagttgggggtgtcactgtgaggcttctcctgattctcaggcttgggtgcactagtagcagctagtgtcccactgtacctgggggtctcttctaggaagtcgaaacaatacacctaaacaacaacaacaaaagatacagaatattcatattttttaaataagtatataaccagacaaaagaaatattcagctagcattaagctaagctaaaacatatgctaacatcaggatatgtaaacattgtcaggcctctgagcccaagctaagccatcatatccccagtgacctgcacatacacatccagatggcctgaagcaactgaagatccacaaaagaagtgaaaatagccttaactgatgacattccaccattgtgatttgtttctgccccaccctaactgatcaatgtactttgtaatctcccccacccttacgaagtttctttataatctcccccacccttaagaagtttctttgtaattccccccaccctcgagaatgtactttgtgagatccaccccctgcccccaaaacattgctcttaactccaccacctatcccaaaacctgtaagaactaatgataatcccaccaccctttgctgactctctttttggacttagcccgcctgcacccaggagaaataaacagccttgttgctcacacaaagcctctttgggggtctcttgacacggacacgtgagacatttcgtgccgaagacctgggtcagcgggactccttcgggagaccagtcccctgtcctcaccctcactctgtgaaaagatccacatacgacctccagtcctcagaccaaccagcccaaggaacatctcactgattttaaatcaggcaagcagctctttttactgtcttctccaacctctctcactatccctcaacctctttcttctttcaatcttggcgccacccttcaatctctttcttctcttaatttcaattccttttattttctggtagagacaaaggagacacattttatccctggacccaaaactccggcgctggtcacggactcgggaaggcagccttcccttggtgtttaatcattgtggggatgtgtctctgattattcacccatgttccattggtgtctgatctccgcattcacccacattatcattcacccacattcccttgatgggcaaatcaactgtggggacagctgctttggctgctcccctacgttgcagctcagggctgctccccaccccccttctctgtgtctctacccttattttttaaacttgcctccttcactatgggcaaccttccaccctccattcctccttcttctcccttagcctgtgttctcaagaacttaaaacctcttcaactctcacctgacccaaaatctaagcatcttattttcttctgcaacaccacctggccccagtacaaactcgacaatggttctaaatggccagaaaatggcacttttgatttctccatcctacgagacctagacaatttttgtcgaaaaatgggcaaaaatggtctgaggtgcccgacatccaggcattcttttatacattggtccctccctagtctctgctcccaaagagacttgtcccaaatcttttttctttctctcctgtctgttccttcagtctccaccccaagctctgagtcctttgaatccttcttttctacagactcatctgacaatcctgtttcccttgcctccataactgttgtgggtattgacagccaagcttctaaacctcttaaaactccccaactctggtgccaacttggacaacattctttaatgcactcatttttagttatccccacctgcccagctcccttattaggtcgagacattttaactaaattatctgcttccttcactattcctgggctacagccacacctcattgctgccttttccctcagttcaaagcctccttcgcatcctccccttgtatctccccaccttaacccacaagtatgggatacctctactgcctccttgtcaaccgatcatgcaccccttaccatctcattaaaacctaatcacccttac

SEQ ID NO: 914865 - DNA, 4001 bp, Homo sapiens
tcaaagtctattggtcatctattaaaatgttcatttataacttgcctaattttaactatatatttagcctttaaggatcttttttagtgttgtatttctttataggaaatgtcattctaattctggaatagagtctatttggttgtgttcattcaaagtattgctggattctatttatgaatattttctttggcatttgtatcaaaaatttataccacataaaatttaaaaaatgaggcctacaaccattttattaatgaaaataacagaaaatacactctcaatgagccatttacaatacttccctattttctgatttagagataaatcagggtcgtgtaatagcagttgtgtccaagaaaatataatgtcaagaggccagaattaaatccatacagaaaatgattgtgttcatttcagagtaacctttaagagggcaattttggggagcagcaagggcaaaagccaaactgaatggggttaataatgaatagatgagaggaactagaagcagctattgcaagctaccattttgagaacctgcccaaagaaagaaaagactgaagggatggaagattgcagaaagcatgatcggagaagagatattttacttttagtgaagctctatacacatttgtcttcctcactagatttgtatccctagaacctagaacagagtcagccaaagagcaggcactcaatacaaattgttgacttgctgctaaaattgtaacagagtacaaagaacatcctagaaattggagacaaaggggataagaaaacagagttaacttggaaagagaagacactcatctctgacaagactgaagatgattacacaacaccatcattgccaaccaagtcctttgggaatacaaaggttaaatcctaatcatcacaacagtctctaaaggaataaacctgatttacagattttgataacaaaatacttctcctctttccattttctacaatgcaaccaacagcaacatcaaaggtaggcttaaccaactcttcgagaaaagtcagagttaatccagattgtaaagcgtccaggtcccctgtttctcatttcctcttttctgtcgctctgacaacagactgggcagagatggaaaacaaaacaacttaccaaactgtgtagcctttagcagctctggtaaatgcatttagggctgtgttaggataactgttaaaacggactctttaggatagcaaaacattttacttatttgtgtaatttctctctccaagtagtacgataaatcaggaagtagttaatatgtaagtaaagaacataatggcataaaaatatccccacagaatacacagttgatgtgttttaaaattcacaaaaattttacaaagttgaagaatgggagtaggataacagggtgatggggggaagcagccacagaattagataaaatggtataatttcaggtctaaggtgagacacgacagttgctaaaggaaatatctgcactaagatgacttgctagttttgatcaccctgcgtcaaaggtaatgggaatctaattggaaaaagatgggccccgttttcaacatcgctaccctggcagccacaggctgggaaggatacaggtaagagccaggtcggtgatgcccgccgctctcccgagggccgaggggggctctgtcgaggttgtccgatgattcagtgcccagttccccgaccgcgctccgggttccgggcctccccgccagcatccttcacttcagcgccgcctgtctgctcgcccccagaacctccctcatggcagctccggcttcctcctcctcctgctcggcccctccctacactccgtctctcaggccccgcgtcacgggcgcggaagggttggcctcgacagccctagctcccgcgcagcggcactggtgcctgtagcggcgatggcagctgaggcagcggcgacctcgccgggcaatagcagatggggcggcagcaaccctgcagccgccatcttgacaacaaccgacggcgcgtccttgacaacggaaacctgggaggagctacaggtcggggcgggacgatgtgcccgaagcagccaatcgcaggctccggcggcccctccagcttcgagcggcgggtggcaacccaagcatccctagggacccgggttgttgcgcgaggggtgagctgagtgttgttttagagcctgatgcagttctgcctccctttttatgagagtgtttttgtggcagtaccgacagtgacgaaagacagatgtaaaatcctcagatacaggcaattgccaccgggaggagtctgcagtgattgtctgggggacaatttggagttgaatttgttaaactactgaatcctgttgtgagattttgagttgtgagtctttctgtggcatcatcatccccaaacaccgtctctttaaaatgtctttgtgaagtggaaattttccttccctgcattctctcatccactcggtaatgcttctggcattccctctgcagtcgtcttccttgcctttgccctacttagaaggtctacatttcaaagcctcctaatggttctcgcattgctgccagattctggaaatggaccatcacagcaaaactagcaatctcttgggaagatatgccaaaagagatcatcgcattgaaatggttttgggaagtatggaaaattaaatggatttttgagacactagtttattggctatgcaagtgacagttttgaaaaaggctgaatcttattgttggagcctaatgtaaatgcatatataaattctgactgtatttcagtcagtgttttcttggaaaaattcccagattggaagcagaaagtacagaccaaataaagattattcacccaccattcaaatgtctctgcctttgtgaattaatttgttcattttaagatttcaaataataaacttttccagttgaaactgtttaaaacaatctttgcaaacttggttgcaatgactcaaattggaatgtacactggcgacagattttaaagtgccacaacaaatccagtttcgatttaagacacaaaacacatgaactctccttcagaagcataccaacaggataaaatatacaattctgacatgaaaagctaaatgtatacaactggacacttggctatcttggcaagtttttaattggcctagccacaggcaatggccttgattctattcccactgctgtcatcacacgtttgtctccccatgggtgatctgagtaaagtagggcagtgcaaagtacagatgaatatgagaatattagagttgctatttggaatatttaggcatggttagctttccagaagtccagcttttgctatattattagtttgcgatctcgtaagtcctaggcatctcactgctttgtggcttggtatattagcactaagaagcataatttggtttctcaattgcctataaatcctttcttacgttaacttaaaaaaacacgtaatttatgaatctagaaaggagaggaaagggttacagcctgaaaggagggccatcccacaagctgggagtgtgcctccaactgaagcctaaagaggcaggtactttgaaggagggatgttgaggtaggagatttatgctgaaaagttggctaaacatacataatttataggatataggaggagctatgaatatttatgaaggtagttctgatgcatgtatattgaacaaacagtaacatatgacccatgttcattttgggctggagacttaacatttaattgcattacaattaggccctattatgtctaaattttttttaggacacaaaggcactcaagtgagcagtcctcttaaactggccagaaccacctcatggttggtgatgttctcatcaggagaaagttattgaaatcagtctgttgtccaatcaaagctgtagttatggcttatggaacagagggtcagttagtcagtgtctggtggtgagctacgattgttttactattgcttatctcaaggccagtgtttgtttagctgcta

SEQ ID NO: 914866 - DNA, 4001 bp, Homo sapiens
catttcttggggtgctgagaagcccgcagcactctggaggaggtcctgggaaagacactggtcgatatagaagattcagcagcagagtgatatcccaagatgttctggaatggtgtggaagcatttctctcaggtgatgaattgatgtcactggaaatttcagaacctgtatctgttccatctgaaagcatttcctgcaagctacctgtagaagttggtcctggtgaggttagcaaaagaggatgtgctggctggttgggcaactgtagctgaggatgagacacggaatgtcgagttgtgggtgagtaatatgcaacttcagctgtttggaagtctctggaatggttgttattgcttgtgggccagaggtctatatggcttccaaccatggtcatgtctgactgttgcacaggctgctcaatgcttgtaccgaggactagatcctgaatactaaacccttctgcagtcactgaatgcccagcagtatctttgaaatcctgagattttatggcatcggcagctgaagttaaaccattgggaggagctgttggagctaaatgagtttcccaacttgtggtgctaattgtgtgtccatttaaatcataatttgtttgctgctgcaagccagatattattgattctgtggaaagagatccagtttctgctgaaagagaactccagaaaacatctgtggttgctggctttttcatgtctcctattgttaaggaatcatatacatccatggaggagggcgatgctctcacctgtttggaagctgaagctggcaacccagaatggtccacagcagctgcataagcctctggcttggtgctggaaaagccaagagatgggaaaacagtctgggtggcttgtatggagagtatggaaggtagaggtggtcctgaaggaaggggattcgtccttggtgctgtaatgatgggagatgagacactaccggtgctgaaatcagagacaaatccatttacagtgtgaagactcaaaacctctttccttggaaaggcctggagaggaatcgtcacatttgcctcttcattcttccctaaaatggctgtcacactgtcctttttccaccggggaaatgtccaagatgtggaaagaagattaggaactttgcttgagaggagcaagtctctagttgcaggaggggacccatcactgccctctgctggaagagtgggcatttctggcacaggagatggggaggcatgattctctgtgggctggaggaaagtaagtatggagggaaagtcggctgtcccagttgatggtgatgcgggaaccgccccagaaaggatggcttgctcttgacccagtgtggtgatatgcagagaaggcaccaaagaagaggtgtgttctgccgaaagggcgggccctctggaattctctggagctgctgacaaatgcagcgggttagcagagtcatttgcagtggcagaggctagctttctgctggtcatttctatggcccctgattctgcagtctggaaaagtggaggctcagcctcatgggtcgctgtttctgtattcttaaaagttggcaaagacaccccattgtgcactcttccaggcaccccagctttgatctgctgggtggatgcaggacctgaagccacttccaacattgaccatgaggggcttccatctggaagctgaagaagacttccaagtgctgggggagggggagacggatgggacagttctgccatggggctcaaaaacccaggtgtggatgaacctgctgaatggggaccctctgttggggacagctcggaatgccattttgttgaggatccagaaacacctagatgagggatgcctatgagatcctgggcattttgggatgcagtgtggtccatttcatcagaaaatgggattaagggattagctatgttctgacctaaagaggggtcggctggagctgtttggggaactaacagcactttgggggattgctctgctggctcagagatgatggaatgaggtgagtcaggagccaatgaagaggatggaggtagagggaggagtgggggaatgtctgaccttgggggatgctttgaaatggaggaagtccctgcccatactggctgggatggggggacagcactgaaggatgtccctgatgggactgtggacaacgaggggagcatgctggtgagaggcaaacctgacacatcggctgcttcttgtccccctttaggccccggttggaccagggactcggtagaatccttggaaggttcgagggaggcgctatgtccgcttccttggtaaagggaagaagagaagtccgcgtgagccctagttctgtggtgtgtcttggacgcaggggttcgggctgactgtggcaagcttgtgttgtcagaggactgtcccagcacggtcttgattctgtctgctgctgaggaagacctgacttctgtgaaaggccatgttggtgaaattggtaacaatttcccgggaggaaatgactctggagtccgggtgacattcatctgtagattgtctgttcctgtgaaacaaaatatcaggccgtcaggtgttggatgctcatgaagtgcctgctgtggtcaggtgctggagacaaaggtgtgtgcaagacaggctctgcccggacccatcacagaaggctcaggaaacagagtcaaacaacaaattacataatatcaagtaggaaaatgttgcagtgaacctacagggcagggttggtgggaagcagtttctgatgaagtgatgcttaaggcaagatgttgaaaatacttgtgtattaaaaaattgttttggtaccacctacaaggcgtggactgtgaaacttgcaaagctgaatgtggtcaactgccatggccaatgacaccaaaacaacctcatccaggaaaccaaaatgcacgaaactaaagaagaactgtgtattcaagcacgaatcttttttaggaccctgaggcatctcatatgaaatatttgaggttgtctgcgtttggaaagatggctccaatgaaacatatttatcttcctggatttaaaaggattccaggtgctatcattcatgccatgtcaaatagcaaaggagattttctttcagattaggctatttcagaaagaaaaaccaggaaggagacacttctcacagggcctggtgtcactataagcacctgcagaggccagaaatatcaacactcatgtgtggccccacaggcagacagacaaggaggcagggcataagctggtgacctccgctaaaaaggaggcgaggaaacaactcttggaaagctagaagttcactctgaattaggcaatattctgaaaaattcctttctcattcttccttttctttaaaattccccattcttggggtttacggatacccaagaaattggccttacatcatttttagaactcatcagggtataagccaatactacatcaggtttgttgacttgattttataagagaaaccaactccatctcctaggcaggccgtaatcatatgcccagctcagcctgactgtctcctgatcaccagatcaggatcattggggtgctttctgaagagccaaagctccctctggcctccactggcccacctcaaatagaaataagtgataaaatgcatatatagctccaagacactaaagtctgcatagtatttcattaaaatgcatgccctccttaggaactgcttcatggtttgcaatggaaattgtgtttctatgttaccacatgcagcctaaggaggtattcccccctcagacacttgcaattttacacagaaggtggatgctgctttcatgcctcaatcctccctgttcatgttgcttatctcctagatagcctcaatttcacactttgcatgcagtcttatctggttacttatatgggtaaatataacatctgtataaggtacttttgcatttttgtatttttcagttaaactttagaatccacttttatgtggatgtcaggtgaaatctgtgtaggatttcttc

SEQ ID NO: 914867 - DNA, 4001 bp, Homo sapiens
tccttaacgggtacaaatctaaagtccatgttattaacagctaggttctactggaatcagaagagaatgcttccaaacaatgatacagaagtagagtgacagttatgatatattaaatacaaactcaaacctgaattagattcagattcaacaaacactgtataggactgaaaacgatactcaacactatcatctacagtccatcttaaagctctttttggaatatcagtcttgggggcactactcccaccaacttacaaccatcagggaagaataaaaggttcaactggagggaaggccggcactgacagctgagctattttttttcctcttagttttcacagttgtcagcaaaaaaaaaaaaaaaaaaaaaatcatttttatcgtgtctcttaattgatttggggtatttctatgatgggacaagatgcactttcaatataaaaatattatgtatttgtaaatacttttcaatagtagaagaggaagggctgggtgccctgcctcacacctgtaattcctgcactttaggaggccgaggcgggcagatggcttgaggtcaggagttcgagaccagcctggccaacacagtgaatccccgtctctaccaaagatacaaaaattagccgagtgtggtggcaaacgcctgtaatcccagctactcgggaggctgaggcacgagaattgcttgaacctgggaggtggaggttgcagtgagcagcgatcacgtcactgcactccagcttggaccacagagcgagactctgtctcaaataaatgaataaataatagaaaaggagattaattactactattaaaggcagataatcttttaagtttttttctttgtgattgtgctttgtagataatctttgtttattgaaatagttcttacaaactatgaacttaataagaagcactatctagtcattggatatcacattctctagcatcaaagtttataaaaaccttacaaaaacgaaacaggaggctagacgtggtggaatgacactaaaaattaaaatctgtagagtgcctaaatttctacctaattatccataatctaaactatatattataccacaaaatcagttcattctggtcaaatactctcttctcatataataaacagcagtcagtcttggcttctctgtaactgagtgactaatgagctcctaaaaaaaaaaaaaagtcctgcggaaaccaagaacagactataggactgattctaaatgtttacagtttaatttcatctgcagagcatttgccaaacagtatctcttccgtacctcatctgatcctcggcaatcccgttaggcagtcagagcggcttttatctcgatgctacctacaactggggctcaggaggggttcccgattgaccagtgcaagactaacagttaaagctcttcagacaaaaattttatgcagtgatgaacaaaagctcctcgtttgataggtaagcccctgggtacgcttatatgtgagtctgaaacaaaacactcccaatttggagtccggaaaaaagctgacactacaaggtgctgggcagttaaagttctctgccagtctgggaaaggggccaagatgccctttaaaacttaagacttcctctcaggacttaaggagatccctgcccttccagctgagcagtcgaggattacggtcaagcagagctgtgctcttagcaggttctcgaatccctttttcctttcactttctccccaggtaccctgatcccccacccctcaacgcttctgtgtttgtcaagaagcccacctggtcttctagacctgaagcggcaggaccctccgttcccaataatacaagtcaccaaaaggagcgtcccagagtccagttttaccttcatgtgcctctcactcacttcaggcccaggccaggttaccgcaaccacttcactttaatgtccgcctcccagcgcttcagactcaaccacaatattcaaacccaagccactttcctcagcgcttcgtttcattggctgccgctcgcgtgatgtcatcacgtcggacgctgtcacggctcgcggcagcttggcgccaagaagctcagcctggctgcgcaggggaagctctttgcttgctcgtcaccgtggcaacgcgcgcggccgtttccggaggcggtggccaaagtgggcggggctaggccggagctgctggtgggaggcagccacttgagatcaccaggcctcctgtagaccggcgggtgcagggcccggtcccagagttaagggtgtgagtgagactgctgcgggcaggggttggcctatgccctctgctagggggagaggtggagtttgggtgtggattaatgggttctgggtgtttattttcttttctctgagtagtgaggcctccaagaagttgtagggacctgtttcttccagacacattaatatgggccaaaatgtggggtctcttcacctgaattaattggagatcttttgggttgaggcctcaggcttcatttctcaggacttccaggcctactcccattagtactgaccgtgaaactattttctgtttggttactttttacattctctgtctaatgatggcataacaaaataaatttaaagattttggcttggtttattattaggtgaagtgattttttttaagtcccaggttatagatattatttcagcatagacactttaaaaagagagaaaatacctggaacaaatcggaaatacgtttgctaaaataactttatttggcagggtgtttttaataacagtatctgaatttcattgttctatatattactgttattgtatccatttagcaattatttagattttagacacaatagtatgcaatggaatcaaactcttccctcttggagcttatattttgtggattcaatatcactttataaataggatgactcatacccatgcagagtattataaatgcaacaatatatggaaacctctgtattatggacatttatttcctgttgaggaaaatcgggagtattgtgtactgtatgtgatgcatgttatattattgtttctgatcactagacagaggatcaataaagctactacttatttttggctgtattacgtgtatcttagctaatgaaatggttatttgtgtgctgctggtcttggtaataaaatcgagatgtctttatttccagtaagaactcattgtatagtactttacgttttgacttcccaggtattttattagtccctttacatatggtctctcagttaattctcaaaacagcccatgagacgtaggtaatattattttcatttttctgagagaaaactgaagttttcagaaaattcctaacacaaaattttgtcttgaactatacaggcaaggcaattcagaattgagtcatttgtctctgaaatactttctggattaagtgacattaagagaatatcttaatccagtctgaaaatatgcatattttgccagttgcttgtaaaattgcatggatcattggtgaagaatagaagtgttttaaagtttgtcttttttgacacccacattgtataaggtttatcagtgccacagatgttttcacacctaatccaagtactttagatttcaaattcagtgttacacttgccatttaacagtgttcagatgatgaggtccatattttaaaggaattgtacatttggttaaagcagagagattttgacattacaatcaatcccactactgtgccaccttgctccttgtagtttctaaacatagagctaatgagacagaaattcccacttttagttaaaaattggagtataactgctgtgttatcagaatacaagtttaatatactttcattgtaaaccaaagagcagagataaggataaatgaaaagttagatttaaagttgtttcagaccaaaaaataaaaatggaaaaagtaaaagtgaatttaaacatggcaatagtgaggtcttatttatttcccccaggaaagtcgtttggaaaccccaggccaacaggaccc

SEQ ID NO: 914868 - DNA, 4001 bp, Homo sapiens
atcaaaacttcctgagtgaactggtaagaagcaaagacgaatgggagtgtgtgtgtgtgtgtgtgtgtgtgtgtgtgtgtgtgtgtgctcataagcaagcacatacacatccaagaaagagggtaatcttaccaaatggtaatataactgaacctgtctctataccagtgttctgagagagttcttattcattcagcctgaaactctggggaaggcaatttatcttcctgctgctgtagggagccttggtgagaagcacacaaccatatgaatacatgagtgtgtgtgtgtgtgtgtgtgtacatacattatcattatacacaggcattagtatgcacatacaaatatgaagaaggagccccttcggtttcatcaggaggaccagaagcaaagtttgaactgcacagataaggagaaagtctgcagtgaccacaagcacgggtggaagagcagaagaaggaagccaggtttttgcttatatttggcttctccccgacaggggagaaacagaagacatgctgtttgcttgcaaagccagccacccatggcagtgctttgctttctcgaaaacttttacccttcatttaatcaacagatggacgtgctctgttgtggattttttctgagtcttgcacctctaagagctgtgttggctggcacaaatgcagcctcagatggcagaggtgcattggcattccaaaagagcgggaaggagcccatgtacttgcccctccaaactcaattccacaggtgacttttgatgcctttggccaactaggcactcacattccctctcccgaatttccctctcctttctgcaccactaccagccccagggctcccagtggcaaggagcctagaggtggcaaagttctttccggagagtccacctgcttctctgcccctgctaggctgcagaaaggaaaccatcagcaccacgggcgaaatttcattttataccctgaattcagtgctgtgtaggattcagaattcaacctaatttagggaactcgatgacgttcaatgaaactctttacaagcttttcccaaccactgcaaattaccccccacaatacattctgtaattgcaacccccttttcaacggtgcaaaccacacacattcgcttttgaatacacttgtgcaagtcaaaccctattcaagctgaaatatccacctaaaccaagctctccctccctgccgtctccttccctggcctgggtctgaaggagaggaggtgcccagaagttcagagcggcataaccacagagatactacctaattaacataccagaagcataaagaactcatttgcattggagagtttgagctggatattgacaagtgagaggagaaagtcattcccctcccctcccataccccttctttccaaaggaaaataaacagtaccattttgttgcattcgcaaaggcgaagaggcaatgccagagcatctcagcccggcaccgagagacgcatccatcagtccgagttcccgaagcctgcccacgttcctgcccacagcctcccgcgccctgacaacccagccgactttcttccaactccagcagcgcaggggtcctaccttgactgaagaggaagaagcagacgaagagcagatcgagctggaagggtttcattccttagcgcagcgaaggaaagccggcggggtaacttggctgtggttagtttctcttccttggcggctctcggtgctcagcctccgccggtcctctcgggttcgcgcctaccatctgtccgtccgtgggtccctccgggtggcttcggtctctttgtgcctctgggtatctgcagccagccgacacaaactgcctgttcttagccgcctcgggaagccgggattgtcagcaatgtccccactcggagaagatccattctctggctcttggcatcccaggcacacggcttcctcaggcgggctcctcccacagtgagcgagcgagctagtgacgagtgacagaaggactcctttcactgaagctgaggcgaggggagagggaggggagacaggtcataattaaagaggaaacactcggaaaaaggagatctatgcaaaacggacagtgggggaaaaggctgtgttctttcttttccctaaatagggaaaaattcagcttttgtcaccattattgaccaaaaggcatcttgagcttggagtggagctgtgactttttgtccacacgatgtcctgtttaacagtgaagttaaggatgactatccacatgcatgtgcacaaaaacatgcacgccctgcctttgcaaaggaactggaaactgggctgaaagggaactaggaagggggggtgcgcatctttccctcggaaggacttggccaatgtgtgcagcgggaggctcggagttggagaagagataagcatgctttgcatttctgagagtttcctgtgggtgggtgggtggttgtggtggggggggggggtaggtaataaaacctgaacatttggatcttagtttgctttgcactgctcctggaagacaaaatgcaggaactaaagggaaggcaagtaggcttgtgacacacacccatttattatcattatcctggtttgtgcatttcctaacgaggacaggggagcagcctgtctttgcattcagagcctctcctctaatgagcgctccatcactctgagcctgtcttttctccaagaggtgctgtgagtccaattgcaaaggagaggccaaggtcatagacaactgcgtcctaaggatcttcaagccttttacctgtcatgaaattcacactccacactcaaatcaaactcggtttcctccaggatatcaacatgaatttatctgggtctatttacttaatagacatttaggcatgcttggtataagcaggccatggagggaagcaaaataataggcacagaccatgccttcagaagctcataatctagtgtgcaagcagagtacacacacaagatgcaaactctaaggacataacaaaacaacacagaaaaatattcaacgttatgcactgtgagaaggagaggtaaagagagaggagaggaaaatgaaagacgctcccctgacatgtgccatttagcattcaattctaaaatcagtcattactgtcttcagtccctggaccttggggaggtcttttgggaaactcttagcctttcctctttcagtagtagcacatcttttgaggactctgctcactacaaggcacattccaactccaagtttccatgcggatgttaactttaaaaaattatcccttggtatttgtgaacaagaaagaaagaagcaggggcatatagaagtgtgctagtaggagctgacatctggtagttgacaccaaagatctacaaattagtaggtgtctgctttgttgacttttctattcttaacttaatagtttatttaactgcatcccttagaggctgttaaacacagcaaagggaaatttgtaagcaaactttgggaggagaaacagaaatgttgagcaacagaaactaaaaggacacaaaagaggcagcccattagctaaattaacaaacaagttactgaagcagtgtcagctgagcctgagtccattagcctggtgtaacagatcatgcaataaatggaagaggcaaatcaaaaacacacagaggagatgaaaaataattttaaataacatatgccaaataacacagtaagactgaaaataactctatgtatagcgccgtcaccttagtagtagctttgcattaagcctatggggttgttggggagaaatttcaggtgtctgcgtgccattcttgcagggaataggacaaatactagaatgcagattctctatcaaaggtagcaacatttgacgttttaactaaagatttatcctttaagctgttgtttaattttgagtgctaattcctcaatggcccagggcccagatttgcttaattcagcccccgagggaactattacaaaaccagggtcacaaggctagtgaagtgtgcaatacgcaata

SEQ ID NO: 914869 - DNA, 4001 bp, Homo sapiens
cctcgacccactgaggtttattctccacatctcagccagagagagtttttagaaactcaagtcagactgtgttgcctgcctgcttaaagccctccagaggctttctgatttcctgagaataaaacccaaaccaaccaggccatgatctggttcttggcttctccccaggcctcttctgtccctgtctcccttccatgaagctccagtcacacagttcttccctgagttcctccaccacaagctctttcctaccccaggacctttgcacatgcaacttctcccctgcctccctttcctggaggctggttcatttcttccctcaggtttcagtttgtcatttcctcacagaagtcctgcctgaccagtagacaagactcgctgctgcgagctatcataaaatcttgttcttttctctgcagaactcatcacaatttgtaacaaccaattatttctgtatgtgtgtttttgtctctaatagggcaggaatcttgtctattttgttgggccctgtatccacctaacaccctggctggccctcaataactcatctgttaacgagtgaatagaagaattaattggtgggaggctatgtttccttaaggattttctttctgttctcatatgccatccagtctcccttaggtagaggggagccggaaatggggctctgcgtgggggcaagggtgatcatggtctcttagggcagggctggggtcgccaaagtgcatttatttcttcaaaaggtatttactggggtcctaacatggggctccaggaaacagacggttccctgctcagattcttctcctacattaccggattcctcttgaaggctcgatccctccagtgacctcccacctcagtgccccagactgacctacctgggcctcccccagcccaagctcaatggcttccagggagcgacgcaggaggatgcagcgctcctgcgagccaggctcggcttcgccggcctcaggtgcaaccagaggagccagcagggcacgatgctccccacgcagagtctccagtccctggatgacagccttggtgcccagcacgatctcatcctggctcagcttctcctcccgcggaaacaccatcatggccatggctgtggcgtctgtgaggacgagggtgcgggcaggcgggcgccgggcctggggccacaccgccgtccgccccggattaggtaaacaggcggtccccggacgcctgagtctcccgtgtgcccaggtcccccagccggcagcccgcaccgtgcccgcgcttggcctacagagggcgcgcctagcttgtctaggcctgggagacgcaatgcggtgcagccggatcctgcttcggccccagaccaccggctcaggccgacttaggcggctcagtgtccgggtttccccggggaccccctaaccaggacaggtatggggaacgtgggggctcactcctgtgcaggagaccctggcccctccggcgatccgggcccagcccctcggacagccccatccccaaaaggcaggccaagccgcggagcccatcctcccgacgagccgaccctgcggaggcgctcccactagaggggctgagtacgcggcccccagtccttccaggctacgcccacgacgacccctcccctaggccagcgcaacgccctgaggccttccctgaaaaggccgcgcccccgccccgggccacccgggaccgcgccccctaccagggctggcccgatcctcccacaggccgcgcccatgacgaccccctcccctaggccgacccggagtctcctcccccgctttagggcctgaccccgtctcccggcccaatcggcccgcgccgacctgcgcctggtgctcgggcccggctccgactctggctgcctcccgcttcacccggacccgcacccgcgagccggtcccgccgcctccatcccgccggccttcccagcagcccccgcgccgccttaaaggtgaagccgctacctcggtggcgtcggagggggcgaaacacgcttctcttggcccgttcgctgccttaaaggagcgcgggccgggccggctccagcgggagggggacggggcggggccatcgaggcgggggcggtgcgaggacccgcccggggcgcagttcccagggcccgccagccccgaggggtgccctcggccgcaaaatgccgcggggcctcagcgtgtggagctgctcgggaggtcgaacccgaaggtacctagtgtggcgccatggcgccatcgaggacgtcgggagaaactgaggcgcagggagaaggttgggcttcctggagtacagagcgaggcgccactaactgagcgcctactgcgtgttgcgcgctttggtgccctgggttcattgacttaatgctcacgaagacccgagaagtgagtgccgctgttatctggctcgcagatctgaccccaggctccgcatcccggggtcacatccggtgggggatgcaccgtctctgacagaggtggttcagcgcccttagctcaagcacatccggtgacaggtagcttactacgtttggctctgagacaactcggaaggttagcaaaaatttcctctgatagaccccgaagtgccttcctgcagtgctcatccacagccctagctctgtcttcagaaagaaggctgctcccttgtgtcagttaaggtatttggagacagcgatggtgccccgcgtggtctcatctcttccctgggctgcccctggtcccttcactcagtcctaccgcagtttcctgacccttccccatcccaatttctcctttctgggtgtagtctagcttgtccgtctgggtcctgctcagaaggtggtgatcagcccagggcccagtgaccagagacaaggaatgaactgcaaagatcagagggacgtccccccataataaggatgccacctgtccacaaaaaaaaagctgtaaatcaggctgcctttgacacaagtgaagaccctctattttacacatctcagttacatccaaccaggttcttctcaaacctgtgctctgccaatggttttttttaagtgacaggttcttactttatcatccaagctggtgtgcactggtgtgatcatagctcactgtgaccttaaactcctttttttctttttgagatggagtctgtctcccaggctggagtgcagtggcacgatcttggctcactgcaacctctgcctccagggttcaagcaattctcctgcctcaacctctccagtagctgagattatagcacccaccaccacacctagctaattttttgtatttttagtagatacgggtttcaccatgttggccaggatggtctcaaattcctgacctcaggtgatccactcaccttggcctcggcccagcctgtaacctcaaactcttgggctcacaaaatcttcccatcatagcctcccaagaagctaggactacaagtgcatgccactacacctggcttttttttttttccaatttattttcttagagacagggtctcaatatgttgcccaggctggtctcaagtagtcctccatctcggcctcccaaagtgctgggattacaggcatgagacaccgtgactggaatgatttttttccggatagcagatactttcatttgtgcaacattcaaaagacatacaaagactgggctcagtggctcacacctgtaatcccaacactttgggaggctgaggcaggtggatcatctgaggtcaggagtttgagaccagcttgaccaatatagtgaaaccctgtctctactaaaaatacaaaaattagctgtgcgtggtggcgcacgcctgtagtcccagctactggagaggctgaggcaagagaatcgcttgaacccgggaggcggaggttgcagtgagctgagatggcaccactgcactccagcctgggtgacagagacagactctgtctcaaaaaaaaaaaactaaaaaaaaaaaaggcaaacaagcaagttacaatgaaatgtagttatctctgtgactgctgtcctcag

SEQ ID NO: 914870 - DNA, 4001 bp, Homo sapiens
ttctctgcagaactcatcacaatttgtaacaaccaattatttctgtatgtgtgtttttgtctctaatagggcaggaatcttgtctattttgttgggccctgtatccacctaacaccctggctggccctcaataactcatctgttaacgagtgaatagaagaattaattggtgggaggctatgtttccttaaggattttctttctgttctcatatgccatccagtctcccttaggtagaggggagccggaaatggggctctgcgtgggggcaagggtgatcatggtctcttagggcagggctggggtcgccaaagtgcatttatttcttcaaaaggtatttactggggtcctaacatggggctccaggaaacagacggttccctgctcagattcttctcctacattaccggattcctcttgaaggctcgatccctccagtgacctcccacctcagtgccccagactgacctacctgggcctcccccagcccaagctcaatggcttccagggagcgacgcaggaggatgcagcgctcctgcgagccaggctcggcttcgccggcctcaggtgcaaccagaggagccagcagggcacgatgctccccacgcagagtctccagtccctggatgacagccttggtgcccagcacgatctcatcctggctcagcttctcctcccgcggaaacaccatcatggccatggctgtggcgtctgtgaggacgagggtgcgggcaggcgggcgccgggcctggggccacaccgccgtccgccccggattaggtaaacaggcggtccccggacgcctgagtctcccgtgtgcccaggtcccccagccggcagcccgcaccgtgcccgcgcttggcctacagagggcgcgcctagcttgtctaggcctgggagacgcaatgcggtgcagccggatcctgcttcggccccagaccaccggctcaggccgacttaggcggctcagtgtccgggtttccccggggaccccctaaccaggacaggtatggggaacgtgggggctcactcctgtgcaggagaccctggcccctccggcgatccgggcccagcccctcggacagccccatccccaaaaggcaggccaagccgcggagcccatcctcccgacgagccgaccctgcggaggcgctcccactagaggggctgagtacgcggcccccagtccttccaggctacgcccacgacgacccctcccctaggccagcgcaacgccctgaggccttccctgaaaaggccgcgcccccgccccgggccacccgggaccgcgccccctaccagggctggcccgatcctcccacaggccgcgcccatgacgaccccctcccctaggccgacccggagtctcctcccccgctttagggcctgaccccgtctcccggcccaatcggcccgcgccgacctgcgcctggtgctcgggcccggctccgactctggctgcctcccgcttcacccggacccgcacccgcgagccggtcccgccgcctccatcccgccggccttcccagcagcccccgcgccgccttaaaggtgaagccgctacctcggtggcgtcggagggggcgaaacacgcttctcttggcccgttcgctgccttaaaggagcgcgggccgggccggctccagcgggagggggacggggcggggccatcgaggcgggggcggtgcgaggacccgcccggggcgcagttcccagggcccgccagccccgaggggtgccctcggccgcaaaatgccgcggggcctcagcgtgtggagctgctcgggaggtcgaacccgaaggtacctagtgtggcgccatggcgccatcgaggacgtcgggagaaactgaggcgcagggagaaggttgggcttcctggagtacagagcgaggcgccactaactgagcgcctactgcgtgttgcgcgctttggtgccctgggttcattgacttaatgctcacgaagacccgagaagtgagtgccgctgttatctggctcgcagatctgaccccaggctccgcatcccggggtcacatccggtgggggatgcaccgtctctgacagaggtggttcagcgcccttagctcaagcacatccggtgacaggtagcttactacgtttggctctgagacaactcggaaggttagcaaaaatttcctctgatagaccccgaagtgccttcctgcagtgctcatccacagccctagctctgtcttcagaaagaaggctgctcccttgtgtcagttaaggtatttggagacagcgatggtgccccgcgtggtctcatctcttccctgggctgcccctggtcccttcactcagtcctaccgcagtttcctgacccttccccatcccaatttctcctttctgggtgtagtctagcttgtccgtctgggtcctgctcagaaggtggtgatcagcccagggcccagtgaccagagacaaggaatgaactgcaaagatcagagggacgtccccccataataaggatgccacctgtccacaaaaaaaaagctgtaaatcaggctgcctttgacacaagtgaagaccctctattttacacatctcagttacatccaaccaggttcttctcaaacctgtgctctgccaatggttttttttaagtgacaggttcttactttatcatccaagctggtgtgcactggtgtgatcatagctcactgtgaccttaaactcctttttttctttttgagatggagtctgtctcccaggctggagtgcagtggcacgatcttggctcactgcaacctctgcctccagggttcaagcaattctcctgcctcaacctctccagtagctgagattatagcacccaccaccacacctagctaattttttgtatttttagtagatacgggtttcaccatgttggccaggatggtctcaaattcctgacctcaggtgatccactcaccttggcctcggcccagcctgtaacctcaaactcttgggctcacaaaatcttcccatcatagcctcccaagaagctaggactacaagtgcatgccactacacctggcttttttttttttccaatttattttcttagagacagggtctcaatatgttgcccaggctggtctcaagtagtcctccatctcggcctcccaaagtgctgggattacaggcatgagacaccgtgactggaatgatttttttccggatagcagatactttcatttgtgcaacattcaaaagacatacaaagactgggctcagtggctcacacctgtaatcccaacactttgggaggctgaggcaggtggatcatctgaggtcaggagtttgagaccagcttgaccaatatagtgaaaccctgtctctactaaaaatacaaaaattagctgtgcgtggtggcgcacgcctgtagtcccagctactggagaggctgaggcaagagaatcgcttgaacccgggaggcggaggttgcagtgagctgagatggcaccactgcactccagcctgggtgacagagacagactctgtctcaaaaaaaaaaaactaaaaaaaaaaaaggcaaacaagcaagttacaatgaaatgtagttatctctgtgactgctgtcctcagccatccagcccccctctccggaagcaacttctgttgtttcttatgtccattgattatgttatttgcatcagtgctgagcttgtgtttatccttgtccatttcagctggtcaattttcctccagggcccctgaggttggggtctgttgcgtttgggatctgtgatccttcagccctcacattggccttattttccagatatattgccactggttgggctgggctcagtggctcacacctgtaatcccagcactttgtcaggccaaggcgggcagattgcttgagctcagaagttcaagactagcctgggcaacatggtgaaaccccatctctacaaaaatacaaaaactagctaggcatggtggtgtgtacctgtagtcctagcaactcaggaggctgaggtgggaggat

SEQ ID NO: 914871 - DNA, 4001 bp, Homo sapiens
ttaaagccctccagaggctttctgatttcctgagaataaaacccaaaccaaccaggccatgatctggttcttggcttctccccaggcctcttctgtccctgtctcccttccatgaagctccagtcacacagttcttccctgagttcctccaccacaagctctttcctaccccaggacctttgcacatgcaacttctcccctgcctccctttcctggaggctggttcatttcttccctcaggtttcagtttgtcatttcctcacagaagtcctgcctgaccagtagacaagactcgctgctgcgagctatcataaaatcttgttcttttctctgcagaactcatcacaatttgtaacaaccaattatttctgtatgtgtgtttttgtctctaatagggcaggaatcttgtctattttgttgggccctgtatccacctaacaccctggctggccctcaataactcatctgttaacgagtgaatagaagaattaattggtgggaggctatgtttccttaaggattttctttctgttctcatatgccatccagtctcccttaggtagaggggagccggaaatggggctctgcgtgggggcaagggtgatcatggtctcttagggcagggctggggtcgccaaagtgcatttatttcttcaaaaggtatttactggggtcctaacatggggctccaggaaacagacggttccctgctcagattcttctcctacattaccggattcctcttgaaggctcgatccctccagtgacctcccacctcagtgccccagactgacctacctgggcctcccccagcccaagctcaatggcttccagggagcgacgcaggaggatgcagcgctcctgcgagccaggctcggcttcgccggcctcaggtgcaaccagaggagccagcagggcacgatgctccccacgcagagtctccagtccctggatgacagccttggtgcccagcacgatctcatcctggctcagcttctcctcccgcggaaacaccatcatggccatggctgtggcgtctgtgaggacgagggtgcgggcaggcgggcgccgggcctggggccacaccgccgtccgccccggattaggtaaacaggcggtccccggacgcctgagtctcccgtgtgcccaggtcccccagccggcagcccgcaccgtgcccgcgcttggcctacagagggcgcgcctagcttgtctaggcctgggagacgcaatgcggtgcagccggatcctgcttcggccccagaccaccggctcaggccgacttaggcggctcagtgtccgggtttccccggggaccccctaaccaggacaggtatggggaacgtgggggctcactcctgtgcaggagaccctggcccctccggcgatccgggcccagcccctcggacagccccatccccaaaaggcaggccaagccgcggagcccatcctcccgacgagccgaccctgcggaggcgctcccactagaggggctgagtacgcggcccccagtccttccaggctacgcccacgacgacccctcccctaggccagcgcaacgccctgaggccttccctgaaaaggccgcgcccccgccccgggccacccgggaccgcgccccctaccagggctggcccgatcctcccacaggccgcgcccatgacgaccccctcccctaggccgacccggagtctcctcccccgctttagggcctgaccccgtctcccggcccaatcggcccgcgccgacctgcgcctggtgctcgggcccggctccgactctggctgcctcccgcttcacccggacccgcacccgcgagccggtcccgccgcctccatcccgccggccttcccagcagcccccgcgccgccttaaaggtgaagccgctacctcggtggcgtcggagggggcgaaacacgcttctcttggcccgttcgctgccttaaaggagcgcgggccgggccggctccagcgggagggggacggggcggggccatcgaggcgggggcggtgcgaggacccgcccggggcgcagttcccagggcccgccagccccgaggggtgccctcggccgcaaaatgccgcggggcctcagcgtgtggagctgctcgggaggtcgaacccgaaggtacctagtgtggcgccatggcgccatcgaggacgtcgggagaaactgaggcgcagggagaaggttgggcttcctggagtacagagcgaggcgccactaactgagcgcctactgcgtgttgcgcgctttggtgccctgggttcattgacttaatgctcacgaagacccgagaagtgagtgccgctgttatctggctcgcagatctgaccccaggctccgcatcccggggtcacatccggtgggggatgcaccgtctctgacagaggtggttcagcgcccttagctcaagcacatccggtgacaggtagcttactacgtttggctctgagacaactcggaaggttagcaaaaatttcctctgatagaccccgaagtgccttcctgcagtgctcatccacagccctagctctgtcttcagaaagaaggctgctcccttgtgtcagttaaggtatttggagacagcgatggtgccccgcgtggtctcatctcttccctgggctgcccctggtcccttcactcagtcctaccgcagtttcctgacccttccccatcccaatttctcctttctgggtgtagtctagcttgtccgtctgggtcctgctcagaaggtggtgatcagcccagggcccagtgaccagagacaaggaatgaactgcaaagatcagagggacgtccccccataataaggatgccacctgtccacaaaaaaaaagctgtaaatcaggctgcctttgacacaagtgaagaccctctattttacacatctcagttacatccaaccaggttcttctcaaacctgtgctctgccaatggttttttttaagtgacaggttcttactttatcatccaagctggtgtgcactggtgtgatcatagctcactgtgaccttaaactcctttttttctttttgagatggagtctgtctcccaggctggagtgcagtggcacgatcttggctcactgcaacctctgcctccagggttcaagcaattctcctgcctcaacctctccagtagctgagattatagcacccaccaccacacctagctaattttttgtatttttagtagatacgggtttcaccatgttggccaggatggtctcaaattcctgacctcaggtgatccactcaccttggcctcggcccagcctgtaacctcaaactcttgggctcacaaaatcttcccatcatagcctcccaagaagctaggactacaagtgcatgccactacacctggcttttttttttttccaatttattttcttagagacagggtctcaatatgttgcccaggctggtctcaagtagtcctccatctcggcctcccaaagtgctgggattacaggcatgagacaccgtgactggaatgatttttttccggatagcagatactttcatttgtgcaacattcaaaagacatacaaagactgggctcagtggctcacacctgtaatcccaacactttgggaggctgaggcaggtggatcatctgaggtcaggagtttgagaccagcttgaccaatatagtgaaaccctgtctctactaaaaatacaaaaattagctgtgcgtggtggcgcacgcctgtagtcccagctactggagaggctgaggcaagagaatcgcttgaacccgggaggcggaggttgcagtgagctgagatggcaccactgcactccagcctgggtgacagagacagactctgtctcaaaaaaaaaaaactaaaaaaaaaaaaggcaaacaagcaagttacaatgaaatgtagttatctctgtgactgctgtcctcagccatccagcccccctctccggaagcaacttctgttgtttcttatgtccattgattatgttatttgcatcagtgctgagcttgt

SEQ ID NO: 914872 - DNA, 4001 bp, Homo sapiens
gcgtgcggataagcccagtgcctgttgggccgcacccaagttcggccctctcttaccctctcgaccacactgcacggtcccgctgccctttcatgcgtttctgccatcacccccgcccacccgatcccccggcctcaatcccgctagaccctgccacttccaactttgcctgtgggtactgggaagagaatcgctaatgcttaccgcattctgctgacctctaaactacagaaaaaaaaatctttacagagcccttgccctcacctagaaaaatcacctcgtttaatctgtatggcagttctattagtagggattattacccctttctcaggggaggaaactgaggctcacataccatggcgtgcccaaagccattaagcgtcagagctggaattcaagcccaggtttgtctgtcgctaactcatcttcaacacccttttctcacctccaaccgctgattctgctgcctccctcctcctatgacatcccctcatccctaattccattaagccggataactcaccctttcagtaaatcattcttccctctcactgaccccaccatctgacgccaccagaatttccatacccttttagccattggttttctaattcctttggcacatatttgaggatctctgtcccaggccctgtgcttagtgttagagagagtgtcgtctctgggggcatgattaagggctactctgcccagagcctcccagtctggctttccaaaggtggggcaggctgctttcactacttccccatgcccctgcctatttctatccctcattagactgcgagctcccagagggcaaagagtgttttcaaatcacttccgcatcccggcaccctgcacagaacttgcgtagagtagtaagtactcggaattacggttgcatgggccaaagagagtgtgcgcagctgtggggtctctgcatctccctcactggcttgttaactcttcaagggcagaattatgggcaccgagcctctaaaatgttgaacgaatgactgaatatcatcaagaggcagtactaaaagatgatgaaagaatgaatgagcggtggaagcaggcgggaagaacggagggcgggaagctaggggatggcggccctacctccgcggccgggtccgcagcgcaccggcctcgcggcccaggatgaagcaggcgcgagcctcgagcagcagcgggcggcactcgccgcaggcctgcagcagctcgtccgcctccaccttctccaggaagtaagcgggcgccagtagcggcaggcgcacgtgctccagcaggcgtcgcagctggccgcggcgggccggcgcgtcgtggcgcacccagcgcatggccgcttcaaacacggcctcctcgcgcgccacgcccagcgcggggtccgccagcagcgccaccacctcgtcaggcgccagctccaggaagtcggcgtggcgcgccacctcggcgaaggcctgacgcaggacgcggccgcagcgctcggccagcggggccagcgagaaggcggcggccacgcggcgcagcgctaggctgttggcggcgcgcaggcggccctcgagaaagcgcacgcaggcctcgcgcaggcccgccacgcccagccgctccgccagcgccagcacggccgccgcctcgtcctccgcgcgcagccgcacgcccgctccgtacacgtagtcgagcaccacggccagcgccgccgccgccccggccgggctcgtgcctggcgcctcgggagctactggcaccactggcaccacggccgggccgcgctcgggccgcccggccgcgaacaagctgcggaagtaggcgctgcccgcgctgagcgccgcgcggtggcacggaaagtcgcgcccgccggcgcgcagcaccacgtcggtgagggtgccgctccgccggtaggcgttcagggcctgcagcacgcgctgcgcgtggcacggacccgcgcacggcgcttcgcagcccggctccgactcctccggcgcatggccttgccgcatcctgccggggagagaacacaaacagcgtcggggaagccacctggctgcgcccgggagaggcgacagccctcatccgtttatttcctctcttgaccatttgttcagcgactctcccctccgttcagcatccaggttccttacggctacagtgccccagccccgcctcaccagcgcgacattctgccctgcctacccactcagacacagtgcccttttcggttcttcaaacttgctaagcgttttcctatcgatatctgcaggtaacagatggcacgctctcaaacagggtaatcggaggagggtctaataaaggaactattttcaacagcggagtaggcgttagggactccagtaggagtagggctgtgtcccaggatactaacagcagggcgccttggccgccccggggtctgtagcgggagagcagggaagttactggaacctggaaatatatctgtgtaaggagggtcccgtgacaggagctgaagccctgggtcaagggactcaggctgccccacagagacccagtgtgtgcatgtgcaggggagagagggtacaataactccaccgccctctgctcaatccagcctgtctcctgccgatctccggtaggtgctggacactgaccacaccctgagcactcccctgacagacagcatcatacacacagctttcgcgcaaacgaattcgacaagtatttattgggagccctttctgtgccaggcagtgagcaagacaaccatagttacggtgtgcccggagctcccagcctggcgggggtgccatggggaggcaccgggtgttaggggagttcatagaagggccgctggacccaggtggaggggagtcagggagggcgtccctgaggggaaccttccagctgagaaggatgggcgaattctgaaaggttagagcccaggctgagggaagctggccctctctctagtgagttctcttggtgttctccaggtagcaccgtcagaaagtggaaagaactctagggacaaatggggattctaacccagtgcctgccacaggcttacggtgtggccggggcaagtcactcctctcacctgcccgccctggcctcagttatctcatctgaaatgggatcatcatccctacctcacagggctgtggcttcatgactattacatgggctgtatgaaaagtgctagtacacagtacgagctacatgggtgtttccctatattgcttttactcaagaggaagggaggacactgtgtgtgccagttgcttttatagacataatttaatttcatcctcacaagctgagaagtttctttagcccacacctgcccctttagtttgtcataagggaaacaagcacacacaggacacccgcccttcagaagtttgcggcgaggctcagcagaggggtgtttgtgaaggcgctctgcagactgaggggctgggccatgctggttatgatttggccattatgaacacaaaacctctgcttgcacacctccagggacagggagctccctcctttccatcagcttactctagggggctcaggtccaccctctgcgccctgcctctccttccatcctcctgctcccagctgctctgctgcctctggaggtcagatcccgcctagtgtcagcctggctttcatgccctggtcatccagggcagcggatcccctggtcagcatcatgagagatgagctccctggtgggcaagaaagttaactacttttgcccaagtagagcgactggatcctgaatccacctggctccagggtttgcatgccacacttgccagggtgggggtgtgtcccaaggagcagccaggaccggtggaaggaagtgagaccggtcatcacagcacgctgcaaccagtctgtcctccactggctcagaaagcacaaccatgctctgagttgagactcaagagggcaggtctcatcagcataaggatggacttcttgcaaaggtgccccacagcacaagcagctccctgggggagaaagag

SEQ ID NO: 914873 - DNA, 4001 bp, Homo sapiens
cctagcagctgctcttcctcctcctagcatcccccatgccatcctcccccctctacaattcgaactccccccttctgcatccaatggaaaacaaatgcgcaacgccactggctgaacctgaactcaacttcccttccttgggcaactttcctttttgctgaagggggccgaataatgtttatagaagcaactccgttcttgccccagtactaatggggaaggggcaacgctctgacccttcatccaccttgggtccccttacaagaatcagagacaaccccaagtcctttctaaggaataactttgcttgataatcctttttctcccatcccaaagcaaccaccgccaccacactaaagtataactgtcccttatctactctcctcaccccaacctggcttcccccaccccttccaagccccaggattggcctaggaaaaggtggatcaataatgaaatgacgagaagagaagggcgggagggagctcgggttggagactgcgtgctctcaggcgcagtgggtggggtaggagagcagctgcttcccctgggaggatgctgcctcagtcccccaacaaacacctcccctcacaggggcccccttccccagagctggagggaaagcctgcctcctctccaaggggagtggtggaaagctgctcttctctaagcctaggggacagtggactattttcccctccaagatgccactaatccttcattctaaaggagggaaagggtggagtgaaggtagagtaattcccggctaccaataggctagaaactgtagccctgtaagacggggcgggggggggaagagactgctgtatgaggaatcaccgttatcttcagagggaaaggaggtgagaccaggcaaggtgcagaggagagattttccccggtggggtagggcgggatgggggaggatcggtctgcttggggtgggggtagagggtggaggtgaaggaagggggagtggctggcagtatagggacctggcccggggatggcgcgagggttcatcgggttttcgaaagcaaggtgctggaagggacacgatccccaagggccaggagaacgtggccctggatgaggccatcacccgagagacgcccgagaggaaaactgccctaggagtaacacatctgcccagagagggaggcggggatgtggcgggatcaggtctctaggagggagggagggaggaatcttgctcggatgaggtaatctgtgaaagggaggaggggttcagtcccgggatgggaaaccccggcgagggggtctgtgccaagggatttggggaagggtcagggggaggagagcggggggcaaacgccctcagccagatgggcccaaaccccggggtgggggcgcctgggggtctgcagccctgcatgggggtcccaagatgggagagccattcgccccgggtcagggaccccgagatggtcccagaattgggatgctcctcaatcccggatgggggaggggagggggctccgcagagggtcgagaccccggacctgggggttcctcgcccccttacctctccgctgccgcctcccccgccgctctccccaaacacggcccggaaccggcgcaggttggtgccgatggcggccgagacctgcagcgccgcgtcgaagcccgggcccacccggagcagggccggccctgaagaggctgaggacgatgacgaagacgaagacgaggcggacgacgaggaggctgctgaggcggcggccgctccccctggaaccccagccccgctgcttcccgccgccgccgccgcggccgccacagccgggggggaggggggcgccccggggccgccaccgccgaccgggggcccggggggaagcagcagggccgggacgcgttgccgcggggcgccccctaggccccggcgccccccgccgccgccgcccccggtggtcccgggtcgggcggggaagcgccaccgacagctgtgcgccatgttcgccccgtgaagtgaagcagcgagagggagaggcgacaacacaggggggcggggaggcggaggggggggcacggggccccggaacctgcctaaccagctctgcgccgcccggccgcctgcaccctgccggccgctatgcagagcgccgggccgcgcccgccagccccgcaatctgtatagcggcctcgggcctccgcctctgacgcctgggcgctgcaactccatcccgaggcccgggccgccgcctcctgcccgcccgccggccccgcaacctggataactgcatgccccgccctccgggagaggcattgctcgggaaaaggaggggggaaggaagcccgggagcccggagcagagcgcgggttccggagagagggggagggggcgaggactacgcggaggatggaggcgtagggagccgggccgcctgcagccttgagcgccgagaggccgattacacacgttcccgggacgcgctgggaatcgaacagcccgggagagcagcttccagtataacgcggcggctgggtcggggagcagtgagccttctcctccgccccagggcacggatacaagatgggttagcccgaattgaacgcttctagaataaaagagcccttattgtactacatgcaaaacagaagcgctgcccagtttactatatgcaaaacagaaaggccctcaatgaacgcactttaaaaaataaaaaaggagcccctcccattttcatgctggagctctttccaaaaagcacacaccgagtggcaggtctcctgccacctcctcgctctactgtgcactcgtctggctttcgtgcccttctgcagggagttgggttgtgtttctccagcccgggcactgaggccacggcgtgctccgctaacgacgcggtgttacaacgaagctgaagctgggtggctaacggggcctggagggaagaggcgggcaaaagcgcccccgccccttcttcctccggtctctgcctgccgctgcatgcaaagcagaccctaatgtatgcacgcagagggaggggggctcgcgagcacgtttctgattaagagagggggaggaggagagcgttgggcattatgatacactgggtggaaggggcccgccggcggcgagctctgtgcgcggggttagtaagctgaggggggagggggaaagaaggaggcgagttagggaggggaatgaatatccaccgggtttactttattgcgggaaagaggggagggcgcctcgagcatagcgttagacgcctgcaaggctgggaaagccgagagggtagggaggggtttgtgtcgggagaacttgcgttggctgaggctgggggatcgatacacagcctgcaggccccggggcagcctccatcccccaagccgagggggagttcgctggaaggtcatgcagccttcctggactcccgcaccggtacagcgcactgcatgtaatattacagcctggggcggcgaatttgggaaggagggagagggtcgttgtgagcaggttgcactcagctctggccctccggagggtgcacttcacgcctccagagaaggtccacagcctcctggtgctgaaaacctacgtccctccactggcgaaacatttgtgcagagcggacgatgggatgggggctggagaggagcaatgaaagggaggagacacaggcaagcctcaactcccccaactcgtcccgaatcgatcttcgttccaaccgcgcaggatggggcccagatggtttgcaaagcgcacactcgcacaacgcaatacacagaacaagattccgttgttacagcgcgtggtttactagatgctaaaagggtgggagtagcaggagggtcttaaacggcagccccaaggctctgctaaggacagagacaccccattgtggacggtttctccattgcaatatatttagcgttgggcgctggggtttttgcttcagtgtagctgctctgatcagttacagattggcgaccacgtggattccctcaagcatcctgatttgttcgttctc

SEQ ID NO: 914874 - DNA, 4001 bp, Homo sapiens
tgtagcccaggctggagtgcagtggcgcgatctcggctcactgcagcctccgcctcccgggttcacaccattctcctgcctcagtctcctgagtagctgggactacaggcgcctgccaccatgcccggctaaatttttgtatttttagtagagaggggggtttcaccgtgttagccaggatggtctcaatctcctgacctggtgatccgcccccctcggcctcccaaagtgctgggattacaggcatgagccaccgcacctggccgccggcatctttaattcagactgccagcttccagaaccctgagaaatacacttctgttgtacatgccagtccatggtgttctgttacatcagcccaaagagaataagaccgcgtggtaacaggccatgatgaccccctagtgattgcttttgcctgatcaaggcaaggcacccccgccctgagccagatgctgagagggtgtggtagaggctgcacggcaaggggctgagccaggtggctgctggtgctcctgcctctgaccgccaccatgtatccaggatccctgctggccagggcgcccacctgcctgctccggtttggttcagggccggtgtgtgtgtgtgtgtgtgtgtgtgtgtgtgtgtgtgtggttcccaggggacccagtgtagccacagatgccccccacctgcctcgagagggaaataaacataaatataccaagacagctatggggtgctggggtgagcggtttattggatgtttaaaggacagagatctgaactcctagtgactgcagagtgagcaagcaccctgggctgtcctgcagggctgtccgtgctggatgtggtgccagcaggcagggcttgcggataggcatttgctgcaggtggctggggcggtggggggctggtctccagatgcctggaagggaggccttgaaagtcattcttcttggatgcatgggcccatggcatttcttggtagaaggtcaaagagaagtgttcatgcttggcaaggcaggagggtgggagatagggtagtgggtggggaaggagagtctggctcactgggtgccaggaaaaggaggtaaaggctgggcaggaatgcctggccatggtaagagtcctgcaaagccagaaatcagatcttgcactggcagcacacggggacacagcaactggactgggagcagcagggcttgcagcagctggattggcaacaggatgacccacagcctgaggaacagcagcagggcttacagcaactgcactgggagcaggatgacccgcagcctcccttagaccccgcgcaagagccacaactggaacaggaacagcaacacacgggcacaccgcagccggagccacagcccccacagccggagccacaaccccccttggatcccccacaagaaccgcagccccccttgcagcctccacaggagccacagccccccttggagcccccacaagaaccacaggcccccttggagcacccacaggagccacagccccctttgccacagctggagcaggaacaagctggcacacagcagcacatgggcttgcagcagcagacaggcacacagcagctggagccacatcccccacagccggaaccacagccacccttggatcccccacaagagccacagccccccttggagcccccacaggagccacaaccccccttggatcccccacaagagccacagccccccttgcagcctccacaggagccacagccccccttggagcccccagaagagccacagccccctttgccacagctggagcaggaacaggttggcacacggcagcacacgggcttgcagcagcagacgggcacacagcagctggagccagaacctccacagccagagccacagcccccacagccggagccacagcccccacagccggagccacagcccccacagctggagccacagcctccggagcagccgcaacagcccatggttctggtggattgagggtggagcaggtagaggagcaggtgagagggaggtgcaggtgtggagctccctgagcctggaccctttatatccctgcccagggtcatgtgtgaggctgggcacacatttcctggttcctgtttgtgccatttttagggcccctttttcttgtttcctctagaaatccgccccttggtgtatgggctgctcagtgggctgctgctctcttgctgaatctgtgtccagacttaatggaggcccccaagggtctagcctctccctgttgactccagagtcacactggatttacaaaagcatctattttaggctgggcatggtggctcacacctgtaatctcagcactttgggaggcctaggcaggtggatcacttgaggtgaggggttggagaccagcctggccaaaatggtgaaatctcgtgtctactaaaaacacaaaaattaactgggtgtggtggctcacatctgtaatcccagcactttgggaggccgaggcaggtggatcatttgaggtcaggagttggagaccagcctgcccaacatggcaaaaccccatctctactaaaaatacaaaaattagccaggcatggtggtgcatgcttgtaactccagctacttgggaggctgaggcaggagaatggcttgaacccagaggtgaaggttgcagtgagcagagatcacaccactgcactctagtgtgggcaacagagcgggactctgtctcaaaaaaaaaaaaaaagtgatctattttagttgaacgatggtataaagagtaatatatttaaaaaatgtaaaaaaaaaccctactcaacttgggaaaaaatggcataaataaatgaagtctctgttcctccatctctccatattgtttctgtcccaccctaataatttcttgaatttggaattcaccactctcatgaaggtcctcacactcctacttaatatgtatgttcctttaaaaatgttttgtggccaggcgcggtggctcacacctgtaatttcagcactttgggaggctgaggtgggcggatcatttgagtccaggagtttgagaccagcctcactaacatggtgaaacctcgtctttactaaaaatacaaaaattaaccaggtatggtggcatgtgcctgtaatcccagctattcgggaggctgaggcaggagaatcgcttgaacctgggaggcagtggttgcagtgagctgaaatcacgccattgcactccagcctgggcaacagagtgagactctatctcaaaaaaaaaaaaaaaaaaagaaaagaaaaaagaaaaaaaaattttacatgctgaaaactttatgtaatgggtattacactgtatttctctttctgtaaattgcttttgaaaaaaataggtgttaggctaaagagattttctctagggatacatatggttttaatttatttgttttctctgatttctaaatatacattgacttatccatttacttgttgatggaccttttgtttcctttttgttgctatttcaagcaagctgcaactttcttgcccaaaacccctcctgcaggtgtgggtgcctgaaagtcaggaggttcttgttaccaagctgtcttcccaagggatccccccagccagctgctgtccaaccagcattgccagagagctcctgtttcctggcacccccaccaaaacttgcaactgtcaacttacacccttcatgtgggtgtgtaacacagtgttacacactgtggtttaatattccctcttcctggttactagccatgctgtgcctctttccatatggtcacctgtcattagagtctcgttaatttcacgtccttggcccactttacaaaattgagatagttattattattaatttttgagatggagagtcttgctctgtctcccaggctgtagcgcaatggtgcgatttcggctcactgcaacctccgctttccatgctcgagcaattctcctgcctcagcctcccgagtatctgggattacgggcatgtgctaccacacctggctaatttttgta

SEQ ID NO: 914875 - DNA, 4001 bp, Homo sapiens
tcttggaaattcccactctgctcttccccggcagtatcagcagtcgcttagatctgtgagtgttctgtgggagctcatttctcaccagcactccctgtgtgctgtcttccctccaccttttccctccgggttcgcttggctggagattgtcctcagatcactcttgtctcctcctccccagtgcgtgatttctaaagccttgcctgtgacactggtcagagaacaggctcagcgtggtggcatgtcaccatgaaacagatggacttggctcagggtccccaaatgtgtcacttcccaggaactctcctttcctgccgggagactgagctccgaggacaccttgggccattctgtaacttcctggttacctttagttatggaaagccgttgacctcataattgtaaaaggctaattgaatgtttgaatcagagtgcgttggagctcagcggtgcttcactcctccctcctccgaccttgccctgcctggggtccttccgaggccccagaggagagcgggaagctggaagccatgggtcttgtgcaaagccctgcttggctggtcgtcaggactcagggcctgcctgcccctctgcgcctctagggcgggcattgaatgctgaatcctcccgggctttgccctcttctcctgcgagcagagactgaagatatttgaggctgagaggaggacagaagggaatggcaggtttttttgtgaatgtaccaggcctgctggcaggcgtttcccagcttagctgacagatcagaacgcagaatcagtcactgcacaggaaaggggttggacagaattgcaccaagcatgcagctgatttacagacatgagaggctttattgtaaggaaattcattcattactttgttattgtttttaaatagatggagacaacaggaaggaaggagaccttcctggtcacaggtggccactggagaacaggcagcgagcggccctggaggatccagggtcccaatggtggttgagaagctggttcttagtgatcactgagcaacattggcctggccttgtggggtcagaccttgcatctcagtcagccgagggagaagaagaagatggtccacacccaagtgcagggaacaccatggcagttggctgggtgcccgcgtccaggcaaggccacctcctgcatcaaggaaacatgcatttccggagtgaggaggctgaaggcagggcccagtggagagctgagccatggaaggaggtgcgtgcatggatgatgagctggagaaggggcaggtgcctcagggaggatgcgtgggatgaattaattcagggaaatcataacaaatgctttcaccaaacaggtgaaacctgaaggtctgggttcagagcctcagatcttacactggcagcacacggggacacagcagctggactgacagcagcagggcttgcagcagctagactggcagcacacggggacacagcagctggactggcagcagcagggattgcagcagctggactggcagcaggatccacagcctgaggagcagcagcagggcttacagcaattgcactgggagcagccacaagaaccacagccccccttggagcccccacaggaaccacagccacctttggagcccccacaggagccacagccccccttggagcccccacaagaaccacagccccccttggagcccccacaggagccacagccccccttggagcccccacaggaaccacagccccctttggagcccccacaagagccacagtcccccttggagcccccacaggagccacagctggagcaggaacaggctggcacacagcagcacacgggcttgcagcagcagacgggcacacagcagctggagccacagcccccacagccagagccatagcccccacagccggagccacagcccccacagccggagccacaacccccacagccggagccacagcctccggagcagccacagcagcccatgattctggtagattgagggtggatcaggtagaggagcaggtgagagggaggtgcaggtgtggagctccctgagcccgggctctttatatacctgtccagatgtcaggcaggacacagggtccctttcttgtgactgtttacattatttttccagagctctgtttttttcctttttgctagtgacttcctcctggctcagttgagcatctactttctttgtatgctaaatttgtctttttccccgtttgttttggcccctataattaaaacctcaactccaggctgtctggtacttcttgcaaagctccagggtgctggtcacctgctctctgctgaccacatgtgaccaatgggcaacagcctctgcccacatgctctcatctttcctgtgttaactcccccagtaatattaattttacattttcagatttcaaaagttatccatggtctttatattttactcataccagtctcagctttctgggtgtgttagaccattctttgcattgctctaaagaaatacttgaggctgggtaatttataaaggaaagaggttagaatggctcatggttctgcaggctgcacaagcatggcacccacctctgctcagcttctggggaggccctcagggaggttttcctcatggtggaaggcgaagcaggagtaggcacgccacatggtgagaatgggagcaaggggtgaggaggggccacacacttgcgaacaaccagatctgagtgaacacactcatcgccaaggagatggcgctaagccagttatgagggatccgcccccatgacctaaacacctccttgcaggcccctccttcaacactggggattacatttcgacaagagatttggaggggacagcccaactatgtcattatccccctgacccctcaaatctcatgtccttacatcacaaaataggatcatctcttctcaacagtcctctcaatgtcttgactcattccaacatcaagtctgaagtcccaagtccaagttccttctacctatgaacctgtgaaaatcaaaatacattatttacttacaagatgcaatgagggtagaagcattgggtaaacattcccattccaaaagggagaagtcagcccaaaggaaggggctacggaccccatgcatgtctgaaatccagcagggcagccattaaatcttaaagctccaaaataatgtccttggactcccagtcccacatccagggtacactggagtgaggggtggactcctaaggccttggggaactccaccctcgtgactttgcagggttcaccccctgcagctgctctcatgggttggagttgggtgcctgcagcttctccatgctcaagatgcaagctgtcagttgctctaccattctgggggctggaggatggtgtcctccttcccactgctcagttaagcagtgcccctgtggggatcatttacacaagtaaaagatccttccccacccctcacccctgtggtgatatctgtgcccttgttcttcacagggcaccccagtggggtgtgtcccatgcacccgcttccagccaccctcctctttctagctcactttctccagtgctttcattccaccagaactcttggtgcattgatacaaccacggcttcactgatccccaacctctctgatacctcttcttgttttgttaacagctttattgacatatcgttcatataccacacaattctcccatttaaggtatacaattcaatgcttttagtatattcacagagccgtgtacctatcaccataatcagttgtagaaaatttcataacctcatgccctttagtaccccccactcactaccccacaggacggttctccaggcggcttcagaccaatgcaattctccccgtgtctcacttgtggttctcaggcgtgactgcagagggagctgaaccgacatttctgaaagaagacgtacaaatgaccaacaagagcttgaaggaatgctcagcatcattcatcatcagggacacgcaagtcaaaaccacaatg

SEQ ID NO: 914876 - DNA, 4001 bp, Homo sapiens
gttgtgaaactatcaatagccatgtcccctagcaagatgcacctttgacacacttttattccctctcctaaatgtggttgaaataatctaagcctttatttctagattatttcatttttccttacattgcatctcttttctctcagaaatttgtcttggaaattcccactctgctcttccccggcagtatcagcagtcgcttagatctgtgagtgttctgtgggagctcatttctcaccagcactccctgtgtgttgtcttccctccaccttttccctccgggttcgcttggctggaaatcgtcctcagatcactcttgtcccctcctccccagtgcgtgatttctaaagccttgcctgtgacactggtcagagaacaggctcagcgtggtggcgcatcaccatgaaacagatggacttggctcagggtccccaaatgtgtcacttcccaggaactctcctttcctgccgggagactgagctccgaggacaccttgggccattctgtaacttcctggttacctttagttatggaaagccgttgacctcataattgtaaaaggctaattgagtgtttgaatcagagtgcgttggagctcagcggtgcttcactcctccctcctccgaccttgccctgcctgggtccttccaaggccccagaggagagcgggaagctggaagccatgggtcttgtgcaaagccctgcttggctggtcatcaggactcagggcccgcctgcccctctgcgcctctagggtgggcattgaataccgaatcctccccaggctgagccctcttcttctgcaagcagagagagtgaagatatttgaggccgcgtggaaggcagaagtgaacttcgtggttctttttgaatgcaccaagcctgctggcaggcatttcccagcttagctgacaaattagaacacagaatcagtcaccacacaggaaaggggttagacagaattgcaccaagtgtacagttggtttacagacatgagaggctttattgcaaggaaattcattcattttttttttaaatagatggagacaacaggaaggaaggagaccttcttgctcacaggtgggtcacaggagaacaggcagcagcccaggaggacccagaatcccagtggtggttgagaaactggttcttagtgatcactcaggaatgtcggcctggccttgtggggtcagacctagcatctcagtcagcccagggagaagaagaagatggtccacacccaagtgcagggaacaccatggcgtccagggaagaacacctcctgcatcaaggaaacacatgtttccggagtgaggaagctgaaggcagggcctagaggagagccgagccatggaaagaggtgcatgcatggatgatgagctagagcaggtgcaggtgcctcaggatgatgtgtgggatgaactgattcagagaaaccataagaaatgctttcaccaaagaggagaaacctgaaggtctgggtccagagcctcagatcttacactggcagcacacggggacacagcagctggactggcagcagcagggcttgaagcagctagactggcagcagctggattggcagcagcagggcttgcagcagctggactggcagcagctggattggcagcagcagggtttggagcagctggactggcagcagaatgacccacagcctgaggaggagcagcagggcttacagcagttggactgggagcagccacaagaaccacacccacccttggagctcccacaagagccacagccccctttggagcccccacaggagccacagctggagcaggaacaggctggcacacagcagcacacaggcttgcagcagcaaatgggcacacagcagctggagccacagcccccacagccagagccacagcccccactgccggagccacagcccccacagccagagccacagcctccagaacagccacagcagcccatgattctggcggattgagagtagagcaggtagaggagcaggtgagagggaggtgcaggtgtggagccccctgagcctgggctctttatatacctgtccagaggtcagggaggacgcagggtcctttccttgtgactgtttacactatttttccagagctctatttttttcctctttgctagtgacttcctcctggctcagttgagcatctactttctttgttttctaaatttgtcttcttccccatttgttttggcccctacaattaaaacctcagctccaggctggtctggtgcttcccgcaaagttccagggtgctggtcacccgctctctgctgaccacatgtgaccaatgggcaacagcctctgcccacatgctctcatcttccctgtctatccctccagataatattaattttatgtttttagatttcaaaattcacccatggtctttataggaaacacaagtaaagaagaaaacaaattctttattatcatgtatcctggagatggatttggtagatttctgcaagcataatattaatataaatattcatgcatattatattaagtaatattttactcatgccagtctcagttttctgggtgtgttagaccgttctttgcattgtgtaaagaaatacttgaggctgggtaatttataaaggaaagaggttagaatggccatggttctgcaggctgcacaagcattgcacccatctccgctcggcttctgggcaagccctcagggagcttttcctcatggtggaaggtgaagcaggagcaggcacgccacatggtgagaatgggagcaaggggtgaggaggggccacacacttgtgaacaaccagatctgagtgaacgcactcatcaccaaggggatagcgctaaaccattcatgagggatccgcccccataattcaaacatctcctatcccgccccaccaatgtgagagttggaggggacatccaaattgtatcagtggagatcctttttttttttttttttttctttttttgagacaaggtcttgctctgacacccagcctggagtgcagtggcatgatcatagctcactgcagcctctaactcctgggcttaaagaattctccttccttagcctcctgagtagctgggactatagatgtgtgtcatcatacccagctaatttttaaattttttgtagagatggggtcttgccaagttgccctggctggtctcaaactccttgtctgcagtgatcttcctgccttggtcttccaaagtgttgggattacaggcataagccaccatgctcagccaatttttttttcctttacggtccaaataacaataatataatctcattttggtgtttgcagggaatctcttcctctactcaagcatttctgaaaatcccacaaatctctctgctgttgttttctctcttccccatttacagtgttcactcctcttaggctgcttcttccagttgcccacttttgttccctgctcagttttactccaggtgggaaagagagatttctctatgccatggtctgcatgtgtcccccaacattcatgtgttggaaacatcatccccaatgcaagagtgttgtgaggtgggtcctaaagggaagtgcttgtaatggattagtatactataaggacttgagggcaggcctcttgcccccctggctcttaggacccccatcgcaggagggcaaggcgccccccgcgatgcggggagtaagagccagcccgcttgcctccctggctcttaggacccccatcacaggggggcgaggcgccccccgcgatgcggggcataagagccagccccgcctgtccccctggctcttaggacccccatcgcagggggcgaggtgccccccgcgatgcgaggcgtaaaagccagcccctcttgcccccctggctcttaggacccccatcgcaggggggcgaggcgccccccgccatgcaaggagtaagagccagcccctcttgcctccctggctcttaggacccccatcgcaggggggcgaggcgccccccgccatgc

SEQ ID NO: 914877 - DNA, 4001 bp, Homo sapiens
tttctagattatttcatttttccttacattgcatctcttttctctcagaaatttgtcctggaaattcccactctgctcttccctggcattatcagcagtcgcttagatctgtgggtgttctgtgggagctcatttctcaccagcgctccctgtgtgctctcttccctccaccttttccctccaggttcgcttgtctggagatcatcctcagatcactctcgtcccctcctccccagtgcgtgatttctaaagccttgcctgtgacactggtcagagaacaggctcagcgtggtggcacgtcaccatgaaacagatggacttggctcagggtccccaaatgtgtcatttcccaggaactcccctttcctgccgggagactgagctccgaggacaccttgggccattctgtaacttcctggttacctttagttatggaaagccgttgacctcatgattgtaaaaggctaattgagtgtttgaatcagaccgcgctggagctcagcggtgcttcactcctccctcctccgaccttgccctgcctggggtccttccgaggccccagaggagagcgggaagctggaagccatgggtcttgtgcaaggccctgcttggctggtcgtcaggactcagggcccgcctgcccctctgcgcctctagggcgggcattgaatgccgaatcctccccgggctgagccctcttctcctgcaagcagagactgtgaagatatttgaggccgagaggaggacagaagggaatggcaggcttttttgtgaatgtaccaggcctgctggcaggcgtttcccagcttagctgacagatcagaacacagaatcggtcaccgcacaggaaaggggttggacagaattgcaccaagtatacagttgatttacagacatgagaggctttattgcaaggaaattcattcattattttgttatttttttttaaacagatggagacaacaggaaggaaagagaccttcctggtcacacttgggccacaggagaacaggcagcggcccaggaggatccagggtcctgatggtggttgagaagctggttcttagtgatcactcagaaacgtcggcctggccttgtggggtcagaccttgcatctcagtcagcccagggagaagaagaagatggtccacacccaagtgcagggaacatcgtggcagtcggctgggtgcctgcgtccaggcgaggacacctcccgcatcagggaaacacacgtttctggagtgaggaggctgaaggcagggcccagaggagagctgagccatggaaggaggtgtgtgcatggatggtgagctagagcaggtgcaggtgcctcagggaggatgtgtgggacgaactgactcagggaaccataagaaatgctttcaccaaacaggagaaacctgaaggtctgggtccagagcctcagatcttacactggcagcacacagggacacaacagttggactggcagcaacagggcttgcagcagctggactggcagcacacggggacacagcagctggactggcagcagcagggcttgcagcagctggactggcagcaggatgatccacagcctgaggagcagcaacagggcttacaacagctggactgggagcagccacaagaaccacagccccccttggaacccccacaggagccacagccccccttggagcccccacaggagccacagccccccttggagcccccacaggagccacagctggtgcaggaacaggctggcacccaggagcacacgggcttgcagcagcagacaggcacataacatctggagccacatcccccacagctggagctgcagcccccacagccagagccacagcccccacggccggagccacagcccccacagccagagccacaacccccacagctggagccacagcccccacagccggagccacagcctctggagcagccacagcagcccatggttctggtggattgagggtggagcaggtagaggagcaggtgagagggaggtgcaggtgtggagctccctgagcctgggctctttatatacctgtccagatgtcaggcatgacacagggtccctttcttgtgactgtttacactatttttccagagctctatttttttcctctttgctagtgacttccttctggctcagttgagcatctactttctttgttttctaaatttgtctttttccccatttgttttggcccctacaattaaaacctcagctccaggctgtctggttcttcctgcaaagctccagggtgctggtcacctgctctctgctgaccacatgtgaccaatgggcaacagcctctgcccacgtgctctcatctttcctgtgttgactccctcaataatattaattttacatttttagatttcaaaattatccacgatctttatactcatgccagtctcagctttccgggtgtgttagaccattctttgcattgctctaaagaaatacttgaggctgggtaatttataaaggaaagaggttagaatggctcatggttctgcaggctgcacaagcatggcacccacctctgctcagcttctggggaggccctcagggagttttcctcacggtggaaggcgaagcaggaacaggcacaccacatggtgagagtgggagcaaggggtgaggaggagccacacacttgtgaacaaccagatctgagtgaacacactcatcgccaagggggtggcactaagtcactcatgagggatccacccccatgacccagacacctccctgcaggcccctccttcaacactggccaacaactatatgaaaaaatgctccacatcactaactattcggggaatgtaaatcgaaaccaccacgagataccatctcatatcagtcagaatggcttttgataaaaagtaaaaaacaaaacaaaacaaaaaaacctaaaatcagatgctggcaaagcttgagagagaagggaacacttgtacactgtcggtgggaatgtaaatgaattcagccaccacggagagcagtttggagatttctcaaagagctaagaattgaactactatttgacccagcaatctcatgattgggtatatacccaaaggaaaataaatcaatctaccaaaaagacacatgcatccatatgttaattgcagtgctattcacaaaagcaaagatgtggaatcaacccaggtgcccatcaatggtggattggataaagaaaatgtggtacatatacaccatggaatactacacagctgcaaaaaagaacgaagtcatatcttttgcagcagtatggatgaagctggaggccgttatcctaagggaactaatgcagaagcagaaaaccaaataccacatattctcacttataagtgagagctaaactttgagtccacatggacataaagatgaaaaccatagacactggggaacaagaggagggaggaagggagggagggggcaaaggctgaatactggggaacaagaggagagagcaagggggcaaggactgaaaaactactgggtaccacagtcactattttggtgatggattcattcatactccaaacctcagcatcacacaatatacccatgtgaaaaacctgcacatgtactgcctgattctaaaataaaagttgaagaaaaagttctttatatactctagatactagatgcttatcagatatctgatttgtaaatcttttcttcctttattatgtagactgttctttcactttgttgatagcgtcctttggtgcaaaaatatttaacttttgatggcatccaatgtatttgtatttctcttttgttgctggtgcttttggtgtcctatctatgaatccacaccgaatccaaggtcatgttttcttttaatagttttatagatttgactcttaaatgtaggccttttgacccattttaaattaattagtgtatgtggtgtgaagtaggggtccagctcattcctgtgcatgtggatgtctagtttcccagcatcatttgttgaagt

SEQ ID NO: 914878 - DNA, 4001 bp, Homo sapiens
aggaggcaggaaatagatgtctgtaggaagccttccaggagatgctgagggatttggcgacttgtgggggagagaagcccaaggggcctcccaattctgtatcctggaagatgggaaagacggagacgccccaagccaagtggatgccacggctgagttgtgccccctggttcatatgttggagtcctcaacgcagtatctcagaatggcaccttatttgaagataggtctttacaggggtgattagttcaaacatggacctaatggagtagggtgggccctagtctaatctgtgtccttatgcaaagagatgaggacgcagacacacacagagggatgagtacgtgaggatatagggatggcggcatcagtaagccacggagggaggcctcaggaggacccggccctgaggcacctcgatggcggattccggactccagactgtgagacaatccactcctgttgcttaagccacacggtttgtggagcagccctagcaaactcacacagcagggtacggggggttcccaaatgcctgggagtgcaactctgtggaaagtgtacatttctctaatcacacagaagttgaaacaaaagaatcacaatgcaaactcgtgggaggtgcagatcgtatttatttagaagatctagcctaggcacttacaaggcgaagccctggggaaagaaacagggccaggtcggaggtagaagaggagactgggcgcccctcctcctcaggagaggatcctggggtctccaataattccgagtcctctaggtcaactccaaaagcaatcggagcggtggcagctcaggcaggatgaagacgaagcggggaggagccaggaggttgcggggaccggggagaggcggcagcaggtcggaggattccagtgtcagcgtgtttccagcaggctcacaggaggggcccagggatgtgggatcttgaagccctgagaaggttgaagtggtggggtcaggaaaggaagacgggattccgggagggttgatgggcaggacccagcatgccagaagccctcatgacctcagaggctgagcggctgagtactgagccctggacgctaggctgccttagtccagaggaggacagattcagagacgtgcttcaggaattcaggacacagctgcaatcattcctggagagcccggatctgtaggacccactgaggtttgtgggcagagcctcagatcttgcactggcagcaaattgggacacagcagctggactgggaggagcagggcttgcagcagctggactggcagcaggatgacccacagcctgaggagcagcagcagggcttacagcagctggactgggaacagcagggtttgcagcagctggactggcagcaggatgacccacagcctgaggagcagcagcagggcttacagcagctggactgggaacagcagggcttacagcagctggactgggagcagctgggcttgcagcagctggactggcagcaggatgacccacagcctgaggagcagcagcagggcttatagcagctgcactgggagcagccacaagaaccgcagccccccttggagcccccacgaaatccacagacccccttggaacccccacaggagccacagctggaggagcagcagacgggcacacagcagctggagccacagccccccttggagcctccacaggagccacagccccccttgcagcccccacaagagccacagacccccttggagcccccacaggagccacagctggagcaggaacaggctggcacacagcagcacacgggcttgcagcagcagacaggtacacagcagccggagccacagcccccatagccggagccacagcccccacagctggagccacagcccccacagctggagccacagcctccagagcagccagagcagcccatggttctggtgggttgagggtggagcaggtagaggagcaggtgagagggaggtgtgcaggtgtggagttctctgagcccgggctctttatattcctgcccaggtgtttatactgaacacgtgaatacttctgttgttgtttctgctatttcacatgcacaagtgttatttttaatctctccacaatcccatgagccaccatcagctcaagccaagctgtcctttccttggtttctaaatttggcctcttcctcataggtgtttccctttgttagaagacactgggctccctctccagtgggtgtcccaggagcctgggaggcggtggttgcttggccgaagggtggaccattgtccttggtgctcagggctctcctcagcgatgcagaccctccaccccctggcattggtgtttatatcaaggatggtcatttggtaaaaaataaaataaaataaaaattaaaaaaataagctgaaagaaaggctgtctataggttccaccgcttaaaaacttcaagtataaatattttgtcaaatctgtaaaacaaagttttgaagagcatggatttgagtgtggccctggttctcctttgtctttcttacctcttcctcctgcggtttggctcactcctccagacacggattagacccacgttcccttcaggcaagctgggctcacagagggaacagaggaacaggaccctttctaatgcttttgagttttcctctattaattctttgtaaaaattctacaaatcaatggatattcttcaagtttattcttcttgaaggctacaaaaattttgattagccaacctctctaacacacttttattttctaaaagattaattttaatattttttttttgagaaggagtatcgctcttgtcaccagggctaaagtgcagtgacgcaatctcggctcactgcaatctctgcctcctgggttcaagcaattttcctgcctcagcctccccagtagctggaattacaggcgcccaccaccaggcctggctaatttttttgtatttttagtgaagacagagtttcaccatgttgggcaggctggtttcgaactcctgacctcaggtgaaccacccgcctcagtctcccaaagtgctgggattacaggtgtgagccactgcacccagccaaattttaattttttattaaggtaaaatttacatgcagtgaaaaaaaattttttttctgagtctccctctgtcacccaggctggagtgcagtgatgcaatttcagctcactacaacctctgcctcccgagttcaagcaattctcctgcctcagcctcccaagtagctgggattacaggcacccaccaccacacccagctaattttgtatttttagtagagacggggtttcactatgttcgccaggctggtctcgaacccctgacctcaggtgatccacctgccttggcctcccaaagtgttgggattacaggcatgagccaccaggcttgggctgcatttttttttttttttttttgagacggggtcgcattctgtcgcccgggctggagggcagtggtgtgatcctagctcactgcagccttggtctcctgggctctgcacatattttgagtgtacaattccatgagttccgctaaacatgtactcgtgtgcccatcactccaaccatgaccaactgcttcacccccagaagtttccctttcgccgccttcccttcctgcccatcgctccaggcacagctctgctgaccagttgtgcctgttgttgaatgttgcaaaaatgaaatcattaaaaatgtactctggtttctttccctcacgatgttattctgtgtgtcaatgatttgctcttcttctttttttttttttttttttttttttgagacagggtcttgctctgtcacccaggctggagtgcagagtggtgcgctcatggctcactgcagcctcgacctcctgggctcaagcgatccacctgccccagcctcccaatgtgctgggattacaggcatgagccaccacgcctggccttcttcttcttttgtaatcaccgcatagtgtttctgtagcagggcgagccgcagacaag

SEQ ID NO: 914879 - DNA, 4001 bp, Homo sapiens
atgcagtaaatttgatagccccattatttcattaggggttacaaaatggttagcttctaattctacgatttcttctttatttataaactggaatacttcctctaattttttggttaccgtaagatagagtttctctatcagagatagaataagtgcctgattattttcctttatatagtcatcttcgaaataatgacttgattcctagaatcctctaaaggcaactaaattttacagtttgcatagtatctctattattatttgtgtatgtatgtgtgtgcgtatgattactcactcctagtttaaacatatttgatgtgtatcagtccagttaagaaattggtgttcagattgtttcaagtctgtctatacagagtttctccaggtttgactcttacctttttttttttctttttttgagacggacgagaggcagcggagacagccagccccatcctagcaccttccagcaacatcaccatcagactcacggagtccgaaatataacaagaataagaaaacaatagccatagccatagtaatgacaccgaacaacagagaaatcagcaagatatgtgtttcagtttgtcggcatggtatttttattagtttgcaactttctgtttaagataaagcagtgtgatcctggttaacatggtgaaaccctgtctctactaataataataaaaaaaaaattagccgggcgtggtggcgggcacctgtagtcccagctactggggaggctgaggcaggagaatggagtgaacccgggaggcggagcttgcagtgagccgagatggtgccactgcactccagcctgggtgacagtgcgagactccatctcaaaaaaaaaaaaaaaaaaaaaaagatacagcagagtgttggacatgcaaagccactccaaggaagcctcttaaacgcccaccttgttgcaggtgggacgcttatgcccagctgctccagctggaaaagacaggactgcaagtgggttcaggagctcaggcctctgaaaagatgagcaaaggcgaggctagtgggtgaggggtgattcagctgcaattgcagttgacttggggagagaatttgttaggagagacaatggacattaattagggtggactcttcttaggaaaaggcagccagatatggcatcgttctacagcagggaatggaccctgagcaatgatttggggctcaacaatgaaggacaggtcacagctttggaagacaggattagcaggactcacatgaggcctgagtccagagcctcagatcttacactggcagcacacagggacacagcaactagactgggagcagcagggattgcagcaactggactggcagcaggatgacccacaacctgaggaggagcagcagggcttacagcagctggactggcagcagtagggcttgcagcagctggactggcagcaggatgacccacaacctgaggaggagcagcagggcttacagcagctggactggcagcaggatgacccacagcctgaagagaagcagcagggcttacagcagctgcactgggagcagccacaagagccacagcctcctttggagcccccacaggagccacagccccccttggaacccccacaggagccacagccccccttggagcccccacaggagccacagccccccttggaacccccacaggagacacagccccccttggaacccccacaagagccatagccccccttggagcccccacaggagccacagctggagcaggaacaggctggcacacagcagcacacaggtttgcagcagcagatgggcacacagcagctggagccacagcccccacagccggagccacagcccccacagccggagccacagcccccacagccagagccacagcccccacagccggagccacagcccccacagccggagccacagcctccagagcagccacagcagcccatggttctggtggattgagggtggagcaggtagaggagcagatgagatggaggtgcaggtgtggagccccctgagcctggacccccttatatccctgggtagggttgctctgagaccttggtcactccatcattcccagcacttcctgggtatgtgattatttgtttgctggacttcgggttctcattggcctgatccaacacccacctgcttatgtttctaaatgtagtcacttcctccttggaactggaccttgtactgaactgatcacctgccttctgttttcctcatgtgatgggcagaggatgggttttctacaaagatcattttggttgttttcttcccatcttttcttcccacctatggcattatatttttctttgaaactgtgaactttgtgtgaagataattttttaaaaactaagctttcatccatataattaaagaggctaattgaggaaccaacgttgtatcttggttctgtcttaacacattggtgcactgcagtgaatctctcctccgccagcctcaggtcgtggggtgctcaggactcctggctgctgcatacacagcctcacgtggtgagtattgtttatgttaaaaatctcaggaatttcatgggtggatgggggatctcatttatcatcctgttgttaatctcttcaattaactattagtgagggtgattcttttactccaatataaattatatacttttttattggccaggcacagtggctcacacctataatcccagcactttgggagaccaaggtgggcgaatcacgaggtcaggagatcgagaacatcctggctaacatggtgaaaccccgtctctactaaaagtacaaaaagttagccgggcgtggtggcgggcgcctgtagttccagctactcaggaggctgaggcaggagaatggtgtgaacctgggaggtggagcttgcagtgagccgagatcatgccactgcactccagcctgggcgacagagcaagactccgtctcaaaaaaaaaaaaaaaaaatttatacctttttgacttctcattactgctttaaaagttatttggatattgagagaacaaatcccttgtgttcaaacagtgtactttgtttttccacaggcatgtacttgagtttaatttctgacgtttttaaaagccattctcactttgtcttaattgtcatttttagcctcgccaacattattagatggtataaaaatgaatgtctttcagccgggcgcgctggctcacgcctgtcatcccagcactttgggaggcccaggcgggcggatcacgaggtcaggagatcgagaccatcctggctaacatggtgaaaccccgtctctactaaaaatacaaaaaaaaattagccgggcgtggtggcagacgcctgtagtcccagctccttgggaggctgaggcaggagaatggcgtgaacccggcaggcggagcttgcagtgagccgagatcgtgccactgcactccagcctgggcgacagagcaagactccatctcaaaaaaaaaaaaaagaaaaaaaaaaaaaagaatgtctttcaagcttgggataaaggccttgtcttatctggaagaggcgagagaggggttataggttccgtcgttcccattgctaatgggagctgtggggcaggggactgagagaaacccacagagagggaagtgcctgctgtgctgaaaatggcttcttcctagggaacacactgggtcagaggatgcagccctgtgtggcaacagttcacgcctcccgactaggcgcggtgaggctgggatggggacacttcataagacctggattgtgagcacagagcccaggcatcctaacaaagctgtcccccaccagccctgcgcgaggccgcactggacatgagcagaccatcacgcaccccaggtgctcaccagagcttggcagctccgccctcaggtgctgggtaaagggaaccaggagcatcccattttgtttcaacataggtagaagatctagacaggattggccaaacccaagagaggtaacatgagattctgtaacag

SEQ ID NO: 914880 - DNA, 4001 bp, Homo sapiens
atgagtcagacctgagcactgagtacataggaacacaagggaacaacagcactgtggtgcatttggcgggggtggcgggggcaggaggagggtgaggatcaaaaagtcacctattgggtactatgctcattacctggttgatgaaataatctatacaccaaacccccatgacatgcaattcatctatatggcaagcctgcacatgcagccctgaacccaaaataaaagctgaaagaaagcttgtctccaggctaggttgccttagaaggcactgggcatttgggctcccccagctctggaatttttttttggaggtggggatctattcaactcccggctgccttcgagcttgtgtcccgcagctggcgttgtgtgcagtcctgccttctcctgtctggtttttcaaggccctgtgagattgcagataagcccaagctcctccgcatctccacgtctggctcctgcatgcactaggggcttcttagggcctgatgtaccgcacagctcagcatacagacccttcctcatccttccgctgaagtggcctggccctgagcttccctccctcccacgggacggcagtgcctccacggctgacaccaccgccctcaccacctttccctctccccacctctccccacataccagactgtgagcttggatttactctgctctgtcatctctggagcccaacacaacaaggggcccagagcagaaagctatagacgttagttctgtgcatgaagacatggaccatgacatgaaagatgctgaggggagagaaatgggaacaggcccaggggtggaggcaagaagatggtgcttctgggaatgagagagaggtgggaaggagagaaccacaagacagtgagctttgtgcttagagactttgtttatttagagggtcaggattcagtcttgatatacagacagccagagagattgagggtcgatcacactcctgaaagaaggagcagctgtcagggtctaaggggtctgatctgcctctggggcctcagtgggccgctttggatcttaaatgagtgaggagcagggagaggaagttcaggagaagtagtaggcaatgagccagaaggggtcctcagtcagtttcgggagcactggtgtggagtggatgaagccagtgaggacacagtggagacagtggagcaccagagaacccagggcaaggaagctgggcagccgggcccttcaccagtcaggccacctgcagtctgcagtcagagcctcagatcttacactggcagcacacggggacacagcagctggactggcagcagcagggcttgtagcagctggattggcagcaggatgatccacagcctgagaagcagctacagggcttacagcagctggactggcagcagtagggcttacagcagctggactggcagcagtaaggcttacagcagctggactggcagcaggatgacccacagcctgaggagcagcagcagggcttgcagcagctggactgggagcagccataagaaccacagccccccttggaccccccacaggagccacagccccccttggaccccccacaggagccacagccccccttggaccccccacaggagccacagccccccttggaccccccacaggagccacaggcccccttggacaccccacaggagacacagcctctcttggagcccccgcaagagccacagccccctttgccacagctggagcaggaacaagctggcacacagcagcacatgggcttgcagcagcagacaggcacacagcagccggagccacatcccccacagcccgcacagccggagccacagcccccacagcctccacagccggagccacagcccccacagccagagccacagcctccacagccggagccacagcccccacagccggagccacggcctccacagccggagccacagcctccggagcagccacagcagcccatggttctggtggattgagggtggagcaggtagaggagcaggtgagagggaggtgcaggtgtggagccccctgagcccgggctctttatatccctgtccagggtcaggtgagaggctgggcacactgtcacttcctggttcctgcttgtgccactggtcccagtattctcttctgctttacatttttataaataactcctgttttcctcgcacttttctcgaatgtgctgtcaggtctgtgatggaagcggcccctcagtaaacactggccccgcggtgagtttccctttccatgtgacaagaaggaagcgatgggcaggcagtggctcgctcagaggccttggtcttgccgagggtgattttgagcccaggactcctggcttgctcccgggaagattcctctgcgggagcatcgtgtcttgcttgggacgtgcctaggccctacaccttcacggtccacagcagctcctggcccgcgggctgtttccaagggtcccaggacctggggcttcagccctcagctcagcagggtcgttttcggtgtaagactttgttggaaggtttgcagtgttgactgagacggggattttaagcgcttattctggagcttgctgcgtgctccccatggaaagtgttctcctgtgataaccgcggtctcttccagggctttcagaccactcgggtggcagggctgacagatacagtacaggatgcctgctggaacttgaatttcagatcatcgaaggctgccttttgaggaaggaaatccaagcattgcaaggggcagacactgcctctgcgctgggtcaggacccagatcgcattgtctcctgcagcggttcctcctgccgccgcacggtgtcgctgtgaagcgggttcccccactgcgtggccggcccaggggctcccggacagcggcacaggctgatggcagaggccctttcagggccagtgagcggaagaggatgccctgtctgggtgcccgcctgctccgggtcccgggctcagcctgggaagcagcaactacattcgggtgcaggcccactggatgctaaagaaagccggtggagagcagggaaccggatggccatttgcccccgtgaccacaatacctgtgagtgccccgagcccagtcaacaggcctcaggccacggtgtaaacaccagctggcactcggtgactcttgccgtgtatgctggagccccactctgttctggggcaggggactgtatctcagggaggaacagaaaacccattaggagagagccgccttgtgttggctgtccccaccagaggcggcatcctccagctctggaacagaggcaacagatacatttgcttcctgatacattcgcatccagcgcctgatacattcgcatccagcgcctgatacgttcgcatccagcgcctgatacattcgcatccagcgcctgatacattcgcatccagcgcctgatacattcgcatccagtgcctgatacatttgcatccagcgcctgatacatttgtcccagtgcttgatacatttgcttccagtacctcgtatatttgcctccagcccctgaagtaatgtatcaacacccgcgctgactcctagtgacacccttggatcagctccttccctcgggtacaagaggacttttccttttgtactttgggaacatcttccctttcatgggcctttgttcttcgtggtccattgatgaccttcgggttcgctgaattgggcaaagaggatcatcagagggcctcttacaatgctctgatggaacaatcaacatggcagtggtctcaccctgtcccgtggggcaccccacgattatgtagcttttgagcaaatgccccctgaaatgtgtgtattatataaggtgcatatgctcctgtctagtcatttgctattttaattttagttaattttaatttttttcaccttttcagcgtaaagcagacatgagtatgttgtagactttgctcctgtgctccacattaggaactacctctgcagacccattcttaactactgtgggttcgtagattcct

SEQ ID NO: 914881 - DNA, 4001 bp, Homo sapiens
aaaaaaaattagccgggcgtggtggcaggtgcctgtagtcccagctactcaggaggctgaggcaggagaatggtgtgaacccgggaggtggagcttgcagtgagccgagattgcaccactgtactccagcctgggcgacagagtgagactccgtctcaaaaaaaaaaaaaaaagaaaccccgtctgtactaaaaatacaaaaattagccgggcatggtggcagaaacctgtaatcccagctactcgggaggctgaggcaggagaatcacttgaacctgggagatggagtttgcagtgagccaagatcacaccactgcactccagcctgggcaacagagcgagactccatctcaaaaaaataaaaaataaaatgaagggatgttgaattttaacaaaagccttttctgcctgtattgagatgatcatgtggcttttgtctttagttccgtttatgtaatgaatcacatttattcatttgtgtaggttgaaccaaccttgcatcataggggtaaggcctacttgatcgtggtggataagctttttgatgtgctgctggactcataaatcattctatcataaacacacatgcacacgtttattacagcccaattcacaacagtaaaaacaaggaatcaaccaaaatgcccatcaattgtagactggataaagaaaatgtggcacatatacaccatggaatactatgcagccataacaaagaatgagatcgtgttattggcaggaacatggatggagctggaggctattatccttagcaaactaactcaggaacagaaaaccaaatactggatattctcacttacaagtgggggtggaatgaggagagcacatggacacacagaggggagcaacacactggggcctatcggagggtggacggtgggaggagggagaggatcaggaaaaataactaatgggtacttggtttagtgatgaaataatttgtacaacaaacccccatgacacgagtttacctgtgtaacaaatctgcacatgctccctgaacctcaaataaaagttttttttgtttgtttgtttgtttgttttaaagccacagtgagagcaagcctcatgggtgggaaatgtgtttatttaaagggtctcaggtcctgctgaaccttaactgagagagaagccgcgagagtggccgtctcctggggaggaaggtttggagcctttggggatgggggcagatctccactgcctccccgacctgcagctgctctagagaaggaggacaggaggactgatggacagggagggccctgtcgcagcaggacctggcagggagcttgttggaggagattgcagggctctgggaactgggaaggtgttgggcaccaggagagaggaagagagttctcatgaagaatgaccagaaagggagtcaggaaaggccaagaacctggagtcatcaccttctgcaaaattcaggggacacaactcctggagctgtgggacagccagaactgaaatgcagcactggtcacttcttgggtggtgtggatatgctggactcacctgaggtccaaagtcagagcctcagattttgcactggcagcaaatggggacacagcagctggcctgggaacagcagggcttgcagcagctggactggcagcaggatgacccacagcctgaggaacagtagcagggcttgcagcaactgcactgggagcagccacaagagccacagcctcccttggagcccccacaagagccacagccccctttggagcccccacaagagccacagcaccccttggagcccccacaagagccacagctggtgcaggaacaggctggcacacagcagcacacgggcttgcagcagcagatgggcacacagcagctggacccacagcccccacagccagagccacagcccccacagccggagccacagcctccagagcagccacagcagcccatggttctggtggattgagggtggagcaggtagaggagcaggtgagagggaggtgtgcaggtatggagctccctgagcctgggccctttatatccctgcccaggatcaggtgtgatgctggacacacagtcatttcctggttcctgtttgtgccatttccttagggaaactgtgtttgtttgcttaatcttaaaataacctcagtggtgtacatagttttgcactttttctttagttcatgatttccctcacatgtcctctgaaaaatgacaaggcccctgtccttctgtgttagtaagggcaacgggagcagggacttggctttgatgctgcgctcatctttgctaccagtgttcatttcctggggctgccataacaaatggcccccaacgggagccttaaagcggacattggtgcctcgcggttcaggcagacagaagttcaagatcaagttctccgtgggccacacactctctgaaggctccagggaaggatcctttctgcgtcttccagcttctggtggtggccagacattcttggcttgtggctgcatcccccgtctctgcctccatcctcaagtgggcttctccactgagtgtctgtgtctgacctcctcccctcctttctcttacagggacaccagacattggatcagggcccaccctactccagtacaacctcatcttaacttgattacatctgcaaagacccagtgtccaaataagatcacattcagagtttccaggtggacaggaatgagggggtcctattcaacccacttctatgctgatgctgatgctgacttgactccgaaagtctcaggggaagtttacagaaggcacagggagaccacgcatggagacaccctagagcaggtgaccccatcctgggctatcacccgtgggtagaacaggatgaaacccaggatctcataagagccaggatcaggaaatactcaggatcagaataggactcaggatcagggcaggctcaggacaggactcagaaacagggcaggaaccaggatcaagacaggactcaggatcaaaacaggactcaggatcagaacaggactcagcattagggcaggtctcaggatcaggcaggacccaggatcaggacaggactcagaatcagggcaggacccaggatcagggcaggatcaggacaggactcaggatcagggcaggacgcaggatcaagacagcactttgaatcacaataggactcaggatcagggcaggatcaggacaggactcaggatcggggcaggtctcaggatcaggacaggacccaggatcaggacaggactcaggatcagggcagaacccaggatcagggcaggtctcagtatcagggcaggaccacaggatcagggcaggaatcaggatcaggacaggacccaggatcagggcaggtctcaggatcagggcaggacacaggatcagggtaggacccaggatcaggacaggactcagggcaggatcaggtcaggacccaagatcaagacaggactcaggatcaggacaggattcaggatcaggacaggtctcaggatacctgggatcctgctgtcttggttggaaagagggggcctgagtgcagacccaggaatcgtgaccctgcagagtcatttccctggagctggatgactccaggctcagtggtttagggcttagagatgctgtcagtcagcacactgtgaggcaccaagggcatagtccaatgaaccggcagagttggagaaacaaaggaggtggcagctcaggagccccccacctttgggctttgctgacagaggaggacacagggatagaaactctgagaaagccaaagctgtgggagggtcccagtgccccaccccacacacaggacaatggccgcccacagaccacggggcctgtggcttgtatgcccagtcaggtgacgacgccattcagaaactagatctcatagggtgcccagctgctgaatctcaggccaggtctgcagtgagtgcagtgccccaggcctggaacactctgataccatagggacccaatgctgagtgcac

SEQ ID NO: 914882 - DNA, 4001 bp, Homo sapiens
tcgatatatctaattcaaattcaggatgacaaggtttttacttaacctcatcagttccacaccaaaaattctagttctgataccaacctaattatgcatttgctttttccatacagcattcacagcagaataacgacaccactgctgccaccatgactactaaaaatagcttaggaattttatttttgtgttctttctatgcttaggacatatcccaccaataaattgctgtgtttccaaataacttgaaataattcaactctattaatattgcctttttttttttttgacggagtcttgctctgtcgcccagaatggagtgcagtggcgcgacctcgactcatcacaacctccccctcccaggttgaagccattctcctccctcagcctccgaagtagccaggattacagacacgtgccaccacactcagctaatttttatatttttagtagagacagggtttcaccatgttggccagtcaggtcgcaaactcctaacctcaagtgatccgcctgcctcggcctcccaaagtgctgggattataggcgtgagccactacgcccggccctttcaaaattcttaaaaagcaatattggcttggtgctaggagtgtttatttacagaggcaacaggctgtgtaacaacaaagacaatcagagtaagttggttacaaaaacttcccaaaggaagatggcagaggcctggaccagggaaaggaggcaagtctgaactccccagagttttcagcagcctcttctgcttctgtggccctggcctgaggaacagtcctgtctccatcagatcaatagctggaaagacctaggaagagaggggttctgagaaaagaggggtcagccaggaaggagatgagaggcagaggagacagccagccccatcctagcaccttccagcaacatcagcatcagacccacgcagtccgaaacacaacaagaacaagaaaacaatagccatagccatagtaatgaccccgaacaacagagaaatcagcaagatatgtgtttcagtttgtcggcatggtatttttattagtttgcaacttttcatttaagataaagcagagtgttggacaggcaaagccactccaaggaagcctcttaaacgcccaccttgttgcaggtgggacactcatgcccagctgctccagctggaaaagacaggacttcaagtgggttcaggagctcaggcctctgaatacacaagcaaaggcaaggctagcgggtgaggggtgattcagccgcagttgcagttgacttgggaagagaatttgttaggagggaatggacattaattagggtggactctccttaggaaaaggcaggcagatatggcttcatcttatagtgaggaatggaccctgagcagtggtttggggctcaacgatgaaggacaggtcacagcttcggaaaatggggttagcaggactcacatgagacctgagtccagagcctcagatcttacactggcagcacacggggacacagcagctagactgggagcagcagggattgcagcaactggactggcagcaggatgacccacagcctgaggaacagcagcagggcttacagcagctggactggcagcagcagggcttacagcagctggactggcagcaggatgacccacagcctgaggagcagcagcagggcttatagcagctgcactgggagcagccacaagaaccacagccccccttagaacccccacaagagccacagccccccttggagcccccacaggagccacagcctcccttggagcccccacaggagccacagctggagcaggaacaggctggcacacagcagcacacgggcttgcagcagcagacgggcacacagcagctggagccacatcccccacagccagagccacagcccccacagccggagccacagcccccacagccggagccacagccttcggaacagccacagcagcccatggttctggtggattgagggtggagcaggtagaggagcaggtgagagggaggtgcaggtgtggagccccctgagcccgggctctttatatacctgtccagaggtcaggcacaatacagggtcgcttccttgtgactgtttacgctatttttccagagctctattttttttcctctttgctagtgacttcctcctggctcagttgagcatctactttctttgtttactaaatttgtctttttccctatttgttttggcccctacaattgaaacctcagctccaggctgtctggtgcttcccgcaaagctccagggtgctggtcacctgctctctgctgaccacatgtgaccaatgggcaacagcctttgcccacgtgctctcatctttcctgtgttgactcccccaggaatattaatttcacatttttagatttcaaaattatccatggtctttatattttactcatgccattctcagttttgcattgctctaaagaaatacttgaagctgggtaatttataaaggaaaggttagaatggctcatggttctgcaggctgcacaagcatggcacccacctctgctcagcttctgggcaggccctcagggagcttttcctcatggtggaaggtgaagcaggagcaggctcaccacatcgtgagagtgggagcaaggggtgaggaggggccacacacttgcgaacaaccagatctgagtgaacacactcatcaccaaggagatggcgctaagccagtcatgagggatccgcccccatgacctaaacacctccttgcaggcccctccttcaacactggggattacatttcgacaagagatttggaggggacatcccaactgtatcattatccccttgacccctcaaatctcatgtccttacattgcagaatagaatcatctcttcccaacagtcctctcaatgtcttgactcattccaacatcaagtccaaagtcccaagtccaagtcccttccaccaatgaacttgtgaaaatcaaaacacattatttactttgaagatacatgagggtggaggcattgggtaaacattcccattccaaaagggagaaatcagcccaaaggaaggggctacagaccccatgcatgtctgaaatccagcagggcagccattaaatcttaaagctccaaaataatgtccttggactcccagtcccacatccagggtacactggagtgaggggtgggctcctaaggccttggggaactccacccttgtggctttgcaaggttcgcaccctgcagctgctctcatgggttggagttgtgtgcctgcagcttctccatgctcaagatgtaagctgccagtggctctaccattctggggcctggaggatggtgtcctcctccccacagctcaattaagcaatgccccagtggggactctgtgtgggcctcctactccacatttcccctctacactgccctagtatatatcctctgtgcgggctctgcccctgcagcaggcttctgcctgagtgcccaggctttctcataaatcctctgcaatctaggtagaggatcccaagcctccttcactcttgtattctacgcacctacaggcttaacaccacatgggagctaccaaggcttatggcttgcaccctctgaagccagagttacatttggggtcttttgagctgaggctggagctggagtagcctatgtgtggggagcagtgctccaaggctatgcagggcagtgagggcctggggtgagcccctgaaaccatggtgtcctcctagacctctaggtcagtgatgagaggggctgtctcaaacacttttgaaatgcatttgaagtcttttccaattgtgttggctattagcacttgggtttttttgtttgttttttgagtcatgctaatatctctagcaggtggttgctctatagcctgcttggattcctctcctgataatgctttttcattctctgccacatggccatgctgcaaagtttccaaacttttacactttgattcccttttaaatataaattccaac

SEQ ID NO: 914883 - DNA, 4001 bp, Homo sapiens
tcctgccttccctccccatgagtcgaacatgccggactttggtctaggccctccagcctccggaactgggagaaatggtgtctgttgttccgtcttccaggcttactctgtgggttttgttctggcagcccgagctgacagaggcagcagggaagggacagttgggggcctgaagcagaggtctaggtagggaggtgtcacaagaaggcaggaaggaggtgtcttaggatgtcttccaggagatgctgtgggatttggcgacttgtaggggagagaagcccaaggggcctcccaattctgtatcctggaagatgggaaagatggtgatgccccaagccaagtggataccacggctgagttgtgccccctggtacatacgttggagtcctcactgcagtatctcagaatggcaccttatttggagatagatctttacaggggtgattagttaaaacgtggacataatggagtagggtaggccctaatctaatctgtgtccttatacaaagagatgaggacgcagacacacacagagggacaagcacatgaggatatagggatggcggcatcagtaagccacggagggaggtctcaggaggacccggccctgaggcacctcgatggcagattctggcctccaaactgtgagacgatccactcccgttgcataagccacatggtttgtggggcagccctagcaaactcacacagcagggaacggggggttcccaaatgcctgggagtgcgactctgtgaaaattgtacatttatctaatcacacagaagttgaaacaaaagaatcacaacgcaaactcgtgggaggtgtggatcgtatttatttagaagattcagcctaggcacttacaaggcgaagccctggggaaagaaacaaggccaggtcagaggtagaagaggagactgggcgcccctcctcctcaggagaggatcctggggtctctaataattctgagtcctctaggtcaactccaaaaacaatcggagctgtggcagctcaggcaggatgaagatgaagggtggaggagccaggaggttgcagggaccggggagaggcggcagcaggtcggaggattccagtttcagtgtgtttccagcaggctcacaggaggggcccagggatgtgggatcttgaagccctgagaaggttgaagtgatgaggtcaggaaaggaagaggggattctgggagggttgatgggcagcacccagcatgccagaagccctcatgacctcagaggctgagcagctgagtactgagccctggacgctaggctgccttagtccagaggaggacagactcagagatgtgcttcaggaattcaggacacagctacagtcattcctggagagcccagatctgtgggaccagctgagatttgtaggcagagcctcagatcttgcactggcagcaaattgggacacagcagctggactgggaacagcagggcttgcagcagctggactggcagcaggatgacccacagcctgaagagcagcagcagggcttacagcagctggactgggaacagcagggcttgcagcagctggactggcagcaggatgacccacagcctgaagagcagctgcagggcttacaacagctggactgggaacagcagggtttgcagcagctggactggcagcaggatgacccacagcctgaggagcaacagcagggcttatagcagctgcactgggagcagccacaagaaccacagcctcccttggagcccccacaggagccacagtcccccttggagcccccacaggagccacggccccccttggagcccccacaggagccacagctggagcaggaacaggctggcacacagcagcacacgggcttgcagcagcagatgggcacacagcagctagagccacatcccccacagccagagccgcagcccccacagccggagccacagcctccagagcagccacagcagcccatggttctggtgggttgagggtggagcaggtagaggagcaggtgagagggaggtgtgcaggtgtggaactccctgagcctgggccctttatatccctgcccaggtgtttatactgaacacatgaatacttctgttgttgtttctgctatttcacatgcacgagtgttatttttaatctcttcacaatcccatgagccgccatcagctccagccaagctctcctttccttggtttctaaatttggcctcttcctcataggtgtttccctttgttagaagacactgggctccctctccagcaggtgtcccgggagcctgggagacggtggtggcttggccagcgggtggaccattttccttggcgctcagggctctcctcagcgatgcagaccctccaccccctggcattggtgtttatatcaacggtggtcattttgtaaaaaaattaaataaaattaaaactaacaaaataagctgaaagaaaaggctgtctataggttccaccgcttaaaaatttccaggataaatattttgtcaaatttgtaaaacacagttttgaagagcgtggatttgagtgtggccctggttctcctttgtctttcttacctcttcttcctgtggttcggctcactcctccagacacggattagacccacgttcccttcaggcaagctgggctcacagagggaacagaggaacgggaccctttctaatgctttcaagttttcctcaattaagtctttgtaaaaattccacaaatcaacagatatgcttcaaatttattctccttgaaggctacaaaaattttgattagccatcctctctaatgtacttttattttccgaagattaattttaattttatattgaggtaaaatttacatgcagtgaaatgctttttttttgagactaaatctcactgtgttgcccaggctggagtgcagtggcatgatctcggctcactacaacctctgcctcccgagttcaagcaattctcctgcctcagccccctgagtagctgggattacaggcgtgtgccaccatgcctagctaatttttgtatttttagtagagagggggtttcaccacgttggcctgtctggtctcgaactcctgacctcaagtaatccacctgcctcggcctcccaaagtgttgggattacaggcatgagccaccacacccggactgcatttttttttttttttttttttttttttttttttttttgaggcagtgtctcattctgtcgcccaggctggagggcagtggtgcgatcctagctcactgcagccttggcctaccagcctctgcacatactttaagtgtacaattccatgagttccgctaaacatgtactcgtgtgcccatcaccccaaccatgaccaactgcttcaaccccagaaggttcactttcacggccttcccttcctgcccatcactacaggcacagctttgctgactagttttgcctgctattgaatgtcgcggaaatgaaatcattaaaaatgtactctggtttctttccctcacgatgttattgtgtgtgtcaatgatttgcccttcttcttcttcttcttttttttttttttgagacagggtcttgctctgtcacccaggctggagtgcagagtggtgcgctcatggctcaccgcagcctcgacctcctgggctgaggcaatccacctgcctcagcctcccaacgtgctgggactacaggcatgagccaccacgtctggccttattcttcttttttaatcatcgcgtagtgtttcgtgtaaaaatactctccacggcgttcctccattctcctgttcatagatatttgaattgttcgcagtttggggcgatgataaataacacataatcatgccttccagtccttccgtattcatgtttttggttttaattttttggttaaatattgaggactggccttgctagaccatagagtagtgtatgcttaactttctaagaaacagacagctttccaaacgctcaagctgctttcccttctcctcagcaatgcctgagagc

SEQ ID NO: 914884 - DNA, 4001 bp, Homo sapiens
tacctggatggctttattttcttttcctgttatgttattctggctatagcttcagtgaaatgttgcatagaagtggtgggtgtggacattcttttcctgttcctgatcctaggggaaaacatccaggttttcatagttaagcaccgtgttcactgtgggtagatggcctttatcaggctgagaaaagtcccttctgttcctccctgtgccaaaccaaagctgggaagcctgtggacacttggattcctcctcactctgagcccagagatggagggtgcacttcagcctgtgttcagccacaccgtcttggatccttgaagcagcacagtttccagtgttgtcctacagagcatctcagggacacagctcattctagtctcgcttccccatctcctggcttgacccacaaactggggactggctggacccagagagcacccattacatcccttcctaggcactgagggcaaagttctccttctctcccaaacatatcctcccatggggaagaagtaggagtccaaattccaaccaagacagactgaatcccactgagatacagctgggactccctgtgtactaatgagagatactcactcattcactcattcattcctcgtcttcattcattcatacatactgctagtggttccttcattaatcagttcaacaactgtttctggaatgggagctgggcctggcacactgttacagcagtgggagcaataagctatcagggaggaggggaaggacatgtggccagtttgccaatgagacagaggctggaagaaaagagtcagtgagaccaaggctgagggatggagaatttatttagtgctgcacccagatgcattttggatttccatagatacatgtgatcatttgggttgcaggacatccatctgcaaatgtcgtgaagctcctggcaggcaaaggaaagaagggtttgctgtctcccatggaattatcaagaaggggaattccaggctcttgcttggcatgagggcagcccccagtgcagtttggctcagacatatgggggcatgtgggaaagaggggcaaaattgcctgggtcttgggatattcttatagggaatgggcagggagtggttcattccatttcctcaggggctggaaaaagacgccctgagccaagggctcttttcagatccagaaggggatgtgcttcaagggtagtcacttgttggaaagcacagatcttcaggagctacctgaggtttcccactagagcctcagatcttgcactggtagcacacagggacacagcatctggactgggagcagcagggcttgcagcagctggactggcagcaggatgacccacagcctgaggatgagcagcagggcttgcagcagctggattggcagcaggatgacccacgacccgaggaggagcaacagggcttacagcagctgcactgggagcagtagggcttgcagcagctgcactggcagcaggatgacccacagcctgaagagcaacagcagggcttgcagcaactgcactgggagcagccacaagaaccacagcctcccttggagcccccacaggagccacagccccgcttgccacagctagagcaggaacaggctggaacacagcagcacacgggcttgcagcagtagacgggtgcacagcagctggggccacagcccctgcagccagagccacagctcccacagctggagtcacagcctccacagctggagccacagcctccggagcagccacagcagcccatggttctggtggattgagggtggagcaggtagaggagcaggtgagaaggaggtgcaggtgtggagccccctgagccccggctctttatatcccacataggaacacaccattgtttctctttccggttgctgttacacagctcctggaggtatgtcttgattgtttttctttggctatgttgatattttctggatccaagtatgagcccttcctcctgagatgatttccttgtggaattcatactgaaaggaaaaacagctccaacgctggctcacctcaggaggaagtgcagcttcctcaaggtctgtcccagttcctaactcttattcttcctgggcctttgagcagatccagtcagctcccgagccccagcttcttctcctgcagaggggtgctagcaacaccagcctccgggggttgcctgagaattacctgagatcattcatgtattgcgtcttttgcaacaccccaactccccatcccccatgctcatgcagggttccgtcttggcaggactgggtcaatgttgtgggtttttgacgtttgatgctgtgagacgccctccctccccagagcagtgccactctctacctgattcctgctgattcccccagggatgtggtatcttctctgtggcaactgtggctgaggatggcagggttctcagcagtggggaaggaggcatcctctgtctacctcctccctattcctggaccaggaataggccagggcaatgggctctgtgattacagaagggaatttcacacagcatggtccttggggacacgtgagcagagcttcccgctgctttgaaactattgtctggacaggttcttctcttggaggaaaacaaagcttggagcagaacttggagggtggtagggggaccatgatgggtacaaagagcagccaagagacaggaaggatactccagctaggaggcagggcaccagcaatggtgtggaggctgcaggtgcaggaacccatcggtacggtccacactcagatgcggttaaaatgtgtgatgagtggatgtgcaggcttacgacattccagtgtgcctcagctgacttggggtgaaatccaaacccctgacactggccccatccacctctccagctggatttgaccgtggccttggccacccatcgttgcagaaccaatcagcccaaagctcagtggatcagtagttcagatccggcactggatggtggcacaggccgcatgatttgtggggtctcaattgggaaggtaccaatggctaacgatggcagcatggcttggctgggctgtattttgggacctcagttccggctgtctgcagggttccttggtttttctgtaaattatgtcagctggggctggcttgtccaagatgctgtgttcacacacctatgggatggctacaacaggtgaggccggacagatctccctcccctcccccacctcacggcctcttcccacggctggcttgggcttcctcacagcatggtgggctcagggcagctgtacttcctaggaggtcactcgagcagaggctagaaggtgccttatgacccagcctaggaatcctagagtatttctccctcctcaagtcactgaggccagcccagattgcagagagaagagaaagtccacctctccgtgggaggagaatgacttggtgtcatcttcagactgcctcaatcattcttcatccagccctggattggtgccggggccacaccgcactcctccttacgacctgtgtgctggcagttccttacatggaacagactcacccaggaccgccctggactgcgtccctcctgtctgcccaactcagatccacctctgacaccccgtcccgagatagctacccccaccaccttgcactttctgtttcatttattgattcccacgatgccaagctggctctgctctcatccttgtttgttcttagaggtgtgtgtcccactccaggggggtgtgagttctgaaggggcagcgactttatcccacacgcagccatgtagctgtgtcaccaacacctggacatgctccatcatcgtcattgagagagggaggtgttaactgaagaaggacgaggtcgtcaatttggaaaggagcgctttacttctcataaagtgctgcgggctgagtgtggctgttctgactggttgggaggcgcagcctctggtaggaagctggaaacagacacttggagggagggaagaataaagcagagatctacactgag

SEQ ID NO: 914885 - DNA, 4001 bp, Homo sapiens
gcatggctgagacagcttggccccatggataaagtacatggcctagcgtcagaacacctgggcactagcacttctcagcttggccaaatcacttagcttctctgaacttcttcctcacctttcaatagacataacccacactaatatgacggatgtctggcaagagtcaaattagataactgtgaaggccctttgtaaactgtaacgtgttgtatattttttattatgataaagagacagagatgagagtcggagaggggcctgcccaagaactcaaagagggactgtgggatggtggatggttatggcccttgctacatgaggcctcaaatcacccagcagtgattaagcaccttctctgggtgttaggaacagaaatgagagccccccaaggagaaggtagagattcaggagagcagcaggcccagctctcccttccaagtagaagcttgtatcctttctcatacggcattaatccttcttgactcattccctgcaagagtccatattatgctttaagggacaatttcccactaggctacagctctcccagtaggcagggttattgttgtctctttctcaaaaaggtggaagtgaagtgagaggtattaggcacaacacatgcctaacacagggcaaaggaaatatgtgttcattgggtgtatggagaattgagaaccagaagccacccttgcttcccatacaaacgacattttcctaggcttaagcccttaatccaaaatacgttcactgaagaacgaactacttcccaagtaccagtgatataatctatttttgtgaccatcttccccattagaccgtgagctacctgaaacctttctactctctcaggtctactatatgttcaaatgtagaatccgggcttagagacgatcaaaaaaggagagtagacagcaacttgagacttcatccttgaatgtcaggccaggcagggcagggattagagtgtggggagaagtgagaatgcactaagaggaagagggagaatttaaaactgtacaggtctccccagcctaaccctttctccaaaggtatcagatctacagccaaattctcagaataggcatgtctccagctaaaggaaccctcaggccccaggcagactgcactgaggcaagccaaactcagaaccaaatgaacttcccgctccatttctcttttcccacaatctagccaaagctaaatcctctttgttgcttcccagacaatttcccacatgtcccgatgtcctcactgtatcgattaaatccttcattggccaattcaaaggccaccaacttccagagtcgtcccctggccctagactagcagcgaccttccttctgcaaccccagggactaagacgatacacgaattcctgattcatctcaggacagactaactcagggcctcagcttacccacccctaaaatggattcgcaaagcccactaatacacagaagacacaggaagctggggaagggagtgtttcccggggacctagactgaggatccttgaatctgaaaagttttgaaggtaggagcaaacggaagtggtgggagcgagccggacaggcggctgcctgcacaccccgaggcggggactgtgtagaaatctggggctttaacaggggtaggagcccggcttggcgtctcctctgtaatctgtcccctccaggcctccgtattcagtgagccctgcagtccggctgcccgtcctccgcaggtttctttctgggccccatgccccagtgtcttagccctcattcccgagccccgcctgccgcggccgcacctggtccgagtcctcgttctcgctgctgtagcagcaccccatggccggggtcgggccgggcgctcaggccgcgccgaggagggacggcgtccgtgaggagcccttccggtcacatgacccgcggcggcctcccgcaggcaaccacccgcccccaccccccgtaccccctgtcccggagccgcttggccgcctcagtcaataccccggcttccggtcccgcccgctagcgcgtgatcgttgtcaaccaatgggaaggcgtaaccgtacacgcaagcacgtgatgcggggaaagggcggggcggatcacatgacttcatctttccagtctctaaactggcagtagtggccatcgtgaattgtgttatgcgttctcgtggccactaggccacttttctgggccattgagcgaactcgtaccaaatgccctcgtatgcccttgtgatatactcttctaaatgccatgcgaggggcgactgggatccaggcctgatgctccagatcgtacggtctgggtgcacacacacagatgatccagatgaccagtacctagtcggggaacacagagggtgtatcgcccagctgggctgggggtgaatacacagagggtgtattctccacctgggctggggatctgcgacttacaggaagaagggaccttatactaccttcacatgctgacgcgcagcggagataaatcctggtagaggagatagaagccacctcactgacctctctgctttcaggcttttatctttaattctgccttttttaacagcacccattgtaatcgaacgcacaaagctgaccatcagttctcttttcctaacccccgctccatgtcttcccttgggccctgaacacaggtccaagtccgtccaagattgtatagtgatccatttgttgttcatgagcgtgtgattgggtgttcaccagcatgtatcaaatgtgccaccctcaaatcttgttttggcacattacccgtctgacataacaagagcctgacacctctcccactgcatgttctggggtgaggggtggaggggtcagcaatgtgtttcactggacatagagaaataatgtagtttcctgattgatctactggactttgtacatgcagcctggtctgcctactgtctttactgtcttcgagactcagtacaatgtcctcctgattaccttctctgactccattctctggacatgcccagctccctatgcttaatcctcatccagtgttaattcatgcatttattgaatcaacaaatatttgctgagcgtctactatgtgccacacattgttatatctggatatgcagcagttcacaaaacagccaaagtccctgtagtcatggaacatccaatagtgatcacactatattgtattctctgttcctgggtcagtctcacctaccaaacttgggagttcctggagcacagtgacaggttctgactcttccctgtagcccaaggcatggccttgcttacagaaaacttgcatatcaatgagcatgttacagtcaccccatcaccttggctcaccccatgccccatcttctgatccaaagtattggagaagtcaccagatctcatacctcttataacccctcaaatcaagaccctgaggttctgtaaatcttttgaggttcctgaagggtaggaggcagctcaagctcgtccctggggctggtaacttgaactgcaggtctcaggtgacagcagcagcctcagcatgaataattgaaagccattccagcctcctacctcagggttatcccccgcagcaggccctggactccccgacctgtcctgtgctctggtcctccagcccaggtaagcagggccctggattgtgggttcccaagctcaccagttcaagcccaccgcatcactcacctattcacacccatccatacactctttcatttttactccccgccatcaccaggggccttgcaagaaggccggcaaggaggtcagatctggatgaggaggagaatggtccaggacatgggaggagaggcccattccccataggtccctggagagaagagctgagtagagggaaaatgtgtgctgtgtgttatgtgtatgtacacatttgtgaagggaattctgagacagcacaggagaagaggggaatacagcggagaggagatggggctggagaattattaaagaatcaaagactcctcccatcctcagggaa

SEQ ID NO: 914886 - DNA, 4001 bp, Homo sapiens
gaactatatgattagtgctaaatgagaaagagcacatacagattatccagaaagctccagtgagtcttcattttctatttcttctctcatcactttcataaaggaattctcaatgagcaacaagttataagagttccacatcttctcccttttcctgtcattatttggctattgctgataatagagaaactctaattagactggtccagcagcacattaggagggttcaaaagccagacctgcttgcaagaaggtattcagagaggctgaggcagggatacccccgggaagggggctgggccagccacgcttttgcgattcctcaaagctggctccaaattgggcagcagaggaggggcaaatgagcccccaggaacttatccaacctggccaccggcataacataagctggagttgaatttcctgacaacccccactttccatgttggattgtcaagggaaacataacaccttaagcgagtttcctgtatggtccagcctggccacacatccgaagtctgcgggtgagtgccagagaccgtcagagctggaaggaggcccgcgggcctatctggttctcctgccttcaggaagtgtccttctcttctcatttgcaggaaggcgaagggtgggagggccttctgttccccgcgaccaaggacagagcccacgcagccctaacccaagcagctcaattcagcttcccacctcttttgccgccccgcccccatcctgaaaccaactttacattctttaaattagtttcgcaagccaggatgccagagtagaggaggttcccagtctcctctgtcccgtttggtcaagctgttggcacccgcaaaaaggatctgagaaaagggcacggatgttctccccccgacatgcagaacaactgaaagaagccagaagccagagcactttacctcctctgaggtccaaatccgaggctgcagtgacacaacaggaggaaggaagcagagagtcattccccggagtcaggtggggctcgtcccacactaactggagttctttcccgatctctaagcgctctcataccgggcgctcgacccagccatccaaccccgcagaagagacgaggagtaacaggcagggttcccacggcaccggggatccagcatccctaccccgctgtctctgcggccgcctcccggagcgggcggtaggcgggggccagctggcaagcctgccccgcgggggtggtcccaaggactgattcgatgcgtgtaaaggagcgggccgaaggggcacccactggggcaggtttgcccactgccccacctctcctacattctccaacccacccccataactctggactgggaacgggcttcgagcgttccaggacgcgcagggaactgcgcagctccgggaactggcgtgggtctcagacgccgtgcgactgcccccagaacgcaagagactccgaagggctgcgtctgggagtggggcatgggacggccttctagtcccatacgtggcgacccagaagagggtcagcagcagctggggtgcagtgagcccaccccggcaccagcccccgccccagcgcgcgcactcaccactcagcaggcgacccgtcgcggcccgcagccccaccagcagcacggccagcagcacggcctgtagcgcggttcccggcctcatggcccgactcgggtgcgccccccgacactcgggcgctacggcggtggagcgggctggcgggcagaggcgtgcgcgacaactgcaaccgcggcagcagcatctctaggccaccgacggaccgcacgggaggcgggggggagggcgcggagtcagtcggtcgcccctccgccccctgggacgtcactgcgaggagggcagccccgctggctggcccgcccccgacagcctcctccagcgaggttggcgccagacactcggccagccagagaggggcgagtcgcagaggggaaccagctccctgtccccctccgagcttccctgggagatcccgcgtttgcccgaggcgctgggcggaggaatacttcagtcgggcccctaggcaatctgataacgagcacagtgtgcctaaaactagcaccacatctcacccctcctctcccgctgaccttagccaagttcgccagctgtgcgggtgcacctggagagagaggcgatgcgtggactcctacctggggctcagcaggccgcagtcccagcacgaagggcgacgcctgagcagggaatggtcgatgcagagaacaaacactcacgcaggcagtgtgcccaccggccaggaaagttatgggacaccgcgcggatggcatccaaagaacttggctgagttggagccctcccgactgaaaggaaagcggcttctaccagaagccaaaagatgtcccagatccctggaaggaaatgattctgttttttgcagggaacaggttgggaggtgggggtcatagttagggagttcagctttggcccctcgccccgcaggaaagaatgaaactattatctcaggaaaagctttcctaacctagccctcaatgtgtgcttcctcttgtaaactcccaaagtaggtgtgtttcactttggtttcgtaaacaaaatgcttttaaatatagtcaagcaatagagtgagccatctgtccaaagattaaggcactaagtagcagaaggtgaatctgactttctgccttttctgccacaccatgctgctgtgaagcatagcagaagccccatctgggccacgacctctggattttggttccagcttgctgcttcttacgtactctttctgcttttcaaaacagccaagaaagcagtgatgcttctaaggcctctagccactgcaattctaaacaaacagcctgaatacaggctgggggtgagaggggagtgggatgaatttcagtatcagctgagactatgggggagctctgctgcggcacgtaacagctaacagcggttgtggcaggatgaggcctgacctttatggcaagatcatttatagaccttccttctgtcccagttagaatacgtcaatgtcacatctaacacactttcttcttagaaattcttggttatcaaaacaacttgagagaactgttatggtgaaaagaagcactggagttggcatttgagggtctgtttcagattctgctcttcatttaatgtctgtgtggcctttggcaattccgtttgcctaagtttcacttaactgttggtaacattaacagttgccttaagagtttagtgagtgtttgataaggcaaatatatatgtaaatgttcagatatctaggcacttaatgtcaattgaaaaggatttatttctaatattataacatctgctacaactttaaaaagctgttacataattaaatcgtgtcccgacttctcgctttgataccctggaccttggttcagatggattttgttagggtatacagtcaaccaaacctggtagattacaataacggccccaattctccacacctccctgtacccatatcctttaccatatgactttgtagtttctctttctaaagaggcagagtatatttccccacaccttgactttgtgtttgaccatgtgattgacttgtttggctaacagaatgagtcagttctgagcttagaccagaaaggcctcatatttctttttcttctctgccactctctgagaggaacataccttagatatcccactggtctatgtgtatccctaagaggatgacaaatggagcagagctacctcaggcaattgacaaacttgcagtaagagacagagctgctctaggtgctgtagcttgaagcagagctctctggctaagcctaggtcagccaaactagatcacacaaaactgcagatgtgtgagcagtaataaatgttgttttagacccctttgttatgcagcattgttgcagcaatagctaaccattacacttggcaatgtagggaggtatcactaggggaaggctggttgccaagaaagtccacaaagtagaattttt

SEQ ID NO: 914887 - DNA, 4001 bp, Homo sapiens
caatagacggcagatgggacttttgagagaaatcctgaatagggacagcagggaggttgggccaaactggagggtaagccagctgccagacacaggctgaggaagtactaacctgaatgtgctggtgaccttcaaccttgccaatttttcctctgtcccagagagggttgggcagcctgggactttctggatgctgggaggagcctgggctatttctagtccaaagcccatcctccttgcttctccctggcacaagggccatggtggtgattcttagagtgcaagatgattgaactcagaggagagtactgctgcccagtgcaccccacaaactgttcctttaatcttctttggagcctggccccttaagcaccgactgtgctaagcgattatacgctttcaggggaggggaaaatgcccaagaggtgagataggatctttatttctacttactccctggagacactgggatggcaacaagggtaggagacaagggcacctggattaaagccctgtgggccaagagttgtgataaccaacttggaatttcctgactcctatgcttactgatttttcccaacctggtatgtttgtatgttatttaatgaatatttatatggtgtttactctttggcaggagctgttttaattgctttacatataactaatttaattatcctaaaactgtgagacaagtactgttgttataagcttcattttctgatgcagaaaccggggcacaagaacttgcctataatcagtcacacagctaagaggtgttttcttctgtaaagcagaattcagtatgttacacgaatccagccttttagtggttgaaaacaaagcaaaacagccgggcgcggtggctcacacctgtaatcccagcactttgggaggccgaggtgggcggattgggcggatcacgaggtcaggagttcgagaccagcctgacctacatagtgaaactctttctctactaaaaatacaaaaaattagccggccgtggtggcgggcgcctgtagtcccagctactcgggaggctgaggcaggagaatggcgtgaacccgggaggcagagcttgcagtgagccgagatcacgccactgcactccagctgggcaacagagtgagactctgtctcaaaaagcaaaaaagaaaacgaagcaaaacaaaaagcaataccagccgggcgtggtggtgcacgcctgtaatcccagctatccgggaggttgaggcaggaggatcgcttgggccctggaagtcgaggcttcagtgagccatgatcgcgccactgcactccagccctgggcgacagagcgagaccttgtctccaaaaacaaacaaaaccacgcccacacactaacaacaacaacaaaaccaaaaaaaaacccaaacaataccaagtgtgtaccatgacgagaaaaggaataggttgtttgtaaaataaatgttaaagataagtaactattacccatttctccaaccagtatacttgactttgagtgtttgttccagagttgaggggatggagagggatgtgtatgtgtgtagatgccctccatgcgctgtgttgaaaacgcgcgggtgactgcaggaaaccacagagcacagctcgggcctctactgatcgggaaacgtcggaagacagaaaaatgggcaatcataaaacccacggcaaccatgaagacacgcactctccccctagcaatcccaccccggaattgaggacacagggtccccgcgctcagcccttggtgccagcacttcttggacacctcaaccccctcagctaaacctgagatccaagcgctccggattccaaacgtttcctcgagcaggtcctctctagccggccgcttatctatggtttctgctatagggcgctctagcctgcgccaaggggtagtgagaccgcgcggcaacagcttgcggctgcggggagctcccgtgggcgctccgctggctgtgcaggcggccatggattccttgcggaaaatgctgatctcagtcgcaatgctgggcgcaggggctggcgtgggctacgcgctcctcgttatcgtgaccccgggagagcggcggaagcaggaaatgctaaaggtagaagcaactggtagtcccgaggaagggtgggcgggtggagagccccggactggagctcctgcgaactccccttcctgccctcaggagatgccactgcaggacccaaggagcagggaggaggcggccaggacccagcagctattgctggccactctgcaggaggcagcgaccacgcaggagaacgtggcctggaggaagaactggatggttggcggcgaaggcggcgccggcgggaggtcaccgtgagaccggacttgcctccgtgggcgccggaccttggcttgggcgcaggaatccgaggcagcctttctccttcgtgggcccagcggagagtccggaccgagataccatgccaggactctccggggtcctgtgagctgccgtcgggtgagcacgtttcccccaaaccctggactgactgctttaaggtccgcaaggcgggccagggccgagacgcgagtcggatgtggtgaactgaaagaaccaataaaatcatgttcctccacccagaatgagccctgcagtcgacacctaccaatgcttagagacgcgtggtcggtgctgggggcgcggcctggagctgctgcctgtcccaccccaccagaagaggctgatcccgataggtatctgaccacattttttttttttttttttttttgagacggagtcaatgtcacccaggctggagtgcagtggcacgatctcggctcactgcaacctccgcccctgggttccagcaattctcctgcctcagcttcccgagtagccgggatcacaagtgcgcgccaccaagcccagctaacttttgtgtttttagttgagacagggttcaccatgttggctagactggtctcgaactccagacccaggtgatccgcccgcctcggcctcccaaagggctgggattacaggcgtgaaccacctcgccctgccgcggccacattttttcttttttttgagatggagtcttgctcttgtcacccaggcaggagtgcagtggcgcaatcttggctcactgcaacctctgcctcctgggttcaagctgttctccttactcagcctcccatgtagctgggattacaggcgtccgcaaccacgcccggctgatattagtagttttagtagaggcgggtttcaccatgtggccaggctgatctcgaactcctgacctcaggcagttcacccgtctcagcctcccaaagtgctgggattagaggcgtgagccactgcgcccggccaaccacattttcaaaacaggtcatgtggtgtcaggttggagtgtacttccagggataaccgtgggacattcttgaaatctgaactatcctgggaagtcttgaagtaatggatgcctatagtggacactcaggactcctgtccttggagcgagattggaggggcatctagcacttaacatatgccacaatgctttctgtggccattatttaacctctggttaaacaagcttaggaggctgacttactagtagtaaaaggagtgtgctttgagtcacagatcctggttgaactccagcatgttacaaacctcagccctgttctatgaaaggtcataactacgaggattattgtaaaacattaatttagaaatgtaaagtggtccccaatctctggatctggtcaggatttattggagctgccactgaggggattaaataagtggggtcaaagccccacagcctagtcaaccaagttgctcctcttttgtctatcctgtggttcccaagcaagactgcaattgaaaaaaaggctgctgttattaaagtcagaacaccaaataaagctttttttttttttttgagacagaatttctgtgttgttgcccacgctggagtgcaatggagcgatctcaactcaatgcaacctccgcctcctgggttcaagc

SEQ ID NO: 914888 - DNA, 4001 bp, Homo sapiens
acaggagcctgcggtgatccgcgcgcatgcgcgctttgtggctctccttcccgctcggaaaggtgggcggaaatcagactaattgctgggtcctccgaacgcccggcttttacgccccgcccaagtccggaagatgggcgggcccaggaacttgtgcgcgtgcgcatgcgcattacagcgcgcagggcgaagccgattagtctagcggcctccggccgttgggaagcgggcatcgggccagaaggcagaaggctgagaagccccgcccgtaagcagaggcaatctggagctatgcagctcagtgggtgagagggagggagctgggattcagacttcagacctaatgaatgccccgaagcagacgccagcaacgtgaagcctagctggcagcctcccaggtctggcgcgcagccagcgccagactttaaatcgcaatactagaaaccagggcctgttaaccaaccgggagggaggcgcacggtgtggcttcggccgtgatccttgttgcaaaggcctgtcaggcccagtatgaagaaatagtttcagtacagggagtgtagaaatagctgcagaaggcctgaggcctgcagccctagagttaatagctacttggtggaaccctcgaattctttccaccttgttaatccaaccctgcactgcattcgctggaggaaatatcacaggctgcatccccaaagtatcacgtctagttttgacaccactccaaagggcaaaaatccgagaggacctctaggcaggcagtcagcccagagtcaccaagctggagccgggtctctccttacaaatcactgctatttctagacagccttgtaaggtttctagcctggcagggggaagggagttcctgcggacacctgctagcttcactgaacggccccgggatccaatgctacctttaatgtaggggcggaggtgggagggcatgggatgagggaagggtgcgtctagaggcgagagacatgcaaaaacgagttctacacctcacctctgcctcctactcactgggaacttagagatccctgactgtctcctagctttcggtctccctatttgttaaaaggaggagttggtaccggcggatcctactcaactgaccgtctgaggtgcggaagggctgggatgctgcctgcttcatctttgcatgcgccgtgcctagcgcagcccgagatacaccagtagcttcttaataaatgcgcaaagggctccctataatctgcaggcagcagctgccctcacggagcccacctctcgagcgtcccaagagaaaaatgcaagccgcgtggtactcagccgctttccgtctttcaagaacccgccccggacaagctgaggcttttttggctctatgggctccgagaactggacctcgagttttgcaccgcccgccgatttcgagcccagaggtatcccccacccttaaggcctatcatatccttgttccgcatccacccgggctttcgacccctgcttgggtgcggccacctcctcggttccccagcgtggccagaagccatggttcccgcttagagcaaaagcagagcgcggcgagctccgaacacatgcgttgtgtgggccgccgcccagacgtctctgggctgtgcttctggaaagcggctcctacacctcccgggagcaggaatcccttcgcgagcagcggaggccagcagaaccagaggcagttggctctacccgcccatccctctggcgccgtgcgcgcagggccctaccgtaccgggaatgcacgtcgggcggtcgtcgggggcgcgtggcaatgagatccggaatcggcggcagcggctgcagcactctgagctgggcgcgggaggggccttaagtggaacagctatgctgacgtcagcggggggggccggcggacgtgcgggaacccacgtgtgagtcgggctgggggtggatgccgagccaggcggggcactggagaggcccgggtggcgcgcgcagccagacaaccgaccggcagactgctccacgtgcgctgggagtctaagtaaggtgctgccctccaaccacagaagccggggtcggagccatgagcctgagtcaggacgaccttcagtttcctcatccatgaaacctggggaggttactctcaggaaggcttggatctgtttcttcttcatccctgtttctcagtgtccagaacagcttctggcacgtaataggcactccacaaatatttgttgaacgaaaggaagaaaatgcctagcagtcagtcagtctgttcttacctaagtcgagtgacctccaaaactcgacgctgcttttccctctgctgctaagcctaccagctcccactcacagtgaagccttggcctctcaggccttgcagggtgactcagttcaaatgtacattttattctgcactttctactgcccaccccactggcatctcatctcgagtctcaaccatacccaagaactgtcagtggcttgtttttttggttttggttttttgtttgtttatttgttttttggtatttttcgagacagggtctcactctgtcacccaggctggagggcagtggcgtgatcatggcttcctgcagcctcgaccttctggctcaagcgatcctcccacctcggctccccgaagtgactgggactacaagcgcgcccacttgccctgcgattttttttttaattattaatttttttttttttgaaacggagtcgctctgtcgcccaggctggagtgcagtgggctgatctcggctcactgcaacctccgcctcccgggttcaagcgaatctcctgcctcagcctcctgagaagatgggattacagccaggcgccaccacgcccggctaatttttgtaatttttagtagagacggggtttcaccatgttggtcaggctgatctcaaactcctggcctcaagtgatctggccgcctcggcctcacaaagagctgggattacaggcgtgagccaccgtgcccagctcaattttttgttttcttatcatacttacctctgggcctgtattcttgctgattccattgcctagcccgccctcctccatctcttctttaatttgtaccaatacttccccactgtggggtatattatgaaatatatttggtaagcccttgagtatgccaaaatttcctgaattttctgataggaatgtcttttgttatttataaagagcctttttccctgacttaatgttaatgaatgaggagtcttagatagcctcaggaaggagccagtcatgggaaagaccaaatgattagggaattagagggctggaactttcagcccaaaggggtggatggctttacttactccctgaacctacagcagcagcccagtgcagctttgagatagatccataactgagtttcttggttttgacggaaaactctaacctcagctccaaaatagcacaaggggccaggtgcagtgactcatgcctgtaatcccagcaccaatgtggttgaggtgggaggactgcttgaggccaggagttcgagactagcctgggcagcatagtgagaccctgtctcaaaaaaaaaaaaaaaatagcagggcatgcttgcatgttctaacagttttcccatcactctagattctaagatcactctaggttctgaaatggggctctcacctcaaacacacagctggaaagtttaggggtgggccactgattcttcagagtacctcagggcagggcagattgccacagtgttttccggtttctcagtctttgcaacagtgttctcagtcagggctgggcccctgcctgcctaccaaatgtgaccactgctgctgggaagaggtgtgcagaaggcagagagctgaagttggctggggagacgaagaattttcacctgaaaggcttgggttggggcactctgagatgacctgtgaagataaactaggtagagtcttcattcccctaatttatgatacctagcaacagcttgctccaagcacagcttcaggcttcttaggcagaac

SEQ ID NO: 914889 - DNA, 4001 bp, Homo sapiens
caaaaaatatccttatagttgcaactcaaagttcataggtccatttcaggccaggagcaccaataacagctttaatacaactggatgtggtctatcgttaccaaaagttattcaagctgcagatctatccctaaatcatccacaatataatgagtgtcagttactcttcttacccacacctgagccagaggccatcacagagaaaaaacataggcggtttgtaggtgtggggaaaacagcatcaatttctcatctagtgggtaaggaataaaagttggtgtattatgtggcctttcctaagaacatatgtagagtcacctgtgttgttacgaggccttttcatagctcatttctgtctttagtcccttctcacttgaatccatttctatttagaacccagaattcatcattttacttttattagacactccacatcttaacttcagatttttttttttgagatggagtctcactgtcgcccaggctggagtggagtggtgctatctcgggtcactgccacctccacctcctgggttcaagcaattctcctgcctcagcctcccaagtagctgggactataggcgtatgccaccacgcccggctaattttttgtatttctagtaaagatggggtttcatcgtgttagccaggatggtctccatctcctgacctcgtgatccacccacctcagcctcctaaagtgctggcattacaagcatgagccactgtgccccgcctcagacattttaatgttgtaagctgcctcaatttcttttaaatataaatcagctttcaatagtgtaataaggagtgctttactcacaatttcttttttctaattaaattttagctccataattgataacaaaattgctatccaaggcacaggggcaatgagatttgagtgggagaacttatgatttcccatataattttaccaataaatgacaatttttgaattgtcattttcaattcaaaaatcactttaaaagaattttggctcatttaaaatcatggacccttccttttcattggtagtcaatccatgcatgttaatacagaataatgaattttaggaactgggtctccagcctgacaacctttgattctttttaatttcagatacacttttggtgtattatcatatttcaaaagtttgtttcacagaaagttatccgaatgagtgcataaatctaaatactgttacatgaaatgtaataatacagttctaggggtaggagtgggggtagaggatggggtcaaggtatgggcttccagtgtggtagactctcacttaccttcattaagatactgatggcacaggccatgccaacagcaccaaccccaacaactgtaatcttattctggggggtctgttcttcctttagaagattataaatcagctgatcctttagagttgccatattggacttggaaccaaaaggaatctataggaggaaaaacatttagtgtcactacagcttctttaatgtttattaaccaagagatttttttaagctattttacttcctttgggggtatttgccactataaatcactagagatgactaaaaagggaggggaaaaaacctaatggttgccaaaagagagttgaaaggcctaatgacagggtctgtgaagagtgaaggcccataccttagcgtggaaaaggaatatcgacgtttgggtgtaagtatagcctcctgagggttcacccatcgcggtttattaaccccaagtggggctggcctttcctcagacaagatcactctgagctactccggctcctacagcaaggacacagccaggcttctcaagtaaacaccagagatacgtgcagaaaagccattaactgccacaaagctcaagcccaaggcacaggagcctgcggtgatccgcgcgcatgcgcgctttgtggctctccttcccgctcggaaaggtgggcggaaatcagactaattgctgggtcctccgaacgcccggcttttacgccccgcccaagtccggaagatgggcgggcccaggaacttgtgcgcgtgcgcatgcgcattacagcgcgcagggcgaagccgattagtctagcggcctccggccgttgggaagcgggcatcgggccagaaggcagaaggctgagaagccccgcccgtaagcagaggcaatctggagctatgcagctcagtgggtgagagggagggagctgggattcagacttcagacctaatgaatgccccgaagcagacgccagcaacgtgaagcctagctggcagcctcccaggtctggcgcgcagccagcgccagactttaaatcgcaatactagaaaccagggcctgttaaccaaccgggagggaggcgcacggtgtggcttcggccgtgatccttgttgcaaaggcctgtcaggcccagtatgaagaaatagtttcagtacagggagtgtagaaatagctgcagaaggcctgaggcctgcagccctagagttaatagctacttggtggaaccctcgaattctttccaccttgttaatccaaccctgcactgcattcgctggaggaaatatcacaggctgcatccccaaagtatcacgtctagttttgacaccactccaaagggcaaaaatccgagaggacctctaggcaggcagtcagcccagagtcaccaagctggagccgggtctctccttacaaatcactgctatttctagacagccttgtaaggtttctagcctggcagggggaagggagttcctgcggacacctgctagcttcactgaacggccccgggatccaatgctacctttaatgtaggggcggaggtgggagggcatgggatgagggaagggtgcgtctagaggcgagagacatgcaaaaacgagttctacacctcacctctgcctcctactcactgggaacttagagatccctgactgtctcctagctttcggtctccctatttgttaaaaggaggagttggtaccggcggatcctactcaactgaccgtctgaggtgcggaagggctgggatgctgcctgcttcatctttgcatgcgccgtgcctagcgcagcccgagatacaccagtagcttcttaataaatgcgcaaagggctccctataatctgcaggcagcagctgccctcacggagcccacctctcgagcgtcccaagagaaaaatgcaagccgcgtggtactcagccgctttccgtctttcaagaacccgccccggacaagctgaggcttttttggctctatgggctccgagaactggacctcgagttttgcaccgcccgccgatttcgagcccagaggtatcccccacccttaaggcctatcatatccttgttccgcatccacccgggctttcgacccctgcttgggtgcggccacctcctcggttccccagcgtggccagaagccatggttcccgcttagagcaaaagcagagcgcggcgagctccgaacacatgcgttgtgtgggccgccgcccagacgtctctgggctgtgcttctggaaagcggctcctacacctcccgggagcaggaatcccttcgcgagcagcggaggccagcagaaccagaggcagttggctctacccgcccatccctctggcgccgtgcgcgcagggccctaccgtaccgggaatgcacgtcgggcggtcgtcgggggcgcgtggcaatgagatccggaatcggcggcagcggctgcagcactctgagctgggcgcgggaggggccttaagtggaacagctatgctgacgtcagcggggggggccggcggacgtgcgggaacccacgtgtgagtcgggctgggggtggatgccgagccaggcggggcactggagaggcccgggtggcgcgcgcagccagacaaccgaccggcagactgctccacgtgcgctgggagtctaagtaaggtgctgccctccaaccacagaagccggggtcggagccatgagcctgagtcaggacgaccttcagtttcctcatccatgaaacctggggaggtt

SEQ ID NO: 914890 - DNA, 4001 bp, Homo sapiens
agcaaggtggctcacatctgttatctcagcactttaggaagccgagacctcctgcttgaggccaggagtttgagagcagcctgggcaatacgtggaggccccatcaaacaatcaatgagtcacagatgtgttggttttcacgtgtgtgtattcttcattagcagtgaggacactgctgataaaggcattacaataggtaggacaaaatgaatcatggggaatttgtatggctggcaggagcagcagttggctgtggctgctgtccttagtgccataaggtcactatgtcatctagatatgaaacccagaggcaatcctttaaatccaatgactcatgccaggattaaaggttatataaaagatggctaaaacattttacagatatttcattaataaaagtatagctcagagtgtcttatgatttattaaaactttatggtaataaagttcatatcagggtaatattcttagaaaggggtcagaatctttttttggcctctgtctatagccataaaactttatcagctgtatcaatactaagaacagctaaacactaaaactaacctaacatgaataaggaacgaagggaaataaagatatacagactaggaaatgggagagagatatttaaatgaaaaaagattattgtatttggtactcgtaggctgcctaccatcactgacacgcttgtatactcttttctgccacctatttctctccagtttgttttgtgagctgagtttccaaatcaagcaaaggggtacctcatattgtcattacgtgaaagtgaaatgtcaacatactttcacagagatgcttctaacccacatgatatcatcatacaatttttaaaaaggagcgccctctgggtgaacaactaaaaaaagggcaccttttcctctgatgcccctcacactggctccccactcaccaccttgaactggacacaacctccacaaccatacgctgtggcctcgcctccaactgaggtgaaccctgtggtgcagagcacacaacttacttttaataagatgctgatagcacaagccacaccaaccgatccagttcctacaatggagatcttattgtgatgaatggcctcctcttccgcgaaattcttaataagttcactcttgatagttgccatcttggaaacctaacagtgaagacaaattgcacagccatttccaagacctggaattggaaatggcttggaattccaagacctgcggtgagagcgcgtatagagaactcctgggcccgtgtggaaggaggtgctgcagacacacaaaagaccgacaaatctgaccagcaaagaagctgggtaggttctggccaggcagctcagcatccatgaagcggaccaggggaaggagaaggaagcgtgagtacagttaagaggaattaagagagagagagaggaaaggaacaggggttgctccaccaaacatgaaactacagctgggacggcactccgtcccgcagctgacccccttttctctcccctttaccctgctgttcccccaacctccagttctcagctccaggactgcgcccggggtccgcaggtccaggtgagaggtacttctggccacactcacaggggtgaagggccacccgcgcccgagcaggtcacatgccgcctggcggagacacagaaccatccttgggcaaaaacaattcgctcccgcggcgcccgctctctggctgctccccaggactcttgcagcccagctcatggccactcactcaagaggtgaagaaagagaatggaggaaaatggcgttaaagctcatcgaggcacgaaggagatgaaccgccgactaacagacgccgggtcgcccccttactgcagctgcgcggaccgcacccagctcgtgcaggcatcgcaggtgtgatgcttggcaggtgtgatgcttggcaggtgtgatgcttggcaggtgtgatgcttggcaggtgtgaggccggaagcgggctgcgaagcaccgcgcctgcgcctctgcctgcccgccccgcccccgcgtgcgggtgggcgggctgcggtgtaggtggttggccggctgcagaaggcgcacgaggtgctgcaggcacaacgcagtgcagggcctctgctgttgggcggagttgtttgcctagaacccatccaccagagagcccaagtaattttatttctaaccaaaccttgtctggatgtatctgaaaaggactgtttgactctcacgtgaaaattttcccccagccctgtaggagaaagggacctcaagattaacttttaccacctcaaatgtgagctaaagtagaaaaagtaaaattttaaaactctgggccgagcgtggtggctcacgcctgtaatcccagcactctggaaggccaaggcgggcggatcacctgaggtcaggggttcgaaatcagcctggccaacatcgtgaaaccacgtttctactaaaaatacaaaaattagctggacgtggtggtgcacccctgtaatcccagctacctgggaggctgaagcacaagaattgtttgtgaacctgggaggcggaggttgcagtaagccgaaattgtgccactgcactccagcctgggtgacggagtgagaccctgtctcaaaacaacaacaaaactctgtatgcaaaaggaatttggaaataagatatgaaacctgaagaatttgatgaatgcagtgccaattgataaccatttttacaagatgaagggaaagctcaattcattattaagtggttaaatgtagaatccacactttgggaggccgaggcgggtggattagctgaggtcaggagttcgagaccagcctggccaacatggcgaaaccccgtctctactaaaaatacaaaaattagccgggtgtggtggcacgcacctgtaatcccagctactcaggaggctggggcaggagaatcgtttgaacccgggaggcggaggttttggtgagccgagatcatgccactgccctccagcctgggtgacagagtgagactccgtctcaaaaataaaaaacaaaaatgtagaattgaaaatcagtctggaataaaccaaggtttctacttctcccaccacattttacctaattgttttctcatttgtgaatcataatacgtaattttgatggttaatactgagtgtcaacttgattggattgaaggatgcaaagtgttgaacctgggtgtgtctgtgagggtgttgccacaggaaattaacatttgagtcagtaggctagaagacgcaaacccaccctctatccgggtgagcaccatctagtcagctgccagcacgtctaggataaaagcaggcagaggaacgtggagggactagactggctaagtcttccagccttcatctttctcctgtgctggatgcttcctgccctcaaacattggactcctagttcttcagctttggaactccgactgactttcttgcttctcagcttgcagacggcctattgttgtgggacctcaccttgtgattgtgtgagtcaatactcctcaataaactcccctttatatatatagctatcctattcgttctgtccctctagagaaccctaatacagtaatacatattgacaaatttttataaaatgtagagcagtgtttctcaatcttttttcattatcactccctcaagagtctttgtagatatgttccccctaattgttttgcacccccatcatgaaattaaatattaaggagttggccgggcgcggtggctcacggctgtaaccctagcactttgggaggccgaggcgggcggattgcctgatcttaggagttcgagaccagcctgggcaaaacggtgaaagcccgtctctactaatataaaagaaattagccaggcgtcagctactcgggaggctgaggcaggagaatggcgcgaaccggggaggcggagcttgcagtgagccgagatcgtgccactgcactccagcctgggccacagagcgagactccgtctcaaaaaaaaaaaaaaaaaaaggaaag

SEQ ID NO: 914891 - DNA, 4001 bp, Homo sapiens
aaccagacctagccaattgttccatcctttccttctggtcacagaaatcagttcataagtggacatatggcccaggtataagaaacaagcatgtctatgaagtttgaaaatggaagacggaagattacatctcacttttctttggaatcataagctctaagaataacatgcaaatctaagaacattagtaaggactgtagagttggagaaaaaacaagaatctaagaacaaactgtacagccatctttaccaccacatagaaaggctctacgaattaagccaacagagaaaatctaaaccaagatatacaaagactatgtcttgatatgtgtgaacttcagaatccggtagtacctgaagcagttttgccctatttccagttacatgaacaatatttcgtctttttctgcttaccctaatttaaactgggtttttgtcacatgtgacagagtacggaactatatacaaggagtgtattcattcagatttcaatagccagattccaaaagcgaacagtaagggaaagaagtaaaagtccctacttaaggccaggcgtggtggctcatgcctgtaatcccagcactttgggaggctgaggcaggcggatcacgaggtcaagaaatcaaggccatcctggccaacatgatgaaaccccgtctctactaaaaatataaaaattagctgggcgtggtggcacatgcctgtagtcccagctactcaggaggctgaggcaggagaactgcttgaacccgggaggcaaaggttgccgggagccgagatcctgccgctgcactccagcctggcaacagagcgagactccgtctcaaaaaaaaaaaaaaaaaaaaaagagagaacaataaacactggggactccaaaagcagagagggaggagggcacaagggttaaaaacaatacctattggcagccaggtgtggtggctcatgcctgtaatcccagtactctgggaggccgaggcaggcggatcacttgaggtcaggagttcgaaaccagcctggccaacatggagaaaccccatctctactaaaaatataaaaaattagccaggcctggtggtgcatgcctgtggccccagttattcaagaggctgaggcaggagaatcgcttgatcccgggaggtggaggttgcagtgggccaagatcgcgccactgcactccaacctgggtaacagacaaatcctgtctcaaaaaaagaaaaagaaaaggaaagtcagaaaaaaaaagaaaggaaaagaaagaagaagtttaaaaaaaaaggaaaagaaagagagaaagaaaaaggaaggaaggaaggaaggaagggagggagggagggagggaggaaaggtcaaaggatacataattgctttcaagggattaaccttgcaaccctgaatacatcgacatatacaacactctgaagtgctcacttgattttcagccacaggatgggcttctcactcaccttcagtaagatactaatagcacaagccatgcctacggcaccagttccaacaatagtaattttacactgggagttttcatcatcctcaattagcttctcaattagctgctccttgacagttgacatttggagaacctgatagggataatgcaatttcattggattaaccacactgaacatctaagaaactacctcttcagtttgcagaatgttggagccggggatggggggaagccaaagaaagaatttcctggtcaaaggatgcggggagggtaaagcaaggcccagtctaccaggcaatgggagggctggggcaccagcgggcttttggatttctccctgcccccagccaccactttcaccccagcaccacacgctcacaaatgctttgcttggcgcaatcagtacagatgacccacagggacaaagcaccacctttgaaggaaggcacagaagtgacaccagaaaaatacaccaacgacagttgaggcgctaagcccgtcgacggttgccctccgtgcgactcgagacacgcacgttcccccgctcggctcttatgcgtcagcacgcaagctccgccccccgccggcccaggcgcgggcatggggcgtcttttctgccctggagcgcagtgtgggtggcggcggtccagatcaccgaaatgctgatgggaagaattctagactggcccaaagagtgtgcaagacggggatatccatgcattgtttgcaggattttaaaaaattattaacttctgtaacttcaggactgagtgctgaaataaagttagaatttctcttgagagaacagagggtggtaatgaaacgcaaagacgcgaaggatgctttcaatttacagcaagaaattgttaatatttataactcatggccggacgcggtggctcacacctgtaatcccagcactttgggagtccgaggcaggtggatcacctgaggtcaggagtttgagaacagcctggccaacatggcgaaaccccgtctctactaaaaatataaaattagtcgggcatggtggtgcatgcctgtagtcccagctacttgggaggctgaggcaggagaatcgcttgaacccaggaggcggaggttgcagtgagccaagatcgcgccactgcactccagactgggcaacaagagagaaactccatctcaaaaaaaatttacatatatatttttttttttgtgagagagatatatatctcacagaaggggacacaacctactccatcttttgtagagtatttgcatttgaacctttttcaaaatccaaaatataatttatttttcttataatagcctgtagtgttgttattgttgttgtttttgagacagagtctcactctgtcgcccaggctggagtgcagtggcacaatctcagttcactgcaacctccgccgcctgggttcaagcaattctcctgcctcagcctcccaagtaactgggactacaggcgtgcgccaccacgcccggctaatttttgtatttttagtagagatggggtttcaccatgttggtcagaatggtctccaactcctgacctagtgatccgccctcccaaagtgttgggattacaggcgtgagccaccgtgctgagccaccgtgcccagccgccgggcaaatttttttgtatttttttgtatttcaccttgctggccaggctggtctcgaactcttgacctcaagtgatccacccacctcggcctcccaaagtgctgggattacaggcgtgaaccaccgcacccagtcagtatttgttttcaatatggttcagattatgcaataaccctgctttaaactcttccgtggctttccattacaggtagagtaacccacttttaccacaacctagatcttcaagatttggcctcctacccccacttcccatatcatctcaggacactcaatacacttccttccaactaggctttggacagcttttttggatcaggactttttgctgttctttaaaccaagaaagctctttccccagcccttctcaaggttaattcctcattttcagctttgcacatacatactctggctttccttgacaaatgtcaactaccatcatttcctgtatatctctctcttatggcacttttctcaaccagcaactagcctgaagctagaggcctcctatagcagacaggagcagcaaccacttggtcctatacctccacagcaacctcatttatccccgggctgagagggagattgctggcctggatggactggaaatttaagctctacacctgcctcaggcccctggcggccaaggaaggtatcagcttggtagtggccaaactgatgctagatgactagaactggctcttcatccatgcctgcccaaatactccaaacttacttaacattttgcttacttgattgcagtaactttagaaccaaaatttgtctttatttattcttgtacattgcaacatttaccaaagcatagtaggtactcactaaagaatttttgggccagacatggtggctcactcctgcaatcccagcactttgg

SEQ ID NO: 914892 - DNA, 4001 bp, Homo sapiens
cttaatgtaacatgaaagatgcacacactccaacctgcctagatgtttctaaggcagcaactctaaaggtaattcaaagcccacagataatggaaaacccaccagggacagttggactattcctccccctatccgtctgctccttgctatgaccattttatttattttagccctatctcagatgtacacacacacattaaatagccactgctgaccagagagggacaaaattaactttacaactatttttacagagatggagactcaactaaagcaacccagtaccaactgggagatgcaataaataagtttccatttggctacagtggctctcccaggacacacacaagagccagcttccatactgtccttctcaggtgctatgaggggacacaccacagctacacagattgaatttgtgaatccaaacaggtcttcatatctgtagacgccctgaaaatcgacctgctctaacagcctccaaacaattcacacctgctcctggctgcccaatgtcctgtgagaactctctccccaggtggactaatttaagggcactctcacccagacctggttaaaaatccacagcagtcaccaggaggtctagtccctccctggaagcccagcaaacccataagcatctaaatggggtatcagaggagtggagatgatgtcatgggtctgagagcaggaaaggctgcccagtgggctgtgaggatgcccaggaccagggacatcaaggaagagaggagatatccctttaacgcattcataactccaaggcacagctaagaatgaagtgagcctcaacttagcaaacccacaggccaccaaagacacctcgacagccaagctgctagaagcacttggcaaaatagggcagctattggacatgtggatggcacaaacaccaggcaggcaagattctgctgaagaaagttcactgggccctgtcacccacattctaggcatcagatgcccagaaataaacgtcaaggggccaagggcgggcccagtccaggagggacagctgacagctgtgggcggcgggcaggggcagaggaggaagggctcccaggctggaattcggatcatgcccacatcagcagaaaagttcctgggaacagcacgctgtctggaagggaaagaggcttgctgcggtccaggccccgggatgcacacgcggtggtgatgccaggttcaaagggccgccggatgaagccccgtgtcctctcccagggcccctcgccggtcagggcgcccatcgcggggcaagtagggtggtcagacgtcttaaataaagcttcggttcccaggatcagtggggaaaaatgaattcccagatccggccttgcttcaactcactttacccaaaccaaacagtcccagagaggaatgaaaggaagcagctttgctactccctccgcggtgcaggtggggaaactgaggcacggagtgcacgccagagactcgggaagaggcccagaggaggctaacgcagccgcgcgcgaccaggcgtctgggaagatgagaccagggaagagttctctcctctcctctcctttcctttccccgcctccgttcctcaacacacacaacacacacacagccacactcgagctacgcccaatcggggcagccgccgggctccccagacccggactgcacacagagccccgcccgcgcacacagcacaacacgacccggcgcgcacgcccacacaataggacggctcgcaccccgcggcggcccctcggcagggtccgggccagcccggcgccggggtccgccctccgcgctcacccacgcccggagagcggcccgcgcccgggagaggacgcgatcgcacccggccgctgcgccccgcgccccgcgccccgcgccccgcgggaagttcgccggccgccccccgactcacccgcggcgctgctcagcagcaggcacagcggccccagcagccacatggcgcggccgccgctcccgctgcccggcgtcgttgctgcccccgcggcctcggcgctgaccccgcccctcgccgcgccgtccccgccctcccgcctggccctcctccctcccgccttccccgggcccggccccggcccggctccgctaagttttgcaagcgcctgggctgcgcgtggccacccgcatgttaccctgggtgtcctgactccgaggggccgccgagcgcggcggagggttcagcctttcggtctctcagcctttcagcctcccaggtctggccgcgaggatcttctaacagcctgggctctgttctctgcttccttttgtccctctcatttctgcctttgcttccacacccagcgagatgcagcgcccagaccaaaacttgagttctttactcaaactacaaagtgagtttactaccgagagagaaaaagttaaaataaagggtcaaatcttatgagaaaattgtagtatatttttagtagcgagtgtggaataccagtgcttctcaaactttaatatgcatccggcacacttgacgatcttgttaaaatactgactctggttcagtagatctggcgtggagcctgagattctgcatttttaacaacatggtggctgattccaaggctgatgatccgggagccaccggtaagagcagctgacacctaccatgcacacagcgtggaccacatgagttattttgtctgcatagtgtccaccttgacctgttgaacgtttgggacccaatttggaaaaaataaaattaaaaaaaggaaaaggtcatgaaaggcagatacccaaatgcaaaaaatatagctgcaccaatgcacttgcttccagagggcactggtgaaaagccccaaaagacttagatggtggaagaaggggatgacacttctgtgctccactctctctgatcccccacccaaaaaaagcaaaagactaacgcaaataattgccaaaaactggaaacaactcaagtgtccatcaattgataaatggatcaataaattaaaacttttgggggcagtgggactgttctaatcttgattatagaggtagttacacaactgtatacatttgtcaaaacaatagaactgcatccctaaaatccacccctcaaaagggttgagtttatttacacaaactccacctggctgaaagaaaggggaaggtatgggtacaggggcagttataaaagggatgcctgcgtcagattttgggatgccctggagacaccctcaagggtgttaagattcaattactttactctgtaattgcgtgctgtagtctggaaacataaaggctaaaaaggatcaggtcaaaatttaaaaataccaatgattgttcaaggtaatgagaaaatgtgatgtgagggaggaaaggttaagttccatagttcatagtacacatggaaaatataaatcaattatctaaatgatttggcattcggggcttttatcctgggattgatgaatattatggagatcgtcccatgggcttcaaagaattttaaagcccttaaaattttatgcaaaatgtcctgtgcatgtgggtatgtgcattgttccgggaagcttgttgggaagaggcctcctgcctttgataataatatctgaggaggcaaataagcaaataatttctcctacagctgctcatttgcctccaaacattagggatacggaaagataatgcaactgacccactgctatagttcttatttccttaggtttctttggacacatcaacttccttactttgcaagtttgactctgactctctctctcgttctctctctctcacatacacacaggcacacacacttttaaatataaatatattaatgtctttgaaatcatttggactaatgtaaaaccttatttaaggtcaactgttgtatttatttatttatttatctatttatttatttatgaaacagagtctcactctgttgcccaggctgggtgcagtggcacattttggctcactgcaacctccgcctcccgagttccagggattctcctgcctca

SEQ ID NO: 914893 - DNA, 4001 bp, Homo sapiens
gtagaagttacctgggctgggctctgtggctcatgcctgtaatctcagcactctgggaagctgaggcgggtggatcaacttgaggtcaggagttcgagaccagcttggccaacatggtgaaaccctatctctactaaaaatacaaaaattagctgggtgtggtggcatgcacctctaatcccagctactcaggaggctgaggcaggagaattgcttgagcctgggagatggaggaggttgcagtgagctgagatcatgccactgtacttcagcctgggcgaaaaagcaagacttggtctcaaaaaaaaaaaaaaaaaaaaaaaaaaagaagttgcctggccttcctaaaatacatcatacagttttacaacttcctgccttttctgggctgttcctcctgtctctttccaccctgactctttccaagcatcatccacttgggttccttggattattcctttcttcccctgagctcccagggcattttgctcatgtggctggcttggcccttggcttagagcgactggttggcttttttccctagtttataagcccctcaaaactgaagccttctctttccctcctgtaggctcagtgcctcacctgacgccgtgagggctctgcatagatgtgtttggaatgaatgtgagcaggatggcaggtacataccagtggtatcacaggattggccttcctgtgttgctctctaactcccaacaacctttaggaacccaaaccacctagaaaaaactgaaaaccaccaggatggccctccaggtgcgagctctcagcctctaaagcaaggagctgccgtaacctgggcagctgcttcagcccattcctcaggcacctgagaagcatgggagggaggcttgggatgccagcttggcaagctcagctggttggttcagcagttgatcacttcccattcccaggctccctccaggcctgtaattaactgagtggatgcagctctcatgggaggggagggccaagtaagggaaagtgataattaatgctcattagtagggggtgtctgctgggaattcagccttctgtaaatcattgcctggcttcagaaaacctcttgggcactgactgagctggaggagaaagagagaaacacccccaacccctatccctgagtggaaattcccacctgacccttccttccaggctggggatgagactgtccttactaagtaatcagcattcccccaacaatcctacccccacaccctcatcctcctagcatccattacagtaggggcagagcactgtggctccaggcttcgccactttcaaaatgcagtgaccctggaagcctagcagtcatttacacccaagtgggaattagcagtcagccactttactaagctcaggagggccttccagaacccagggcaggtgctgggagaagcagaaagactgaggtcctttccaccccaccacccaggagtgtgggcccagttggaagggaagagcccagagaccgaggaggttccacattagagtgacaactcaccgggtggaagactggtggttgcagaatgaagctgtcaggaattgggtccagtttttctccaggtgacatgacagtggggcaactccaactgtagatcctcgttccaggagccctgcccccactgggctgactcatctgccccagtcagggtcctaaatgcctggagcagctctcccagctgttagtctcacctgcgacctgcagcgttttaatgctgtctggagcagccctaggagggcagcgggcgacctccaggctccacaccagccccactcccggtggtatacagcagagctctggctgggcgggggctgtcagcagaactcagtgtccaggggaggaagactggcattaaccaactaactacccactccgggtctgcagcacatggccattgcagagagaagccagaggctggctcctgtggggccaacgagggtttgtggtttccaactcgagccctcattaggtcagaggaaggggaggtggtacgtgtgcttaggttccagaaacagccccacccccagctccctggacagccttgggtgacttcccattccttcctcccttcaccacaaagggttttatctcttcccctcattttctttttttttttttttttttgagatggagtcttgctctcttgccaggctgcagcgcagtggcgcgatctcagctcactgcagcctccgcctcctgggttcaagcaattctcctgcctcatcctctctgggactacaggcatgtgccaccacgcccggctaatttttgtattgttagtaaagactgagtttcaccatgttggccaggatggtctcgatatcctgacctcgtgatccgcccgccttggcctcccaaagtgctgggattacaggcatgagccaccacgcctggctctcttcctctcattttcttgccccttcctctactcttcttccttttccaagttttacagccccctgaggctccatttcagcatcagctggaaatgctggggcccagctggggtcacaagaaagtagaatgagggaaggggaaaaagcagagccccttaagcttggaaaaggcagcacaagaagcacagaactgcgcaggagggagacttgaaacttgacttcctcttcagcctctcgtctaatgtgctgtgtgcccttgggaaagtcacttcctatctctgggccaccctttgttcatctgtacatggagaaagtgaccatagcagcatgtcccacagcgaggcctgtatctgggggtgggcccaaatatctgcattttactacagtccttccagttctggttcaaatcccaataaggctttccctttaaaaagcagcacaacctctcaactttatcctgagttaggaggttccaggatctgacccattgcatcagacttggcagcagggaattcctggaccaggaccaggctgggcaaaggctcaagcgcatggggtgctgagggcagagtaagcagctccctggatggagggagagtgcatgaagggtcctgggataaggtatcttagccagtgctacctaagctgtggtccacaagccaccagcatcagcctcacctggaaacttgttaaaaatgcaagtttggggtccccaccccagaccaactgaggagcactctctggaagctggggccaggaatctgcattttaacagcccctccaggtgattctgatgcactttaaagtttgagaagcattgacttaggatggaactagaagggctttgggtgcggagctgagtttgttcagatgttgccgagtaggtggagctgggttactgaaggtgcttatttggagaaattcaatcagacgtgctcaggaagggtgctctgtatacacagtgagaggaagctaagggtggaggggccagtttcttgaagaaaagagtcaaattctgaaatagttgaagagatttattctgacccaaatatgagtgaccaatggcctgtgacacagccccaggagatcctgagaacgtgtgctcaaggttattgagctagattttggttttatacattttagggagacatgagacatcaagcaatacatgtgatatgtacattggtttggtccagaaaggtggcacaactcgaagaggtgggcttccaggtcataggtggattcaaagacttcctgattggttattggttgaaagagttaagtaagtacctacagacctggactcagtagaagggagtgtctgggttaagttaaggggtgtggagaccaaggttttatcatgcagatgaagcctccaggaagcaggcatcagagctcttatcagacctaaaaagatgcctggatcagggaaaagacttggaaagggaaggggatgctttgcagagcagattttccccacaagagtgaggtttgcagggccatttcaaaatatgtcaaatatgtatattaatattttggggtaaaatggtttaatttctttcagggccctctgtcatgtg

SEQ ID NO: 914894 - DNA, 4001 bp, Homo sapiens
tagggtggaggaaggggtcccaggcccgtccaggagtcaggggaaattagaggctgccactgcccaggccttggtcccaaggaaacttacattgatgttcaggaatccaacagcctctaccaggatgtcaccaaatatacccagcgtgtccacatgagacagtgggagccggtagcggaagtggagaaagtgctgtccattcacactcacctggagagacagacagaggctggcttatcagcagctaatgttcattgagttcataacaatgtcccaggcattgccaagcactttttcctcaattttgcctcacttaacttcacgtcatctctatgaggtaggtacattttacagagccttgggcggcttaagtaatcttccaaaggttgcagagctggcctggagactaaggcaccttcaacgctccctctaccccaacagaggcccctcattgtgctttctcagcagcccaaagagtcatctttgctccatttacgtgaggaaactgaggctcaagaggctaccctcccgccagctgccctgtctcctggagatgtctgaagatcccatcatgtttctggcaggagctcacattaggggtctaaaccttgagatcaagttctctgtccctctcccctgccactgtggctgtaagatggggataatgaaggtacctacctaatggggttattgtgagcattcaatgagcagatacttttaagggcttagaacagttcctggtatacagtaggttctctctaagtgcttgccatgactatggcaggagtgccctctttggagccaggcactgtagagctttcttgctgccatgtgggcccagggcagcctggaaccgggcatggcagctccttggtcctcttggtacctgaccactaccaatgccactcaacattgtgtcgtggggagtctggctgagggaaggaagggcgcaaggacacaaattctagaccacccaatgcccgtcccttccttcaccttcacttcctcattcccgaagagaaagaggatgaggaagctggagcctcttcgcagggccaggtggggccaccgggcctccctttgccagcgtccaccatgcagggtgttgcagatgacatggggcttggtggtatggaagcgagggttgaagtggaaggcgatatctggccggggacacaggctgcagccacactggaagtccacctgaaacctactgggaggtgaggctctcaaagtgcggttctgaccagagacccacagagatctcagtggcagggaggagccctccagctcgatgcctctagggctgagctccagcaccccctgggccacctcccccgccttacctgtgtgcatctagagggaccactccttgcagcatgaccatcttgcctgcatgcaggcctccaaaaatcgtcgtgacataaggaaccacctgaacaagaaaagaaactcatccatgcaggtttggagaaagggcttagggacctctatgtcaggcgagtgggaggaaaggagcagaataaaactcaacttttcctctccaaacagaaaattccttataggtaaaaatcagtgttcactgaaatattttcttccacctaatcccctttcctggaccgtcacacggcaaagctgcattacaccagagaagtcaaattccgctcccttgccaaattcagcaccagccagttgcctttccccagctcctaggacacaacaggctgcagtgaccccagggaggcttgccatccactagatgtcaccctggtccccagaagcctggtactggggctttctgaggactgttgagtggctggagactaggaactgggaggcaagaagaatggacaagttaggaactgacagctaactctgaaatggacccctggagaggcacttaacaatggccttcccaggctcacctttccccatgtagaagttacctgggctgggctctgtggctcatgcctgtaatctcagcactctgggaagctgaggcgggtggatcaacttgaggtcaggagttcgagaccagcttggccaacatggtgaaaccctatctctactaaaaatacaaaaattagctgggtgtggtggcatgcacctctaatcccagctactcaggaggctgaggcaggagaattgcttgagcctgggagatggaggaggttgcagtgagctgagatcatgccactgtacttcagcctgggcgaaaaagcaagacttggtctcaaaaaaaaaaaaaaaaaaaaaaaaaaagaagttgcctggccttcctaaaatacatcatacagttttacaacttcctgccttttctgggctgttcctcctgtctctttccaccctgactctttccaagcatcatccacttgggttccttggattattcctttcttcccctgagctcccagggcattttgctcatgtggctggcttggcccttggcttagagcgactggttggcttttttccctagtttataagcccctcaaaactgaagccttctctttccctcctgtaggctcagtgcctcacctgacgccgtgagggctctgcatagatgtgtttggaatgaatgtgagcaggatggcaggtacataccagtggtatcacaggattggccttcctgtgttgctctctaactcccaacaacctttaggaacccaaaccacctagaaaaaactgaaaaccaccaggatggccctccaggtgcgagctctcagcctctaaagcaaggagctgccgtaacctgggcagctgcttcagcccattcctcaggcacctgagaagcatgggagggaggcttgggatgccagcttggcaagctcagctggttggttcagcagttgatcacttcccattcccaggctccctccaggcctgtaattaactgagtggatgcagctctcatgggaggggagggccaagtaagggaaagtgataattaatgctcattagtagggggtgtctgctgggaattcagccttctgtaaatcattgcctggcttcagaaaacctcttgggcactgactgagctggaggagaaagagagaaacacccccaacccctatccctgagtggaaattcccacctgacccttccttccaggctggggatgagactgtccttactaagtaatcagcattcccccaacaatcctacccccacaccctcatcctcctagcatccattacagtaggggcagagcactgtggctccaggcttcgccactttcaaaatgcagtgaccctggaagcctagcagtcatttacacccaagtgggaattagcagtcagccactttactaagctcaggagggccttccagaacccagggcaggtgctgggagaagcagaaagactgaggtcctttccaccccaccacccaggagtgtgggcccagttggaagggaagagcccagagaccgaggaggttccacattagagtgacaactcaccgggtggaagactggtggttgcagaatgaagctgtcaggaattgggtccagtttttctccaggtgacatgacagtggggcaactccaactgtagatcctcgttccaggagccctgcccccactgggctgactcatctgccccagtcagggtcctaaatgcctggagcagctctcccagctgttagtctcacctgcgacctgcagcgttttaatgctgtctggagcagccctaggagggcagcgggcgacctccaggctccacaccagccccactcccggtggtatacagcagagctctggctgggcgggggctgtcagcagaactcagtgtccaggggaggaagactggcattaaccaactaactacccactccgggtctgcagcacatggccattgcagagagaagccagaggctggctcctgtggggccaacgagggtttgtggtttccaactcgagccctcattaggtcagaggaaggggaggtggtacgtgtgcttaggttccagaaacagccccacccccagctccctggacagcc

SEQ ID NO: 914895 - DNA, 4001 bp, Homo sapiens
gctgaaggtagaagaatgaaacaggttccaagacaacaggcctcgatgctcactaaaagtccatcctgagagggcaagcggaacacctttgccaccacccacctggaaatacagcaatgctcctgcctgcataaagatttcttcacagggtcctttaaaactgtctatttctaagaggtcccttccactacaggtaaaaggaaattccctctaccctagggcccctcaggatcccttcctctctcacacgtttcttcgactgctcctgatttaagcattcagctggccacgcaacgcaagaagcaataagaacacaaaaaccctaccctgttcctcctctatccgtggcctttgccaccacctccacaacctagttcagattcctcttcttttctcaagggaacgtctaaagctctcaagtccgttttggcagggcgattttgtaagtctgaaacatttcagtgtgtctctcgatctcaggcagctcaaaagaaaagatctgctggctgcgtgaaggtgcattagaaacctgctgctaccttgcagcctgggctgagcatatgctccggaacttgcttctcttccaacatcctgcacctcaggtcagcattccttctttaaaaggccttgttgggtaagagcatgtccaccaacagaaccctgtaattctcccttgttttctcggactcccctgcgtgctgcagaagcctgggcgttagtggggtagtcccgagtggaactgggccgaggtaggtgccgggacgcactacctggatggggccaaattggaaggagattcgccctgactgaggtacaggtgtttcttctccccacatgctggaacccaggaggctccaggtgcttccccacgagacatgcctcggtatgcagactgaggccaagttctcggcgccctcagccccgccagtagcggaactcctgcccgctgagcgagggccctcatgagaagggaaggtcgcgtggacaggctgccaggggcaagcgtttttagattacttcctccttcttggccccagatgcacttgtgagttgggggtgtgcgcggtggggtgggagggtgcttgtgcccaaaaagtctgggaacgaaagctactgctggctcgaacccggactagcaaagtgcggaaagcccgtggcacaggagtgggtgccaggcagcccgcacgcaggtgaccggcggaccccctccccaggcccgggcggcggcggggcggggtggggtgggactgacccctggctccgccccgcggcgccccccgctgggccccgtttcctccccccccctcgcgtccccgccgcccgcactcacagcgcttgggtgaaggcgctgagcccctcgggcacggccgtcagccccttcccggagcagtccacccgacggtcgccgtcgcagctgcagggcgccgcgcagagaggcggcgccgcgccgctgggcccggccgagccgagcagccccagggcgaggaagcagagcagccctagcgggcccggcattgctgcggccgcctcccgcgccggcctctcccgcggcgctgctcgctccgctgccctccgatgtcccccgccgcccccgggcagccggcctgcgggctggagcgggggtctcttcctcggcggtccgcgcgggctcggccccttcagcagtccgccgcagcggcgcagggacgcggcgctccggagtttcgcccttcccgctgctccatggacgcgcagaggcagccccgctcctccggcggctcacgccagccgggccggcccggcgcagcggcgggggccgcgctctgccatcgcaccggtctccctgtccctggcctctcaatgcagcggctcttcaaggttgcagagcgcagccttcagccatgccggccactcgccccagcccccgccgtggctctcgcacaaacacccagactctggctcgctgtctcccagccgcggctcaatctcttcccgtccttttcccttctagggttgcacgctctggttcccaaacccccggccgctggcttatgcaaatcacttaggtacatgcaaaagtatcccttctcccggagcgccattggcccggggaggtctcgagctcattactatgcagagaggagagccgccattggccaagaggaggaccagaggggcgtgtttctcgggcgtgagtgacaaggtggtggtggttgtggtggtggcggcggtggtggtggtggtggtggcggcggtggtggtggtggtggtggtggtggttcaaggcaaaatcttgacttggctggatttgtctggcaggttgtggattgaaggtagaaggatagtaggacaaggggtctagtttttccctcccccacccgtctttttgttccctccgcagaaattggatctcctaaattggatgacctggtaagtagaacttccctccagcgttcagttaagttttaaatgactctccgctgttccaaagggcgaggacgtctggagctctgcaaacggaaaaaagattttgaagaggaggaaaaaagtttccctcgatctgacacacatctttgggttttagctatacactaagttaaaagtgtaccctctccagtgcctcacttcacctgggatctttacacctatcttgatacacatttggtagctaagtcttagcaattcattctccccagtcctctctctgtatttggtgtttttggtgactgcaaattagactcctttctcacgcactttaaaatcctgaaacacaggaattttgtaaaaggtcagagaaagtgatgtttctgaacactggacaatttccaaaacatctgagtgggaggtgactacggctgagaagccagcagcaacgttggtgttaggtaattatcagcattccctcctcttctggattttgagtccctgtggcctaatagaccccacggaatcattacctgtaccaactacggctttaagggtacttcgtttcttgctctctgccatggcgttgagtcgttttactctataatggagacatttttaatgaatacattaaaacaagcaggattcggccgggcgcggtggctcacgcctgtaatcccaacactttgggaggctgcggcgggcggatcacctgaggttgggagttctagaccaccctgaccaacatgaagaaaccccgtctctactaaaaatacaaaattagccgggtgtggtggcagatgcctgtaatcccagctactcgggaggctgaggcaggcgaattgcttgagcccgggaggcggaggttgcggtgagctggagatcgcgccattgcattccagcctgggcaacaagagcaaaactctgtctcaaaaaaaaaaaaaaaaaaaaaaaaaaaaagcaggatttaaagataattatcatataaagttgactagccatcgtatgtaaataaaacttaggacaatggaaacaggttgatgcagacctataagtttaaaatgaaaaaattttatcatctttgtatttgggagtttatctaaaagataatgtcaggttgggcacataagtcacatacagtaaatctgtctagaagctagagagttaataaataaacatatgccttcatttcaagttttaggaatgacatatctcctctcactgcagggctgaaagacaacttaaagacccccagaaaactctggttttatagataagaaatctgaggctcgagagagagtgtgttctgcccaacatcatcacggaacagctcctgggctcctggctcctaatctggtactcttagagccttccctaaataggctttcatcgtctaaatcatttccattattttctagcaactgtcatgaacaaataaggaagaaattgtaaagttagtttctgtaatcgtttctttaagatctcttcttttttttttttttttttgaaacggactctcactcactgtgtccagtggcgtgatcttggctcactgcaacctccacctcccgggttcaagtgattctcctgcctcagcc

SEQ ID NO: 914896 - DNA, 4001 bp, Homo sapiens
cacattgtttagggaataaggacaagaaaaaaatgtctgtacatgttctatacagacacgatttttttctgagtattttcaatctgcagttggttgaaatatggaacccatggatatggagggctgactgtaattcatcctactaagaggtggagtcttctactgaagaacagaaaagaaatctgtaacagcaaaaaacaaagccaagactatcaaaactaaatgccacagaagttccacattttgtgttgcatttaaaaatacaaagaccggccgggtgcagtggctcacgcctgtaatcctagcactttgggaagccgaggcgggcggacttcctaagctcaagagttcgagaccagcctgggcaacacggtgaaaccccgtctctactaaaatacaaaaaacagccgggtttggcggcgttcgcctgcagtcccagctactcgggaggctgaggcaggagaattgcttgaacccgggaggcagaggttgcagtgagccgagatcgcgccactgcactccagcctgggcgacagagcaagactacgtctccaaacagcaacaacaaaaacacaaaagaccaatacgttagaatcttaactagctttcaaagaaaaaacttactcctgttaacaccaaacagatttgctcccatctataaaacacagtgccactgtgctcaagaggaagatgtcagagacttaggcctaactcggcaagtcttcccagagtagctagtcctctaaaatgatgctttaataggcttaacggaaacaatctcatttacagtgaggcttccaaatggtgaacacggtaaagagcaaatcagcaacattaagtgcacatttgtttgtgggaaggcattaggaaagaggtttttctaagtacagtaattctaaaaatgtgttttcttagggaacaatagtaatatttagactaattgcaaatgttaatatgtgcaatataatttcagtctccatcctacatatacatttttttttaccaccagtactcaaaatgtttatttgtacttctcaattcctatcaatgatttctaatgctggtgtatgaaaagcatgcttgaaattgtttgaaataaaggacttagggacagagtggaatgctggaaatctgtaaaaggactggaaacgctggaatgctggaaatcatggtaggcgcatagccagttattttcgtaggcttctctatctctaattactcagcagaggtggttttattttccttgacagtctgctctaggaagcaatcagccaaccagtttgcaattgtagggtttgtaagaaatgaaaaacactgcacctgcaagtgttttagcatctaccactattcggcttacttacgtaacctccttcccaagaccaagtcagtaggattgtttttaaagcaacctctccatttctaggaggggcacaaaagctagcaaataccccaacccgaatacaagcgaggttgtggagaaagtaatgaaggagtttgtgtgcaaacagcggggaaaggaggttctgttgaattgtaccgtgtgtccgttctcgtgctgtacaggcaatgagtgtagtctgtgcgaaccgggtgtgtgacgtttgcttttcgggtgtacgggtctccgaatgctgcttctgctgtgctcaccaagggagcgcgtgtgcggcgtgtgtctgcgaagcgggcaggttgtgtttagttgtgctgtgccttggaacagtccgtgtgaacagaggagggcttacggttaacagacaaaataccgtaagcgcccttcctagagccaggcacagagacaacggcggcctctggcgccggcacaagggacagcgtggcccggatctcagagcctgggtcactcctcctcccctccagcgacacagcactcccccaacccttccgcccacctccgccgagcctcggctgcactcacctctctccagccgcacgggttcccctagcgccgccatcttctcccttaacctacagacccacaggaaatgacgacagaagggctgaggtgggggggcggggcctaggggaagccggaaaagtgagtaccggctagtatcgcgagatcaggaaggtggccgagtgtgtcgccgcggccatcagggtaagggtacctggacttgcggctttttaggtcggcctggctccgctccttccgcggtgacgaggtcccccggcctcctagggttgggaagagctgctttcctgactctcgttccctgcctcaggcttcccttatcccaatcgcttcgaacccttggctcagcgtagaggagtcaagcctggattctagtcccaccttgcccattagcagctctgtgacctgggactgttcacttaccctctctcagcctcagtttccgcatctgtacaacgagaggtcctatctcttaggtccttacaatttttaaactctgggattcggtggcaattaaatgtgtaatgacatgttgtcagttctcaatttgtgacagcattgctttaaatttaaaaatccacggcttgaatcttccctccaaatctgttaaggggtggaaagtacaaagagcatgaaacatatctgggtgagggagagaacaaggtgctttggtgcaccacaaagtaacaattttataagcagctgattcttataaaatcttaagtaaatgaaatattgtgaagcaaataatattcttaatgcattacagatttttgagccacttctgaaattttcgcgaaccaagaagaattttagtacttggatttgactaacatttatccaagcccttagtctgtactgatactgtggtaggtgtgtttacatccagcatttcaacacttcatgatgggactgttttaataacctgtttgcccctggtccaccctttccattcacctttagtattttcttctccaaatccatcatggatgccaccactatgctcctttttctccccttgaattctgatttcatcatcacaagttctgttcagaaactttcaatggtttctctcctgtttcctatttctaaagccttgcatactctgaccctaactcatccaactaacttcatttctcattaccactaagtgcaaccaccacttcagtccagatagtatagtttcaaccatatttattcctgattccaagtctttttgtttgttttagagacagagtttctctctgttgtccagactggagtgcagtggtgcaatcacagctcaagagagcctcctgtctcagtcttgccagtagcgaggactacaggcaagcaccaccatgcctggcaaatttttaaatttttagtagagatgggggtcttgctatgttgcccaggctggtctcaaactcctgagctcaagcagtcctcctgctttggcctcccgaagtgctgggattacaggcgtgggccactgtgccaggctccaaatcttcatttgtgttgttcttgtgtggaatgcccttcttcatcccttcctagtctccaaactttgtacacactcagttgaacccatttcgtgggtccctgctgaaggcatgccacttctaccaagccttttctccatattattccccttttttgtcctctgatggcctaaatacgttgcagtaacactcaggtgcttatctcttactcgttgtcatttttttttgctgcaaatgtgttcaagaaatgtttattaaacacctaatatataccaggtgccttgataggaataccaggtagagcaagacaaatgcaaacattgcccttatttcttcaaatattttttctttccattctcttgctcctctcctttggtgtgactattggagtcatgtgcatgtacataatatacatgtatattgaactaactggcattgtctcacagctcagtgacgctctgttcatttttttttcaagattttctttatgtttccttttggataattgctatgttttcatattcattaatcttttttcaatatctaatattgaaatcctgtccagttcattcttcatataa

SEQ ID NO: 914897 - DNA, 4001 bp, Homo sapiens
ctgggccattcagagatttgattcccacaaaatcaaaggaactagagcccagaattgctcagttagacacagtattgaggaagcaacaattgagaaatgacaatctatgacatcaacaatcgagaaataacaatctatgacatctgaatttctctgagacactgctgtcaatagcagtgctaatgttttatatagcatgtgttgcttttcacagtattgtcacatctagtatctctgaggtaggtggggaagatataaataaaacaggatacatatgaaaatagtggctcagagctcatggtatgtccttagtttcatgatcagtgaatgacaggccaggtctaaaatctgggtttcagtaggtgactcaagtcagacttcatgcttcccaaggcaggagcatcctggctgttatgagtactcttcagttggggctgtcctctgagatcagtgtgcacttgtagatctccttaaaggccacaaggaaaggtggcattacttcttccacggtgacgtgcctctggagctccttactcaaggaagtgacgcctgtcccaaccagtccacagggcacgatgtgctcaaaccacgtgaggtcggtagagcagttgagagccaggccgtgggatgtgatgtgccttccacagcggactcctgcaaggcaagccaaagggtcttagagtagataccctccactctccgggctttggtgtccctctcagggcgatgagaaaactggattagatcaccggttttcaaattttgtttctggagaaacaagggattgtactcagatgggaaaaggaaacaaatgaaaggaaggggtgcgtggcttcaagcagctgcactcatcatgaggattccaggaaatgtcttttaacagattccaatacttaaaaaaaaaaaagcttggggacaggcgcagtggctcacgcctgtaatcccagcattttgggaggccgaggcgggcggatcacgaggtcaggagatcgtgaccatcctggctaacacggtgaaaccccatctctactaaaaatacaaaaaattagccgggctggtggtgggcgcctgtagccccagctactctggaggctgaggcaggagaatggcgtgaacccgggaggcggagcttgcagtgggccgagattgcgccactgcactccagcctgggtgacaaagcgagactctgtctcaaaaaaaaaaaaaaaaaaaagtttgaaaattagcacccttatttgccatgacattgtcattcgcaggacgtaacctggcaattcacttctcttgtctctcccttaacagaaatgcgtgttggactagatgtgaggagccttctgcttctgaatatacgatatctgaaaaggggcttaaaaactcaaacgcagcgggtagctgtgattcaaaacccgcgctagatacgcctcctcccggccctcacctccgttggtccagccccgtcagaccccgcccccaggcctcaagctccgacctcggctctcaggtaccgccctgctccgcggcgctcaccgatcgcgcagatcttgcgatcgtctagccagacgccagtgtagggcgggggccgcgcgcgggcgtcctgcaggccctggagctcgcacaggcgcacggcgcacgcctccagcgacgctacgtgcatgcgcaagcgcaggccgagacgccgcaggtcgagtaccgggtggcaaagcagctggcccgggccgtggaaggtggccaggccaccgcggcctgtgacgcgcacctcggcgcccaaggcccgtagccgcgcagtttcctcgggcgtcaggccgccgcgcagcccggccgtatacacgggccccgcgggctcgcagagcaggagcgcgcccgcctcagtccccgacggggcctcaatgcctggctcggcctgcagccgccgcagccagcggtcctgcagccccagtagctcggcgtacggcacccgacccaggcgcaccaaccgaacggcgggttgccgcatcgtgcccaccgttgcgtccgcggggccccgccctctccgtgggcctgggggcgtggcctgaggggcggggactcgggggcacaccccgagccgcagctcccaggtgcgtgttaaaagctggaggggggatatgtgatcccaggaccaaaagcgcggggccagactcatcggttcattcaacaaccagtatttagtgcctgctgtgttctgcaggccctgccataggcgcttgatacagcggtgcatagcgtatgagaaagatctgtcctggtaagcttacattcttacagcagacgataagtattttaagtgttaagtaaataaggttatttcacgtataaggtgttaaatgctatgaaaagaaaaataaaacagggtaacgtggtgtgtcctgtgttgagcccctgggggacgcaagagggagattagcttgcctacaaggttattggtggaggtagggagaacttaaagatcagcacctgtaagaaagtgaaggaagcaggaatttgtaggcagaggaagaagttggcctgcaaaacagttgcagcagaggccttgaccaatcccaaggcatgcttggagcctaggatgacccttcagagtagttccacattaaagcaagggggccagaaactcttatccttgcattgaccagtcatggatacaggctacacctggggaggagctgtgattttttttttttttttttttttggcaagactgcttccctcggtggagggcggcccccagagaaggactcagttgtgtatcatcagtaaccaactccagaagctgagggaatgactgtctaggccctgagggggtgtctggaccacaacatcagctatgttgcagttagagtatcatttaaacaagtctgaattcaatgaatttttactgaggacttttcagacaccataggtgtctgaaaaacatttcataaacatagacataaagatcctaagcaaatattagcaaatcaaatccagcaatttataaaaggattaatacatcatgatgaagtagggtttatcccgggaatgcaaggttggttttgcattctgaaatcaaacaatgtaatttaccttaaaagagaaaagccttcattggaagaaataataaaaattttttttaaagaaaagctatgattatgttaaaaaatacagataaatctattggcaaaaataaacacctcttctgaccaaaatacttagcaatctaggaatagaagagaaattttccagtctgatgaagggttcaaattatcaatcagggtttggacaagagaaatcacatatgtactattttaattaaatgttttatttgagaaaattggacactcatatgcagttgtaaggaataatatggacagattatatgtaccctttacccagcttcccccaatggaaacaccttgcaaaactgtagtacaatatcacaaccaggatactgacattgataaagtcaagatgcagaacattttcatcaccacaaggatccctcatgttgctctttgtagttacactgcttcttaattcctggcaaacgtctgtgttgtatagatggaatcatacagagtgcaaccttttagaatttttttttcactcagcataattatctggagactcatccaagttgttgcatgtatcaatagcgcgtttctttttattgatgagtagtagtccatagtatgaatgtaccacagtttgtttagccattcactcactgaagaacacctgggttgtttccagttttcagatattctgagtaaaggtactgtaaacatttgtgtacaggtttttgtgtgaactaagttttcatctctccggaataaatgcccaggagtgcagttgctgggttgcatggtagttacatgtttcgttttttaagaaactgccaaaatgctttccagagcggctgtaccattttacatacccaccaccagtgtatgaatgatcaagtttgtctgcatcctcatgagcattagcttttattttagccattctaa

SEQ ID NO: 914898 - DNA, 4001 bp, Homo sapiens
agaccctgctgcttactcaggccggcccctggccacctggcccaggaggctcaccagtcctccctctcctccttactgcgggtcggcagagcagaccaccggtgcggggtggggcgtggtgtctggcaggcacgtgggagtctcgggggctgcaggtgcgcctgctggaggtcccaggtgaccactgaccgactcttgctctgtgggggacaggagagcctcttcctcggtttcttcaacctcctggccagacttgggggccattctcaatgttcttcgggagctgggaggggtggggggcccgtctgccgtgtgcgcctcgtgtggccacacaggttggagcagcccaggcgtcaccacttactcacagagcgttgctctctgaagggacccacatgtgggtgtccacacccgtgtgtttctgaccaggctggcgcagcaggtcaccacccgacatgtccctggcgtgtacccctgccacccaggtgctggccctttgcctgtgatgtggtgtccctctttctctctcttgtccccccagctcagggccctacccccagcactcacctgaggcccgacctccaagcaggcctgggagggaagggctgtataccgttgccatggataccagcacccagaaggggtggggctgtttgttaccaggagcctccagggagaccccagaccaggcccctaggtgagttctgggccagcccagcctggaggaggtgtgagaggctgagccactgctcagcttagcggggggaccacttagtgaccaacaccctgagggaggccccagcatcccctacctagcctggcagcagcagcgggataaataggggggcactgctgcctgtgagccagcccagcatagccatgggtgtgtgggggaagcagacaggtaacagtgacaagctggggactgtgctgaacgctaactggcaatagtacactcctgcccacagcctgtttttaaattaataattaattctttagagacagggtcttgctccgctgtccaggctggaatgcttcggtgtgatgacagcgcacgttaacctcgaattcctgggctcaggtgatcctcccacttccgcctcctgacttgctgaaactacaggcacccgcctccaccgccaggcccagcccacagctcctttgacctcagtgacaggcactcacctacctgacccccaaactgaagcctcacttttcccagccgtgtccacaccctctgggctaccccattaccatgacaagtattccctctgctccaggagaaaagccaggtcccagacctgacccattaaaacccaatcattccagctttcacccttcatctctgcaactttcggctatgtaagggctccctgggggagcacaggagacaggcgggcaggaggcccacgcccacaactctttctgagctgggcagaacaatcaatggcccacacagctgaccgcgaggctgcggggccctgggcgggacagtagggtagggggtgaaggagcggcttccagccagcttcactgtgtgcatggcctggcactgggtccaaaaggggcaggaaggtgtcggagaagagcctcagctagagtccgggccttctgagcgggcacctcccgcaccaggactctgcgcccgccagctccgcagggctccacctccctcgccgggactggtgaccctgcgaccccgcgacccctgcgcgtccagactactgcagctgcggtaggccccaaaggctggcccgggaagcgaggggaggggctggccccgctgcccctggacgcaggcgggggttgcgggatctcaagccagagacccttcctgggcgggaacccgccacactagaaggctgctgaggaagtcggcccaggagcggggccagacacctaccccgacgcctgcccgcgggccgcagccaccgcatttccgcgtttttcgcggtaggcgggaggtgggggcggggactgcggctcggcgcccccctccgacccgcccacacctgtagtctcggggggggcggggcgcggcgacgagccaatgggtcggggaggggcgtgacagaggcagccaatgggcgcggggagggggcggaacgcccgcgctgagcagccaataggggtgctaggggcggggcgtgcggaccgcgggccaatgggggcgcggggcccgggtgcgccgcggcgctgggggcggcaggttgcggcggcgccggagcgggtctccaggctggcgagcgcccaggtgagccgcgccgggtccccggtacttgggagcgcggggcgcgcctcgagccggccggacgccgactccaactggggagagttttccgcgatgcccggacggagagcgggggcggcgccgcacctgcgcccgccctgcggaacggggacgccctggctcccgccaggctggggtcgcggcgcgggcttcggtgcccgcggcggggaccgggactttcggggcgagcgcagcgattaggcggcagcggcggggctccccgggctggcgggggctgctcagacccggagtctgctccatctgcagggtcgaggtctgggttgcgaccccgagcgcctctgcggcctgagcaggtcggggtggggcgttcccatgccggcggccgcggggcctggcgtgcgggcgcctccgcgccgcccggggagggggcagtgtcctccgagccaggtgaggcgagtaggaaatgctggatctggttaatgattcgccttgttccgggagtgcgagcgtggcaagaggaagctggtgaagtgggggaggatgcgtgctccggagggccgccaccccaggaatgtgtggctggcgggtggggctggcacaggagggtggggcccgtgcggaggggcggcagcccagccgtttctagggcaggccaagaggatgaggagaggaggaccagcctgcgataggagtaggcaggtcctgacccggtgcctgcgccctccccacaggacaggcatgttgttgggactggcggccatggagctgaaggtgtgggtggatggcatccagcgtgtggtctgtggggtctcagagcagaccacctgccaggaagtggtcatcgcactagcccaagcaataggtgagtcctctcggggtcaggcaggccgggcaggtagagctgaagtgggacctggtggtccagctccatggtctcccccaaggagagtggggctggttgctgatcctttttgttcttcccaactcttcaagccaggtggacagagagtcggggggacataggctgaccttctcctcttcttcccaggccagactggccgctttgtgcttgtgcagcggcttcgggagaaggagcggcagttgctgccacaagagtgtccagtgggcgcccaggccacctgcggacagtttgccagcgatgtccagtttgtcctgaggcgcacagggcccagcctagctgggaggccctcctcagacagctgtccacccccggaacgctgcctaattcgtgccagcctccctgtaaagccacgggctgcgctgggctgtgagccccgcaaaacactgacccccgagccagcccccagcctctcacgccctgggcctgcggcccctgtgacacccacaccaggctgctgcacagacctgcggggcctggagctcagggtgcagaggaatgctgaggagctgggccatgaggccttctgggagcaagagctgcgccgggagcaggcccgggagcgagagggacaggcacgcctgcaggcactaagtgcggccactgctgagcatgccgcccggctgcaggccctggacgctcaggcccgtgccctggaggctgagctgcagctggcagcggaggcccctgggcccccctcacctatggcatctgccactgagcgcctgcaccaggacctggctgttcaggagcggcagagtgcggaggtgcagggcagcctggctctggtgagccgggccctggaggcagcagagcgagccttgcaggtga

SEQ ID NO: 914899 - DNA, 4001 bp, Homo sapiens
tctgggcaggtcccagcaatttgcccctccacctggcaggaaagtcccgaggaagagttcctgcattaggagtgggggtgggagatagtgggacccagggcctgagggcccaggccgactagatattacagaagtctttggtggagactgtcagatgtgcctcagccagagggcctgctcccaacacaatgcagctgcctccaagacggagttacaagctagccacacaggtgatgctcagagaggtattggggtgacgaggaccccttctctgtggccaccacagttgacaggacagagtaaacctacagacttcgcagtgcaatcaggatgcctgctggccatgttcagatgcccttcccttccccctgcttacacaaaagcagccaatgcacaggaatttgcaacccgctggagtgaagaagtgcacagtcggcaaacttttcctcttttggtttctggagagcctggacaggccttcttgcaagcagcagttatagattgttaggccttgtggaggcctaagccaaatctgcaccatagcaaagaaatctcccctacccctgcaccacagccctgagaaggttttgggtgtgcactgaccaactgtccaagtttgccttgtgactcaagggtttcctaggatacaggatgttcagtactaaaattgagatcgtcctgagcaaacaaggacaattgatcactatagtgagtggtggtaggatgggtcaagggactagctgggccagagaggaaggccaggcagccagaccctttccctgcagcccagaagttgcctctcaaccccaaaccttccagcctcctgccccagcacttcgtccttcaggcactaagggattgtcccagcctcggcggatggtctctgggtcagccagagctgtgagttcttccaagagactggcagtggaaagggtaggagttggacccagggatggatggaaattttgtgaggtccaaagcttactgtagtttgggcgtggggctctttaagaaaaggactacaagactactaataccaaattaccaccaaggacctggcagctgaaggaacctgaaggaccctaaacttcattagcttcaaggtaaaaccgcctctagttgaacctgatattttggactagatggcccacccacctaccccagccagcgtggcacctcccaacatgccaggctgggtgaactgatggcagttccctccctagccctgccaggggcggagacaattgtcagccatcccgcagctacggagtgccagaccgcagagacagtgctggtttgacggcaccctcacccctgcacctgcaggatctgtgggcacccccaccaccccgctgggatccgttccgcagtagggtgcggaaggggaacgtgcagacacccagagaggctgggagactggctggcagtgggcactgccgggaagcccgcggtgcgggtcgcagaggcgctccggatgcccgcaaggcggcaagagtccgtgagaaagttcccagccggagcgcgcagggctggcggcctcgttgggaccgggagacttcctaatcccgccgccgccgaagcccgggcgctgagcctggcaccgccgaccccggcaccggcgcacacatcagccgccgcgcttccgggaagccacccatcagccggaggaggcccgcgggtgctgagggctctgccgccgctagcggggtggactccgcagggccagcgccgcagtctccgccccacgtcccgcgtgcccccgggcaccggcaccgggcgccgggcacctaccgtcctcctggtccaacaccatggtcccgacggctccagccggactagcgccgaggatacggaggggcgcgtggctccgactcccgccgccggccgcctgcgctgctcccgccggccccgcgcgggcgccgagtccggagagccgcgaccgccgacgggggcagacggaccggagtccggagcgcagccccgcgggcagggagcgcaggaggagggactggggggaaggcgcgggggcgagacggccaggccgggatcgcgggagcctcgcgagcagcagctgcccgggccgggccgcagccggagcctgagccgcgcgcgcgtccttcctccgcgccggccgtactcgcctcagcagagtgaaggctgcatttcccagggcccctcagattcccctgttaattaaatcaattcattatgctcagatctgattagcggcccttcccccccctttgaatcaattattcaatacacaaacataattgcttgggccagaggtgcccgccattagcttatttaactccaaggacactaattacccgcagggcacgggaacttttctcattaattctgacaaaacacaaaagcacagccagagtgtgtgcgtgtgaggggctgtgtgtgtgtgtgtgtgtgtgtgtgtgtgtccgcatgccagagtgagggctgtgtggggtggtgagccactgtgtgagctcaagacaagggtgggggtgggacgcgtgcgattgcgggtgggtgtgtgcgggtaggagtgtgggctccgtgcctgtgattctgaatgagtgcgccaggctgggcgtgactctgggtctggggacagtgggcctggactgggacccggcacaggaatgtgtatgagatcgcgagagtgcttctgtgtgtgactttgtgaatgtgactccgtggctaccgtggcaggcgccccatcccctttcttttttcattattgcccagccattccccgcggcatgctcagccccacgggggaaagtgcagatcacagaggagaaatccgagaggatcaggaggcggtggtgactctggacccaggctgggccacagtgctctccatccggtcacctgttcaggcatcaactgggctttgctctcccccagttataaaccccaggttcccaccaccaccacccactttgccctctcactgcccctctcaataccgcccctactctcaacttttatcccaaaaccctccccaccccacccttgtgcccgggaacccccaactccacccaccctagacctagttcttcacctcctgtctcaaggctgtaccgagggtgtgcctgtggttgatcaacttctccacattttacctcccaggaaatctattgagagaaccagtgagagagcccacagaggcaggacacagagggtaattgattcccccaaattaggtttctgctttctaaagaccggcattgtccctattctcaatgtgcacagaggtattgaagatttcctttttgtttcctcgggcaatgaatgagcttaatccatttggctttataaatcaggaaactaatattcgctccctccatagcagctttttaaaaaatttaattggtaagggaggtgcagttagtcacctttatactgtccccaagcccccacttatcaaaacacattctgattgaggggtagagagaagggagggagctcatcctgattcctcccactctcttctatcctcccaaacagacccacatagtatctgggaaagtttgtgaaatgactgcatgaattatattcaatttggtgaagaaaggaggactgtgcagagagattcttcagaatgatctcccaaatcagctgctctcaattccccaggagtgactgcctagatgggtgttggctattccatgtgctaaggcgtcttgtcaaagagcaagtagggcctgaaattctgcatccttccaccctccaagccatgtagctggcacggactgcacccacccagagagggcaccttttgctacttcgcacaaaagcaccatacagactagcggggccctgcaattgggcatctctgcttggccagagttcacactcagagaagccagcctgaggcataagcacccagactccctgttcccaccatcacttgcagcaagggcctgtgtgagcacttaaaagaccagcctcctggttttcatagagagaaagagaaatttcagagagtgtaaaca

SEQ ID NO: 914900 - DNA, 4001 bp, Homo sapiens
cccaccccagctagcccagaagcactgaggttccccccatcctctctcttcctacacacatactgagagccacaggtcctcctagatgccacccccaggccagatacttcaaattccccctccctgctggatgtctcagaaggcggtagcagcctgggggcatcggcacctggcagcggcaatgcgaacatcctgtgtgaccctgagcaagtcacttagctttgcattttcaccaactggccacatcaataacaacgctgccccagggacagagggctcaggcccagcagagactcctgaacggaagggcagaggatggccactacagtcactttaagaggattcccgctgactcaaagcaaacctaccctttcggtacctcaccaatggcagaacgccggcggcagcgtgggcaccaacagtcacatacaaatgcccctgcaacaccaacacacaggcctcacctacagggcaggaggtcctgggacagccaaggtactgcctctctccttaccctggggactcatcttagggcacccacttggctttccccccaagggggctgggatccccagccttctaggacacttaactgcagggcactccctgccagtaaggctttggggtctatgggaccacctgctagtggcttccagcagccatgggctcctctgttccgacctttcccgtgccctgcagttttctagggcgcactgaggctcgaccacggaaggtccgtgccactctcgcaggccgctcccgcacaagtgctaccggccggcggcgggacactttcttcctctgggccaaactcccgcctccgcgctcagagagacagggagctagcgggccggcacaagaggcggctctctttctcaccgagtcacgctcatgcagatgtcccccggagggtccaacccgccttcccctcgcctgccgggcaccctggcgctcgcgccgtcctcccgcgctcccgcttgccccgagctctggagcccgattctccccgaagccgctgatttgctcggcgctcagcgcctctcgggttacgcggcggctggcgcgagggtgatggctgcggtgagagcagcagcctcagacacgaaatgctcagagcgaacctccgcggcgcggagatcgcaagggagccccagcctccgcgcggccccgcggcgcagcacacggccagtgcacagctcctcggctcgcggccgggacccggggggcgtgcggccccgggcgcgtgcagcccggggctcgacctcctccccccgcaagttccgcccggctgtcccccggtacttccccccgccccagccccggcccccagcgcgccgcccgccccgcaatccccgcacagcccagcaggtgtgcgcccgtgtccccgcgtgtgtgtgcctgcgcgccgcggcagggggcgagggggtgaggggcgtcgagaccccggcccgccacctaccgtcctccttgtccagcaccatcatctcgggcgctccgtgtccagccgcagctaggctcggccgggagaagggcgccgactcggggcgcgctttggaggggcggccggtcttcgggcagctagcgggctctaattacccgcttgtccggctcttaacctagattgcactcagctagaattacattcaggagtgaagcacttcgcagatacaaaagcagtctcacctacttttgtgcctcagaattggaaggaactacgaactgcaatttagagagagagggagagggagagagaagggggaaaagaggatcagagccgtttctttgattctcaccttctaaatggctcaatttgcccagtataatctgtcttaatgtaattgcatttgatagctcataaccctgtctctggcaacgacacagctttcagcctcataaagtgttttcccctcggatttaatctgaatctcaatctaaaattatattcaaagagatgggggaatctcgtggccgtctcccgctgcctttctccctcaatgtatgaggtttgcactcctgctactgcataaatgcacacatttcctgaggcctccaccctcccgggttaatggggagtggagacgcacggctgtccggctccgcagcgccacctggaggcttctaggtcctagctcggtgagcgtctttgctccgatcccagggtcgtggtcttcaatgattgtctggaggacgcatcccatctgtcactcccagaccctcagccttgatttttgtctcttcttcagagcaatatttctctgatcacatccttttccttcctaccagttctgcccggggtttcgtgttgcttcccggattgtttggcaaagttaaccctcttcagggcacaaacgatcctaccgagtcttacagcactactcctgaccccagcagcacccccaaaagcatcctgactccatggagcgggagagcttatctcaacttctctcgaagcaagcacaggcatggccttgaaagcttttctcattctacaaatatttactgagcatgtattatgtgccaagcacagttctaaggcactagggatacagcactgaacaaaacaaagattcctgctgctattatggagttgacgattcttgctctgtaactcataaggcaggaaaagagacagtgcccatctcttctcctggaccctgcttctccccagaatcctggggctgatgttctggctgcctaccctaggaaggccacctacccacctactttttttcttttcattcctttttctttctttctgttttttcttttttaagatggagtcttgctctgttgcccaggctggagtgcagtggtgtgatctcggctcactgcaagctccggctcccaggttccagcgaatcttctgcctcagccttccgagtagctgggattacaggcacacaccaccacgcccagctaatttttgtattttttagtagagacggggttttaccatattggccaggctggtctcgaactcctgacctcgtgatccacccacctcagcctcccacagtgatgggattacaggcgtgagctgctgcgcctggccggaaggccacctacttttaaatcccaagtcttttttctttgcctagacagtacagagttccaaggtgggatagaaataatgatttttcttcagcccaaggagggctccagacagatgtgttggaggcttggtcctggcaatcacttctgaggactagacccagggaaagagaaacgggctgaagggccaccagttgggattctatctcatctctgccaattaccaacagtggaccttagcaagtctctttctctatctgggcctcagtttccttggctgtgaggtgggagacctactcttcctgtatctatggttgctgtgggggtcagatgagctaatgcatgttaatgtgctttgtaaactgtggcactccagacaatgcagggggatggggggagattatctggtttgaaggagacctggaggctaggtcttaccctttaagccctgggaggccccagtgcttgacagggatggggagcagcgggctgcagccatattcctctctgctaggcagggaagtcaggctttgagaaaacagaaaagcgctgcttctaatgagatgcctcatctgcagctcagagggtttcactttccccttcatcttgaatacttaatcctaatagtccttgagtatatttgatgttaaatatatcattttgctcagactcaccagcctcaggactgcgagcttgatctctcccctgccactgccgccagacccatgccctcagggtctgagggaggctttggcaccgctgccaccggcatatttggtgccagcccctcacacccaccagagctgggggctagacagtgtagcaagcacagggcctgacaggctggcaaggggcaacttcttgccgtagaaacctctgtgctactggaggcgttcactccatcggggctgcatgcagccttactactgacctccaggggcagattctcc

SEQ ID NO: 914901 - DNA, 4001 bp, Homo sapiens
aaaaagtgatcaaaccaccctttaaacccattgtttgcataaacatacttttaaaaaggaatgttatttttctcctgagaatttgttgaaggaagtgggggtttttgttataacaaacctagctcattacagaactggtgtcttaaccttcaagactgaatagtgatgtttatattctcattggatggtggtacttcctgtgttttatgagaatatgttgagcttttatgctggtaactgagggtaaaacccaggtaaataaacaccatagaaagccgaaattgaagggtgtatgtgtgtgtgtgcggtatttcaagcaggaaagcacaattcttttaaagcaggaaaagaaaaaacaaaacaaatgtctcttaaaagcacaaatggacaagtcattaaccagctcctttggtcttgtgtaacaaatcccttcaaaggattagagggggacttcaaaggaataaaaattctcaaaaccagacagctaatgactcttaaaagggcatttgcgttgacaggaaaatgatatcttaaacaccccttactccccatgttaacgctgaagaatgggtgagggatagaaaaacattccaaaccagtacgcggctcagaaaacagatgcggccaatgctcattagagctctggttccctgaccccaaacccttttaagactctgctaaaaactacgagactctactccccagaataattcacctatacacaaaatggtgcattaactttcgaggttcacatgtccccatcggtggaccccgaggaggggtacacctactcagatttactccggatttcgctgctctagaaatccctggaggcccagagccagctccgaggtggacggtcggacccctcacccgcccgttatccgcaaggctggcagcggctccacctgcggaccgggaaggcggccgttggggaccccggaggccgccacttggaatgttcccctttccaagaccaaatggacaaagagaaaggaccgagaaggagagggaagaagggagcagagtcaagcccagaacgctctccggactgcacctgcgcgcctccaggctctcctcgtgcctgctcccgtgcaaactttctggcccgtggtggctttggggagcgtcccagtagcctggagtggcccgcagaggcgccgggccgacccctgtccctgccgcccgccgcccagtccctctcccagagcccccggaatcacccgggaggaaggaggagcccagcgctcggcacagggggccaagggcacgccgcgagcgcgcacctggagccccctcgcgggccgcccgggtccccccgacgctccgggacgcgaggccgtggacaccgggggtggcaggggcaggggggccgcacttactctgaagggtccaggctcttcctttcgatggccgaggacattggggagggaggcggggtgccgggcggcgggggcgctccctttgtggcgcggggctggccggctgccggggctcggaccccctcgggtgctcgggcgccgccgccgccgccgccgtcgccgccgctcctgcgcctccgcttgctccggcgctccgccggcgagctcgcccctccgcgctcaaggacagtcaccgcgctcccttcaaacgccaaagagagagagcgaatcaccgggctgcgggcgcgccgcggccgaggcgggggccggggcgcgcagcctggctccaggcggctgcagctgctgctgctgctcaggacttaaccttccatcccggtcccgccgccgccaccgcccggtccctctcgcgcgctgtcgccggctccgcgccgcccgcggggatggtgtgcgcccgcccggccgcccggagcccctcgcaccttcggcccgggtcgcggcgcgctgctcgccgccgagggcagagagggggcggcggcctaggggcggggaggggaccgtgcgtctctctccgggcttcctcctctctcgggaaggtctattttcgctcagcttccctctgtctctggtttcatttcctttttcctgatcacgattcaaatacaatagaaggaaatcacatttaaagagacagctgcccggtccccccacctccccttttttcttcctttttttttttttttttttaaacggggctcctggggattagcaatacaaacagcagcatcaggactgacttggcttcttaaaggggccagtgtcggggacggggagagccgctcagcgaacacctctccttggaaaggaggctgggcaaccactaaatcattcttcagggcttcccctcttccgcctttcccttttggtttaactaaggcagaaagtaacccacgaacagctcgagcaagcaagaaaagacaagaatgtgaaataagcacctacagaaatgcaagtgttcccagtggattttccgcccgtcccaggttcgaggtcccaggtccacggacgccgtgcactgggatgccccggacagcgcggctctgcgggctgcgggctacgggctgcgggccccaggctgcgggctccgggctgcgggctccgggctgcggccgcgctctgcagaggcgatggtggtgcgccagccgggactgcacgggctggggacgcctagagcagagccagggcagctaatcccagagggagggtggctgggagggaccacgcggggccggggctcctctcagtcggctggtggcggaatcccctccctctgcacctttcagaaagcggactcctgcggttaaactgccccccatgtaaagtgccagtagtatcccgaccagagaaagtgctttttcaatggtcaagaacaggatcagagagattattttgccctgggtcaggcacagagaaagaaggcggacttgatttgggggttcaggcttccccctctcagcctccttctagaaagaggcaggaacgcagaggggaagcgggggaggctagtagtttgcccttccgtggagaaaaacttaggctctcctgggcctcagagttccttgaaaatatctgcgttcagaagctgaaaggcctatttgtgcgtgatgccagtcattaaggcttgtaaagagggaacgtactttcaggatccatggttttatatgatcagtctggatcataggcatacatttctgttcccattttaaggataaccagagtttactactgcctgcatgctcttgtcattttctggtccctgtgtcccaaggcttgggtccctaatgggtataatcaaaagctgtgtgtgtgtgtgtgtgtgtgtgtgtgtgtgtgtgtgtgtcccaaaggaagccttaagagcaaatttttgtcctagtggagacttcagtatacaaaaagactttttcggctgtgctcggtggctcatgcttgtgatcccagcactttgggagacccaggctagcctgagcaacacagtgagaccccgtttctacaaaaaataaaaaataaaaataattagctgggcgtggtggtgcttgcctgaaatcctagctactcgggaggcggaggtgggaggattgcttgagcccaggaggttgaggctgcagtgagccatgatcgcaccattgccccccagtctggggaacagagtgagaccctgtctcaaaaaaaaaaaaaaaaaaaaaagttgggtttttttttttccgatagacccttgtttttaatttaaaaaagaaaatacttagaatttaggcaagcctaaactatgtgataaatatgtaacctaccacactactttcatttctaacagaaatgaaaataaatatataggttgtgatgaacagtttacctacttataaccagtcaatgtggtggttaaacgctggaattttggaacccaactgcctgggtttgatttagactcttacttatcagttagcatgtcctaggaaaattatttaatctgaggaggcagtatgcggtagtagctctggagtcagactacctggattctaacccatccttgaccagctgtgtcaacctgggctcacagcaggaatt

SEQ ID NO: 914902 - DNA, 4001 bp, Homo sapiens
tctattgaaaggattagtgactaaattctgctgatcaaaaaggcatgaggcaccaattcatccaattcactcccttattgtgttactatgatcttgcccagtctctgaaactcagagctcagttttaagtttattttaaaaaagtgatcaaaccaccctttaaacccattgtttgcataaacatacttttaaaaaggaatgttatttttctcctgagaatttgttgaaggaagtgggggtttttgttataacaaacctagctcattacagaactggtgtcttaaccttcaagactgaatagtgatgtttatattctcattggatggtggtacttcctgtgttttatgagaatatgttgagcttttatgctggtaactgagggtaaaacccaggtaaataaacaccatagaaagccgaaattgaagggtgtatgtgtgtgtgtgcggtatttcaagcaggaaagcacaattcttttaaagcaggaaaagaaaaaacaaaacaaatgtctcttaaaagcacaaatggacaagtcattaaccagctcctttggtcttgtgtaacaaatcccttcaaaggattagagggggacttcaaaggaataaaaattctcaaaaccagacagctaatgactcttaaaagggcatttgcgttgacaggaaaatgatatcttaaacaccccttactccccatgttaacgctgaagaatgggtgagggatagaaaaacattccaaaccagtacgcggctcagaaaacagatgcggccaatgctcattagagctctggttccctgaccccaaacccttttaagactctgctaaaaactacgagactctactccccagaataattcacctatacacaaaatggtgcattaactttcgaggttcacatgtccccatcggtggaccccgaggaggggtacacctactcagatttactccggatttcgctgctctagaaatccctggaggcccagagccagctccgaggtggacggtcggacccctcacccgcccgttatccgcaaggctggcagcggctccacctgcggaccgggaaggcggccgttggggaccccggaggccgccacttggaatgttcccctttccaagaccaaatggacaaagagaaaggaccgagaaggagagggaagaagggagcagagtcaagcccagaacgctctccggactgcacctgcgcgcctccaggctctcctcgtgcctgctcccgtgcaaactttctggcccgtggtggctttggggagcgtcccagtagcctggagtggcccgcagaggcgccgggccgacccctgtccctgccgcccgccgcccagtccctctcccagagcccccggaatcacccgggaggaaggaggagcccagcgctcggcacagggggccaagggcacgccgcgagcgcgcacctggagccccctcgcgggccgcccgggtccccccgacgctccgggacgcgaggccgtggacaccgggggtggcaggggcaggggggccgcacttactctgaagggtccaggctcttcctttcgatggccgaggacattggggagggaggcggggtgccgggcggcgggggcgctccctttgtggcgcggggctggccggctgccggggctcggaccccctcgggtgctcgggcgccgccgccgccgccgccgtcgccgccgctcctgcgcctccgcttgctccggcgctccgccggcgagctcgcccctccgcgctcaaggacagtcaccgcgctcccttcaaacgccaaagagagagagcgaatcaccgggctgcgggcgcgccgcggccgaggcgggggccggggcgcgcagcctggctccaggcggctgcagctgctgctgctgctcaggacttaaccttccatcccggtcccgccgccgccaccgcccggtccctctcgcgcgctgtcgccggctccgcgccgcccgcggggatggtgtgcgcccgcccggccgcccggagcccctcgcaccttcggcccgggtcgcggcgcgctgctcgccgccgagggcagagagggggcggcggcctaggggcggggaggggaccgtgcgtctctctccgggcttcctcctctctcgggaaggtctattttcgctcagcttccctctgtctctggtttcatttcctttttcctgatcacgattcaaatacaatagaaggaaatcacatttaaagagacagctgcccggtccccccacctccccttttttcttcctttttttttttttttttttaaacggggctcctggggattagcaatacaaacagcagcatcaggactgacttggcttcttaaaggggccagtgtcggggacggggagagccgctcagcgaacacctctccttggaaaggaggctgggcaaccactaaatcattcttcagggcttcccctcttccgcctttcccttttggtttaactaaggcagaaagtaacccacgaacagctcgagcaagcaagaaaagacaagaatgtgaaataagcacctacagaaatgcaagtgttcccagtggattttccgcccgtcccaggttcgaggtcccaggtccacggacgccgtgcactgggatgccccggacagcgcggctctgcgggctgcgggctacgggctgcgggccccaggctgcgggctccgggctgcgggctccgggctgcggccgcgctctgcagaggcgatggtggtgcgccagccgggactgcacgggctggggacgcctagagcagagccagggcagctaatcccagagggagggtggctgggagggaccacgcggggccggggctcctctcagtcggctggtggcggaatcccctccctctgcacctttcagaaagcggactcctgcggttaaactgccccccatgtaaagtgccagtagtatcccgaccagagaaagtgctttttcaatggtcaagaacaggatcagagagattattttgccctgggtcaggcacagagaaagaaggcggacttgatttgggggttcaggcttccccctctcagcctccttctagaaagaggcaggaacgcagaggggaagcgggggaggctagtagtttgcccttccgtggagaaaaacttaggctctcctgggcctcagagttccttgaaaatatctgcgttcagaagctgaaaggcctatttgtgcgtgatgccagtcattaaggcttgtaaagagggaacgtactttcaggatccatggttttatatgatcagtctggatcataggcatacatttctgttcccattttaaggataaccagagtttactactgcctgcatgctcttgtcattttctggtccctgtgtcccaaggcttgggtccctaatgggtataatcaaaagctgtgtgtgtgtgtgtgtgtgtgtgtgtgtgtgtgtgtgtgtcccaaaggaagccttaagagcaaatttttgtcctagtggagacttcagtatacaaaaagactttttcggctgtgctcggtggctcatgcttgtgatcccagcactttgggagacccaggctagcctgagcaacacagtgagaccccgtttctacaaaaaataaaaaataaaaataattagctgggcgtggtggtgcttgcctgaaatcctagctactcgggaggcggaggtgggaggattgcttgagcccaggaggttgaggctgcagtgagccatgatcgcaccattgccccccagtctggggaacagagtgagaccctgtctcaaaaaaaaaaaaaaaaaaaaaagttgggtttttttttttccgatagacccttgtttttaatttaaaaaagaaaatacttagaatttaggcaagcctaaactatgtgataaatatgtaacctaccacactactttcatttctaacagaaatgaaaataaatatataggttgtgatgaacagtttacctacttataaccagtcaatgtggtggttaaacgctggaattttggaacccaactgcctgggtttgatttagact

SEQ ID NO: 914903 - DNA, 4001 bp, Homo sapiens
ctatgcaatttacgcttgtcacaaaattgtacttgttccccataaatttatgtaagtttttttgtttttgtttttgtttttatgagatggagtttctcgtcacccaggctggagtgcaatagtgccatcttggctcactgcaacctccgcctcccgggttcaagcaattctcctctctcagcctcccgagtagctgggattacagggatgagccaccacgcgtggctaattttcatatttttagtagagacagggtttcaccatgttgcccaagctggtcttgaactgctgacctcaggcgatctgcctgccttggcctcccaaagtgctaagattacaggcgttagccaatgtgcccggcctgtaagttttttaaaaacctagaggtgagtaattataataagtgatattattattattattactcttaacaacaatgacaatgatgactgatgagggctaagtaccagctactatccaagcacttccatgatttatttctattatttctcacaatgaccctatgggtacccctatattacaaatgagaaaactgaggctgccatctttctaaggtctaaagtgattttctgggagcacaaacaagagcttaattaattttaacagataaagacagaaaaggcttcacagaagattcaccttttcagggcaacctaaagaagtatgggttggttttctttaagctgaaacattacggcaagaacctggagtaatatctgcttcaaaggggagttatgcaaagtcaacaagagaagacgtgtaaaacccaagcacagtacctggcacaaagtagatgctcccaaatctttgttccccttcattgatcctctgtgatggaaggaacttgtagccactttcctcatccgccttggtttttcaaaaacaccctttgaagttataacctccttgggagccaaggcttctctgaagcaccccattacaatctttgccctcaactcagaactggaatgtgtttgaaaatgctaacaagggcagcagccccacctcttcgtcattgcctaaggttgttaggcaaacacacacacacacacacacacacacacacacacacacacacatgcacacacactcacacagttgctggggagatcatggtaaacacaagcctctcttttggatcagaataattgagtggtctccctttgtggccagtgtacaggaacaaattagatgggtaaattagcagttcccgaagacattagcaaccagcggctcacacagcaagcgcctgactcaccgtggggcctctccaagtcacagcctatgaatagatgctcttcctccctccgaaagagaagccagagtgcccggaacaccacaggggaagcttgaagacttgtacccctttggagtctttttattttaaaagaccaatttaatcaccacttcttctggctccttgaagatgaaaaaagttcccttgcaatcgtccattcatcagagaattaatgaagcctactcaccagcagatgatgtaatcctggtggcttcccccatcagatctaggctgcctgccccacggataccttctgggctaattgcctgctttgcacctgttccttctcgggaggccctggcaccctagcacctggtgcctgtgccatctcccctctctgccaggacacccagaggcccttgtgaatagcaaagcccacttaacggctgagggcaggtgggggtatttccttctcaattctgctcaaggcccgttgctgttctttgaggatgttgcaaatccagggtttggagggctgggcctcttggtggcctggttgtctatctgatagggcggagccttcacccttgcagcgagctctctcacaccagatgtgctctgcgtggaatcctaggccatcaggggattccttagcaagccctgcaggacccaaatcctaactcagaccctcatcctcctactcagaatgtggagacttgtgatcctcagtttggacgaattccaagagaccttccaattcccagaggccatctttggttctgttcacacatagctccctctccctcctaggccttctccctttgaatttctcccctacaccatcagcctgtatttacttctccttcttgcttaatgcatgactatattatcccagttaagggggtctgcaggttttatcagaaagttcagaggctcacatgacctggattggaacttggctcagccactgactagccagacaaactcaaataacgtacacagcttctcagcacctcaccccctcattcataaaaaacagggacaatggtacccactttgcagggttgttgagtggattaaattaaacaacacaaggaaagagctttcctaagttccaatgctatgtaacacacacagtattgtcttacccagcaataatttcggtgcacggatctgatcatctcttaattaaatattgaattctcctaacacggttctttttttgaacccctcagggtctgaacagttataagtgcacagaagttgggtctttatgagctgaataaaaggagactccggctgtcttctcttttgtccttaccataaagctcttgtcagctgctctcctggccctgcctctgaccctgggctttggggccactataggctctcctttccttgtccccctctgagtcctgaagtcctggtttgcaatctgctgttgcagttctctggaatggctgcttccccatgcgcccctgtctgtcagctacctcccccgcatgcatgtctgtctgctgggcaaggcccaattccgaggtgacagctcaccgggcctcacccacaagtctcttccaagcattagcagcccaccccagtccaaagatatcttttatagctgatctctggtggcacctcctaccttccaattaggagcctgtcaacacccaggccatcactcttcctgcagtgtctgacaacacacacgcctgccgcggctgcgccgggagagtcaagcaaaattgtttccatggtggtggtggtggcctgagcacaagagttgaaatctaggtgaatctgaatctagttctgccttctcactttgcaaggaggtgtcttatttctctttgaattggcagcaccaagcatcatgcctggcacacagtaggtactcataaataaacacgtgtaaatcaaaaaggccgaagatacattgctagcttgcagactccctttctcaatgtctaatgatatccagttcatttctttctcttacatgtgcaaatcagaaagttagctcataactcatctgttgtgactttttctttcctttacttttgtggttgaaaataaatttaccccagaaaagagagagagaaggtgcctgattcctttgtcctccctcttcgatcctctctaaatccctgggtcatggtaagactctctgaaattcagggccattttcagacactggagccaatgagggaagtatgacacaatcgaacatttttcttatctggcagtgtggtctggtggttagcatacgggctctgccagtcggaagtctgcctttctatttctggggcttaggggaaaccatgaagcaacagtcttagcagcccactcactcttgctttctctttctcaatgtaaaattgagttcacattggacctgcttacccacagcagtcaccagctcaaccagggaaggaaacgcaccaccctgctagccctgcttcagccttgggtgaggctgtgaaggctggtggtaagccgatgaaagataatccaaagaaatgaaagtgagggtgatgagtaggagagcggtttggggctgagggtacgaagatgccatgatgactgacttaaccacatcaaactaaaccatgtctcctactacaattcaccagcctgaaattgtgagaggatctcgggcgcggagatttcgctggctaaggggcaccctgtgtgcctacaagaggaggtgggagggaagttaaccttgcgttgtcctccagggcgc

SEQ ID NO: 914904 - DNA, 4001 bp, Homo sapiens
agataaacagactttataaactgctagctagactaaccaagaacaaaagagagaatgccaaataaataaaatcagaaataaaacaggagacattacaactgatataaaagaaacacaatggatcattagagtctgttataaacaaccatatgctaaataattcatatgatgaaattttttttaccaacaccaataatcaatctaactttcccaaattaattttaaaatccaccaatactttataataaatacatattaaactgtggtttatacctgagatttagattatcaattgacttatttatcttttctgaggcacatgttacctcagagcacattttaaaatttatttcaagattccatcatttatataattatacagaattatacttttcctccgtgaatgttggtgttttatatttttattgagatagaatttactataaaattcattcctttagagtgttccatttagtgagtatcagtggattcttaaagtgggatatactgatgaccactgaatgaaggaatgaagtacgaatctatgccacaacatggatgaatcttgaaaacattatgctaaatgaaagaaggcagacatgaaggatcagatatttattattctgttcatagtaaatgtccagaataggaatatacatagagacaaaaattagatcagtggttgctagggactgggaggaggagagatttcttcttgcgctgataaacatattctggaattagataatggtgaggggtgcacaattttaagaatacacttgataaccactgaatagaacactttaaggcaatgaatattatggtaaattttatctcaataaaaatataaaaaacccactaacattcatgggggaaaggcataattatttataattatataaataagggaatcttgaatcatgaagtattatataaatgagggaatcttgaattgtgaagtattaaaatgtgcttcagaaatgatcaataagtcaaccagtaatctaaatctcaggtatgaaccacagtttaatatgtttttattatggggtattgatgaattttaaaattaatttgggaaagtcatattgattatttaataaatatgcttatatataattggctagttttgtggttaaaaattaaggtggaatcttaactctcaccatacaaaaagtaatttccatatacattaaatgatatcatatgagttttattcaactttaaaggaacacagaggctaggtccttgcctggatcagtggtgaatttatcctgtgaaccaaggattatggtggagcatccacctcttcacctctagcccttcttctagtcttcattcgcttttcatttttccaattctttaaatttcctgtgttctgtgtgcatcctctcaccatcttttgatcaaacacaactctcaagtaagtttatttttttttatgattattttttgagacagggtctcactctgttgcccaggctggtgtgcagtggcatgaactaagctgaatgcagccttgacatctcaggctcaagcgatcctcctgcctaagcttcctgagcagccagaaccacaggcacgcgccactatacctgactaattttttgtattttttttttttttgtagagatggggtttcaccctgttgcccccaccgggctggtctagaactcccaagctcacccacctcaaactccccaaatgctgggattatagacatgagccactgtgcctggcctcaagtgagtttatcataggttaaatcactgcagtgaaccaccttatttatttctttagtatcaactcttcaatcttctgagcagccttcatggtacagtaaaatctgcccatgcctaatttattttcagactcttgaaagaccttgcattttcttttacttatatttttagaactttggaataaaaaagtttctgccttacttggaggaactgtggacatcaaggaaaggactccaaagacaaaaaacaagaccctcatggttgaataggtaaagcaggttagagagaatcagtagttgagatgaagaggacttctgtgtacattcagtcctctgaagaggtgagttgctgagtgattattgaacctttcaggagcaataacatttctgtgtttcaatgagattttatatcaggagacagcatgcaatcatcatgactatcagtcatttaaagtacatttatcaaaggtcaacagggtgtgtgcaaaggtagtagaaagcacagccatggcaaaggcaggagagagacttgaaatatcagcattgtcttatgcattctggaggaactgtaaaagttaaggaagcagttatagaggaaaagcattcattttatttttctgataatgggaagaaccacgtaatacaacagcatgcctatttattactattttggcaccgtgtgttagcatgcttaagcaatggaattataaacagactagtgagatacagaaaaacttttatttgattatctttctgtccaatcgatcgaatgagataaactaatttttatattgaaacctaagttaacacaaattgttttcacatcagttatatgtaatatgagaggaattaaagaaagaagagtgggccttagggaacctataatacacttcggaaagcaaataatatatacaaagaaacggcaatgcaacacgagcatatttctgacagagaggcacaaattacttcttagacactaaggaaatgaacataaacaccagaatactttgggtgccgtagggaatgcttaaagagggtatgagtaaactttatttatttatttattttttatttagagacagagtctcacacagttgcccaggctggagcgcagtggtgcgatcttggctcactgcaacctctgcctcccgggttcaagtgattctccttcctcagtctcccaagtagctgggattacaggcacacgtctccatgcctggctaagttttgtatctttagtagcaatagtgtcttgccatgttggccaggctggtctcgaactcctggcctcaagtgatccacatgcctcggcctcccgaagtgctgggattacaggggtgagccaccacgtctggccagaatatcaacttcagagactgcaaagtacatgcacattcctggtcttacttgaccttcattcctttctagatggtttcactacaggtgaagtaaattttctcagtaccaagaaggaagttctctttctgccatggcttcttcttggtgctacttctataatacttcagagtgttagtgaatggaacacgtggttacattatttgagcaggtcctccctgcctttagagactttgaaaatgaaatcttgagtcagggatggggaggtcttggaagaggcaaacttcccaagtcttagcctaaggagggccagtgaggggcatgaaagctctggagatgttttttcctaaacctccattcagttccttcctcctgagttgctggggcagcggtgcctgggcacaagcctctgccagcaccctagaaactcaaagggggatcttagggtcattgtgctggttattgctgactgctccatttactgaagccagaatggcctaggatcattagcatctctgatcaagaatccagcatttactgctttttctcacctctctgagaattatttctttcttgatcacgaggaaaagctttggaagtacagtttacactgcaaagcaatacaatttatgggaacaaataattgaaatcctttatggaacactaagggcataattttcactgcttgatattttctatgaacatttgtttgccagcctgatgtaggctggtgtaaatgtaattgtggtttttgccattactttcaatggcaaaaatcgcaattatgtttgcaccaacctaagagatttggagccaggaggcaggcttggaattctgcccaggaagcccaagaacattgtgtaatccatgggctaccaatcacggatatcaaagaagggtcaga

SEQ ID NO: 914905 - DNA, 4001 bp, Homo sapiens
caatgcccagcagtgtcctaaaaacagcaagttctcaaaactataggcattagttactaaaaacaggctgctgtgtgggaatccgcacataggcagcaggctcccttaattcagggactagagagccacctggtcttcctccccacacaacacagccttgcctgggtccccgggtttatattttctagcaccagatcctcctcttccaacaggggtgatacccaaatgagtggaggtccaaagcataggactagaatgaaacaaacccagctcttctgtgaggtgtaggcctgtgagaagatcagtattggtggccaacccctgattcctaagggtgcctactgagtcatctgggccagatcagcccctaggcccagcactgttcagtaataccagcatgctactaccttctgtaccatacctcaggccctgactgcaaagcaggctgaaactgtaagccttcttttggggtcctcccagaaaagcatgcttccctgggcacagagatacagattccaggagatcctgttcctctcttctcactggcatgatcctctgaggcagaaggttgagaacaaaggaacaggacagccacaacaagctaaggtctgggcagagaagaaatccaaacttgttgagcaaaagaaatcaagaacaagcaaataccagaagggaacagccaaaagtttttcaaagttatggagaacagcaaggaaaatggtccaagagtccagcaaagagtaatgaggagggccatggcacatagggaggagtggtgaagactgaaaaatacgtgagcagccaaagaaggtgcctaacagtgaggcagcatcctagttctggttcagctaactcacattcctctcaccatggggtgaaccaattctcagctaccctggggggaaggcttgttgaagatgacgcctgcagaagctgactggcagagtagtggactctgggatgggataccggcaggggcatttccccaccagcttcaccctggagataactccatgtttcagaacctgttacctttttcctcaaacatgagctatttttcctagtttcctttgaaagatcggaccgaaagtcaagttttcgtggtttaggctcacccttcaaaacacccgaaataacttttgcagaaatcttcctcatgttcaagttttctttcaaaatgagcctaacagtttctttgtctaaatttaactcttcagccatcatcctcacggttaactgcctgtttgaacaaaccaagtccttgaccttctggatattgtcatctgttcggtgggtgactggacgcccacttcgggcatcatctcgaacatcttcccgtccttctttaaaccttttgtgccagtcaaaaactctggcccttgacatgacttcatccccataagcttcttttaaaagatggtgggtctcacttgcagacttgttcaatttcacgcaaaatttgatactaatcctttgttctaaatagcggtcactcattctggcactgaacaacacaggaacgtttaacaggccacgactgtaagggaaagacggacagatcaatctttatagggctgcaggtgtaatcatatcgctcttcttgctcttctagaagcctcgccgggaaagagtaattgcttttatgaatttttgtccctcagcttccagtcgaggctggggagatccgttctgggaagccaacagtcgctgcaaagctgggaaaaattaaatcgcctacaaccacgtctgcatcaaaccagtgcacgcacatctgccgagagtttgccagtcaccaaggtcgctccgattccgcggcccttaaggagtatatggcgaattctgcaagaaaggcctaagtggtggcaaattaagcaagcaagaagagatgcatcggtgatgtaacgtgcaagctcgccctagatctgcagaaacccgcgcacgccaaacctaccggagcagcccaggaaccgcctgctctagcgtcccgggagacaggcgcgcatgcgcaattctctctccccgcggattagactgtgcgcagtcgcactgcggcggcgcgcgccaggtcccgcctccgcctcgccacaccccggcaggcgcgcttccttgcgcgtgcccgcctgctgagaaggcggaaaggaggggcgggggaggaaggctgagggaagagagggcacccccgggcgtcagggtgcattgtgggaaggaggcggcagcgtctcgggcgggcgggaggtgcaccagcggcggcggcggcggtaaatcctcccggccgctcacagcactgtggagccgcgtccccagcccggcctcggaccgcggcacccctcctggccctcgcggcttctagcccgcccgcccctcccccgcgcgtcggccctgccgagccggccggccggcctggctcccctccccggccccgacgggcgggcggactgccctgaggaggcggggaggggagggctgggccggccggcgggcgggcgacgatgccgaacttctgcgctgcccccaactgcacgcggaagagcacgcagtccgacttggccttcttcaggttcccgcgggaccctgccaggtaagcggcgggcgcagagcgggcggcccgggcccaccttcgcggtgagcgctgccagccgccggcccctggcgggctcccgggctggctgagaggggcgcaggaggcgggcgcagcgcactgccgtcgaccccagcgttggaccgagatggggagccggccccgagccgtgggcgggcgggcgtccggggacctcggagcacgtgcgctggtgggggctctgcgcggaggacaccaccccaaacgcgagggagctggggcggcgcgcggacgcgggatgctgtgggttctcgccgtggctcacttgctgtgtgacctcgggggagtcgctttcctctctgggcgttagtttccttagctgtcaaaagagagcaggactctatggttgtggccactggggcctttccctctccttgccaccacccccgggacagtgtttctgttttgagtcccgctaccttctttcatctcatcgcaactgctttctccttcggacttgtcattgcacggttcaggattcattttctggctgtcaccgttactcattttctcgcttgggtattgtagggataacagagggtgtacgcgtgagggcgtggaaattggtattggaacctcttccttcggataacccccacacactgacatatttagggaatgatagcatagggactgtgtttgaaaggctgagatgtttcataggcctgtcttgttggttcattcatttaaaatcaatgcctactatgtgccgagcgcaaatgttaggtgctgggagttcatgggtgaataagggtgtcactgcttgcagaaagctctcagtccagtaagggaacaggtgcagcaacgggcgactataatttatgttatttattaattagttcaattaattattgaaggtctacttgtgttggcattgttgtgagcagtgggggttacagatgaacaaatcgaagtccttgctttcatgaagattacattctaatggggggggaataaacaagtaaaatacgtagtgtgtcggatgatgataaatactgtggagaaaaataaacaaaggttagagggtaggggaataagtagtatcaagggacgcacaattgctattttaaatacagtgattagagaaggcctcactaagaaggtgaatttgagcaaagaccaggtgaaggggccagccatggagataccttgggcagcagcattccaaagaaggcaaagacagggcaaccaggagtccagggagagggactgggagagaggtgagatgagaccagaaaggtgtgtgtatggtaggggcaaattctttaggtaggaccttgtaggtcttggaaggcactatggtttttattatgagtgaaataggaagtcattgaagggtttagagcagagacttaaattttaacaggatcagtggctgctcatt

SEQ ID NO: 914906 - DNA, 4001 bp, Homo sapiens
acatctccaagcttccctttcgtcatcttatgatgggaataaatgagatgcttagcacagtgatcaacatgtagtaaatgttcattaaattactattgatgtgtgttattaaagtgtgtatatgacatcaagccttgacaaaacccactctaaggccaaatgatgaatttcgtattagctggtatgtggggcattttatgattaagcattcatctgttagaaattgaacctcatgatagcatagagaagcggatgaactatgagttctgactcaagcttcaaaggattacatgcattttttcaggtcccaatatatttctggtactttgctgtattatgccctttagtccttctaacaatcctgtaggtaggttttgttggggctgcaggaatgaattgaacacaggaaggtgcagaagtagagcctgcagggagcaggagtgatcagaattcacaggactcaacctggaccacacccagctccttcccctctgtaagccacagtcagcaaatatcctgattgcacagtgccaaggatgggagtgctgttgagactctcaccaaccctgcagagtgggaaaaaatatgagtacctccctcatgaattctcagtctcgcttctggcttcctgccccttcccttctttgacttcttccaggcaaggcttgggcataaataatctgtacctgagcatgaataaacactatgactggcttccctctcccaggggatgttttgcttttgcagctggatctctcatatcttctggacccaaactccaaggctccacattcctacctaattagaatccaaaggccttaacccagcacgtgggctcttccccagcttccctccctctctccctcctacctgagtcaacttgcctgtggttgtcttctctgattccagcccgaagaccctggtctacttaacccctcatcatactccccatctccaggattctactgatgctgcttgctgcttctgctggaatacacatacccaaatactgcctctactttaagtctcagttcagagatcacctcctccaagaaggcctctgtgattttacagctggaaatagtttttctctcagagaaatcattacagcaatggttctcaactttgaatatgaattttttgcacatgaatcagcccagagattttgttaaaatgcagattcacagagagtaggtcggggatgggatctgagattctgcatttccaacttgcccacccatgttgtttgctgatgcttctggtctgtgagttatccattgagtagcaagtcatcccccaatctggctgtgtatcagaatcacttgacaagcttattgaaactgtggatcctggggccagaggttgatccaggttttgtggggcctgaactcgttccatatagagagtcctttttaaagtatacatataaagttatgaataagaaattgccacctgtggtcccaactacttggaaagctgaggtgggaggatcacttgagcctgggaggtggaggttgcagtgagctgagatggcaccactgccctccaggctgggcaagagagcaagaccctgtcttaaaaaaaggggaattgctggagcttctcccaagtccctggaacaagctgtgcaagtgaagggtcttgaagtataaactccactagctgcaaggtaaatccatttttgcctggggcccatacgacagcagaatcttgggaggcaggaactatatgtgtgttttgttttgtttcattttcagaatttctccaggttattcatagtgaccaatcctagacccacccccacgccccctctaagaatagagcacttgaactcctgcccatccacttacctccctctattccttccatctccaaagccactgtgccaggcactgggatagaccccacagaaacaaggatcaaggacaggcaggctcctgccatcagcaagctcatggtctactggaaaactcgtgacagcttcacaaaatgaactcctatcagctgtttgcccaagtgctgcagggatcagaggagagaacaaaactcagtcctgataaaaagacaaaactgggaggtctcccagaggggctgacatcgagcgagctcttgccaaattactggggcttctccaagcagagggaatagcctgtgcaaaggcagggcagcctgagagaatatgttctcttcaagaactagccaatcaaatccacgtgtggcagaagagcagggtatatgttgggggcagggggcagggctgtgagggatgggtctggagaggtggctaggctctcaggacttggggctccttgagagtggatggtgggcagtggatggttttcaggcaggggactagcatgatcaggtccttttattacacgtgcatgcattactttcaacttccaacttccaactataactagttctttccatgacatcacattattagatccagcgacctttatttcttttttaaaaacatctttagttctttaatgaccatttcttttaaagtaattgctaaatgtcagatagcctgtgaagtattttcatcttatttgttcctcctacaaactctgggaggcataacaaatgatgtctatttttttatagatatataaactgaggataggaaagtttaagggacttggccaaagtaacagaaatagaaaatctgaaaagccttaagacccatagactagaatggtgccaggcacacagcaaggaccgaaaatgtctggtgaattaagagatgaatgctgaggttaaaagagcttcacttgttaaggtgatttagggaagcacgtgccagtaaatttgagggctgtggggcctcctttctgtttccctagaaattctaggttcttgctcctgggggagaaaaattcttcctaatatccatgcatgtgccctcctaccgttcccttccagaagccatgccttcctcatgcactctgcctcagttagagaaaagatacagcagaagcacagaccatggaacttagtgaagaaagttatttggtgattttatgtgactgggtggcaggtggattttaatagggctttttgaagccattgcattcaatacaattcaattctattgttccaattagggcaaatgaacttgactttaaaaatatttagtgagtgcctaatattgctactggcaagtgaaagtgagagaatccccaggatgctgtaggcctctgcaaacaggagttgaacttgacatagatccttgattttagttttccttctggaatacattctaatctatagcaaaatgtggctcctcgttcatggttgggaccttcagccatttcctccattgagttcagcctcatttccctgctctccttgccaaaaatgatgatggtcatgacatttcataaagcacgtgacagtattttctggacttgacaatagtacaggagaaaagagaagttagatcattatgattcctctcctacagaagttcagagaagttcaaaaacctgcacagttaggaagttgtggcactggggccagaacccaattttctaatgcctggtggggacaattccaatatgacattactgctaggtcaccaatctggcagttaattaacatctctgtgatgacatgttcacatgttattctctcatctgctcacactcatttttttctttccaaataagctgtaaacaagttataggaaggaagctatgatttcactcctactctcttatatgccaaacactgtgagatattatggggggtactaaggttacaattacgaacaaaataaacatacttcctgtcctctgagggtgtatcatctaactgaataatcatattttatgactttttgaatttttactatgtcttaagtattgcattctccactttacagatgagtacattgagatccagaaagtaaccaggaacttgtctagaaggggagagctgggattcccatggattgctggattgctccttcccagaagctggcccagggctga

SEQ ID NO: 914907 - DNA, 4001 bp, Homo sapiens
ttcttctcatctcattgggacattattcctgtttccatccttctcatggttgaaatgtctgtggaatgaatgcataaacgagcaaaagagacgctccctgccccttccagttgaagtcctcagttcagcccagaggtactttgccatcagacaaaagtacttggggttctccaagccgacatgctttttccagtgccttccttcgataattacagttcttgtgctcttagttgtgtgtattcgtgaattattagattttttattgacaacttctataagcacaggcctatgcacagtagacaagataaattaataatttttcacaagactccagggacccttctcatttcagcctcttgaattttcctgtattatctcaagtcctcctgggcctgaaaccttctcactcagatttttcagctggatccagctcccacccagcatctttgggcgagaaaagctctcctgccggcctcctcatttttggcttgaggtccgaacccagttggagctgggagacgtcgctgggcctgcccgcctcagcctccagtagaggagaatgggaaactcggaaagtccaaaagggtctttgagtgtgtctgccggcatccgccagcagccatcgcctgcattttatccagaaactagtgtcaggctttgcgaggtatccatattggtagttattgcacgctttcatcttggagtttctgaatattcatgagggaagcagaaaggccaatgttaaagaggagagaaacagaaatgcataaatattaataaaggcaagcccacgtgctcggaggaaggctatgaatgttaacgaggggatgacgtccagctcccgcgcgtgccagttgggtgggtgcccgagcgcgggcgcgcccccggagcccgggcacgagcgcggggaaggggtggggtggaggcgggagcggagccgggcgccgccggagctgcgcggggagcgctcgctggctggctggctggctggctctccgctgcgctgcgctgcgctccggccgctcccgcggcccgtggatgggggtgtccggctgagccccgggatccgcctccctccgccaggacccgcacaggtgccgtcgcgggggttgactttagttaggacccgactcactgctgggggtggggtctggtgggggtggtaaggaggccccgggattctctgacaggacggtctggggtcgccgcagctcccctcacctggtcccattctgggattagaaaggaacaacgggaggccgtcgccttcctgcccagcccttcagggagcgcagctgggacgccgcgccaggccctggagatgtgggatgatgggcacttccagtatcatctcagcatcggccctccagccaggcctggtgtgtgtgtgtgtgtgtgtgtgtgtgtgtgtgtgtccgcgtgtgtgtgcccgcgtgtgtgcgcgcgtgtgaaggcagggcggcgaggtatgggggctgggggaagaagggaacgccgcccgatcgcgctggggcagtgggtcggtacctcgtcccgggaccgttatctggtccagtcaccgtaaacgccccaagatcatctttgtccctaaaaacttacccccgaccccgctcgtgcccctccccagagtgcggagccttccccagaccgcgcattcctgcagtgtcagaaccgctggcagcggccgcagacgccgggagagcgattgttttactacagacgggcgggagaagggaccggggcggctgcgcggtggcggggcgcgctgccgtcgggtgggccccgggctctggaatgcggggagcagtgtttgacggcgtcgaggaggtatcacagcccgctcttcttcccttttgcctatcccttctctcctcgccgctaggcatccccgactctcatccctctcccgtgtccgggcttgtttggccggaagggcagtggagtgtgtatgcggcctgcacgggatgagtccggcttcctcagagtgccagccattgtgctgcctggaggaggctttctttaccccaccggactggggggaggagggggatctgagatggaggtgaatggagcagcgggaggagggggaggggagcaagcagaaccgcgaaggggttgctgatccatatgcaacgaaatactttttctgtcaaaatgtgcacaaacatgcacactgggtgggttctgcggaggagcagtgggaaatctgaaggtggatcagtgcagggtaggttttagggacggatatgggggacgaggcacggaatcagttgatctatggaccaagtgatgggaagaaggagatggaatggggcttgtgtggaggtgccgaggcccagcggggttagcgtggtgaaatctccaccgctccgctccactcgggtcagctcagcaaagcagggactgagcatttgtaccgcagccccgagatgcagcgagtgcatcattgtgctgcagggagacgtttatgcgtttcctactgggtctctgttaagccccgtgagtgtcttttcttttccaaattacaccatctattgggagtgaaaataaatggaatagattgtaggacaatcagactatagtcctgcgctctgttctgtggtaaagagaaaaagaaaaggcgaccctcccatggttccttctttctgccattttcatgtatgtacgtatttatttttgatcttggaagtctaaagggaataagctatcgcttgtattaatcctactttaaggaaaagaaggctcccagatgagctatgaatgaggatggtgcaagcttgccaggatggaaaataaggttgtttcagacattttagttgaaggatgaaagcactccgtgaagagaggagggcgaaagaaagtgggctaaaggaaggaaggcagggtcaccatctaaggaagtgctgccaaccccaatccacagagccctcctggaggctatagtggggccagtcagaacgcctgactctcatctgtgccacagcctgaggtctttccacaaatgctggattcagtttgggtgttgagtgactagtttcccagcactggctttcactttaacttcatctccagatggtcattcatgcagcacttcttggctcttggataatgagttgacaaaaaacaatcagtctatattatggactgtttcaaatgagcatgtgtctgaaccctagagctgtgatattcatttcgtcttttataattttctagatgaatccattttctctacactctgcctgggcagagtgctttcagcacactcttcctgttgccaacactcaaaactcagtcttagtcctagattctggttggattggcctcttgttgctggttaatcatatagactgtgtcatttcaaatcagaaaccccactggtgtcaccatctgcttctcccctgtcattcccagagaaaagtacaaatttaaaggcagtgtaaatacctgcaacactatcggattggctttcatatctctgtaaaatggaacccacgatccaggaacctttgaacaaataaattgaaaaaagaagccttagtaaaaaagatgctaaaattctttcagcaatagttctcttgtttgataagcatattgaagcattgcacagagaatatcatggcagggataatttttcttttacttgaagcactcccacatcacctttctttctttctttctttctttctttctttctttctttctttctctctttctttctttctttccttctttccttctttccttctttccttctttccttctttccttctttccttctttccttctttccttctttctttctttctttctttctttctttctttctttctttctttctttctttctttcttttctctctttctttctttctttctttcttgagatggagtttcgctcttgttgcccaggctggagtgcaatggcatgatctcggctcactgcaacctctgcctcttgggctcaagcgattctcctgcctcagcctcccaagtagctgggat

SEQ ID NO: 914908 - DNA, 4001 bp, Homo sapiens
ctttcttttttcttttttttttttctgtgaagctgggagacacagaggcatagtctccttcttaaaatttgcatcagagttgaccagcatccatttcattttgttgtcttatttattcagaaattatggttatctgctttcctgcatggaacgtaaatccttaaaagtagggcagaagtggattcatgcttggattctcagggcctggtttactcagtggtcccaaaagcaaacatctatagggtggtcacaaagaaggaagccaggtttgacaccagatgttaaactgtgtgcatctcaattaagcataatccctgcctagatacactgccttatagcaatttctttggaaagtaacactgaggttaactcttcaccttttttaccactgtgatttattcaccttgaattaaacatttacaaaaggcctactataaaaaagcaatacgtaaggaactataattatggccctgtgaaatagattttttccccctttttaccaatggtgaaataggttcatgtaatagcaacttgctaagataattaattggtagctttgctacttactataattgcaaagtctgggatctttcctctacaacaccgtagccttctttactttttttaagacaagctctctgtcacccaggctggcgtgcaaaggtactatcatagttcagtgtaacctccaactcgaactcctgaactcaagcgatttgcccttctcagcttctggagtagctgggaccagaggtgcatcccatcacgccaccaggttagcttaaaagctttatttttattttttatgtagagggtggtctccctatgttgcccaggctggtctggaagttctgggctcaagggatcctcccactttggcatccaaaagcgctgggattccgggggtgagctaccacatccagcccacagtggctttttttttttagggaataattcattctccattccactgtctgtacatttttttttgaaaggagattcctcctctgtattactttgagcatccattggatgtcagcactgttccttccaaaagtctgctcactacaaactcaatcttaaaaaatttccattgacactatgccaatcgattattacaactgaaaatgacattagccctatgaaaatggaaaatactcagtagagaatataaaacatttgtctaatatgaagtggtatctgagtcaaagtactggaaggaaaaatgtacttcagcacttgtctacagtttaactgaatgattaatgtgaaatttaaaattggatccccagatcttgtttccagcttctttcttttgggacttttagccctggatgccttattttccaggggtaaaggatgttcttgcaaatcgttccttgattgtaatggatgaaaagaaaaaagaaatgggagaggcccactgcatcaccaactgcaacggaaattccctttgatgaatcaggaagacaaattaatgtcatacgctagcgtgcagaaaagtaacctctgataaagttgctattgtataaaccgcagaagcagatggcttccggccgcagagcttaagagacccttcagcttctcggtgtaggtcaccagtcatgtcacgctcacaaccctttcgcctccctctaggtcaggcaccgcatccaagttaagcaaccgacgccggctccttggtgtcccaacaaggtctagtagaaaagcaactttataattcgtttcacagatttgattaagagccaactgagtagtgggccttgtgctagggctccgagggcccaaggaccccatggaaccagatttagtcgctgacctctaggagctcacaggtgagtgactcacacaccggaagacgagatcaataatgtagacatgaacgctggctagccagtcccagaggaggtgtcatctgaccaaaccaaggcaagtctgggcagttacgcagacaccccgagaaaggtacgccaacgcccagataaaaagtaagaaaaagtaggaaaaaccctcccatcagaccagcaattggctcgacgcttgagcccggatgtacggcacgcgtcgcgacctaacccggaaacactgcctcccgaaaaaaaggtaaactctagactgcggaaagtaaactacctttcccgtcgtgactcagttagaacctcccggcatcctctccacctctggtttcccatctatttttcctaaagcctaggcgaaataagacttcatctcccagaatgcccttggttaagttaacggtgcgcatgcgccaagaggcgggccctcgttgcccccacaaccccgcctccgttttgccgccgccattttttcagagactttcatccggcaaccgacggggctttttttcttaaaggagaagcgacagctcaaaatactacccccttctccgcgcaagatctggcggcgctggggacagaaaggccaaagacaggaaagtggggtagggtggaggcggaagaacgcccaggctacttctgcggcctaaagaagaatagaaagagcccttgtggtatcagtggctcctcagggaggcaggtgcgcgcgcagccagtctagggtttgcgtgaggcggggaaagaggtgcgatttcttctcacccgcctccctcgcgagacctgcccctcgcactgcccctagcgcgcgttgaagtctggaggggggaaaaaggtcactttgggattgtcgcgagacacagccgtttaacggtgagaacgggtgcgcggggaaggaaacctcgcgcgctccccttttagccgtttcctgattggctgaaggaaggggtgggggagggaacctggggcgccgctgcgtgtaagactgcgaggggcggggtgaggaggcttgtcctcttttccgattggcccgctgagcgtctgtggcgcgcgcgcgcgcgccgccagcggtagcggaccttgagtggcagggggtggggggggcgccctcggagccgggcggaggggaggggggaaagaggagcgcagggtgagagtgagccgcaggcttcgggaggcgagggggcggggggagcagcgccgaggccgccgcctccgcctccgccgcctaggactagggggtgggggacggacaagccccgatgccgggggagacggaagagccgagacccccggagcagcaggaccaggaagggggagaggcggccaaggcggctccggaggagccccaacaacggccccctgaggcggtcgcggcggcgcctgcagggaccactagcagccgcgtgctgaggggaggtcgggaccgaggccgggccgctgcggccgccgccgccgcagctgtgtcccgccggaggaaggccgagtatccccgccggcggaggagcagccccagcgccaggcctcccgacgtccccgggcagcagccccaggccgcgaagtccccgtctccagttcagggcaagaagagtccgcgactcctgtgagtaacagtctttcaggcggtgggaaagacccccctctgtccgtacgcaaccctctcggctcccgtagcgcctactccacgtgacatcctgcctggtctgccccctgccggctccgcacgccagatgtcacaccgtttccccgggagccttcgtgcctcctctctgcgccaccctcatctcgctcctgtaccttcgcttgtcgggccgtttccccactccccgaaatcatcttttgatacacccctgcactcgctagtgatccacctcctccctgacacccgcaggctcatccctctttctggcatccgcaccccctttgtcaccctatccctttcctttaggcggctctccagtattacatcacatgccctttagggaatacacagcccgatcatagccttcaaaaatgattcccccccgccttcgcgttagctcaagagccagatgtactagtgtgtttatgtagctttttttttttttcacttttctaaatttttcgcaacccttctcattcttttgagaaatttgccacttattatgg

SEQ ID NO: 914909 - DNA, 4001 bp, Homo sapiens
gcctacgtaatgagggtttaggtaaaaccttctgggtgtatacaagctgctagcctctgaggcaccactgcagacaggaaatatttgctcacttgagccaacctgtcctcgatgccatttctctgccagcaggaagaaagatccacaccaagtctcaagggtagttactgggctgatgacaatttgaagaaactgttgaagtgtagccatcaacagcctgtggagacgtagccaactggataatctgcacaaatattagcttccaggctacttggtactttctgtatttccagacaagatttacctaacatttagcctgctcaggagatgcaaaacaatataagtttctgttaaatctgggttacttcattggacagacaccagaaccaataaacttctaaaataggagagcaccttgttgcttagttttggtgtcaggtgttcccgacagtgacattgaaaaagttattttgtttttcttagttttctcatctgaaaaagaagtggataacacctatttcagagggttgctgcagacactaaaatgattaacatatgtaaaaatgtctagtttttgcttgatttactaaataagtattagtttccttttgaattatttgccatgaaagcctttcggtgtcccctccatcccccccaaaaaaaagaaagagaaaaagaaaaaaggccctagcactactagaactcaagcagaaattcacattctcccagcactcacgtaggataagaaatagaattctaccccaagtccaaaaaagagtctggcccaatatcaaaatagactttacctccaaagcagtttgatatttattaaacactacctttttctcttcattaacatctcttgcctcctggtaatttgccctttacttttcctctgtttctccagctttgaaatcacacgccattttttttaagacaatgtaacaatgtgcaagatattttttgttgttgttttttgcacttttgacataccctatccccaaacacaccccaaaccaggacactgtggaattaatacagtttggaaattgggtatagtttagtgactcagtgttagttaagatgctggcaacagatgttggcaaaggctatggaatgagtcccaagaatgacaaaccttacattactccaaaggtttgaaatccaggatttctctggttaatatggttaatagttccactgctggttttaattgtcttagagtggaaggaggtgtcatattttcaggccctagtaatctcttccttcagaattcttctgaataaaaagcttagcaacaaaatcactagagttagagtgctatgccttcttgatttaatactaaaacatggaacaaatgaaaccactctggcctttttccaacctctacagatccctcattcttatacttctagtccgtcttttcttcctcataacaccccaattccctttttgctctttcttttcctcctcaaatcatatctctgcattgtctcgctatgtggccacccttgatctccagtgacctccaaagggcaaaacgcccataacaagacaacaactgcagtaacaatccagtccaaaagtatttgccaagagtttattccgcggttagcaccaaactctccatctattttgccactgcaaacagtgaacccatagttccccaaaacaatcatagttcctcatgcttcactcttggcagggctgaggacaggaaagaagtgaaaataaaatcttccattactaccctcagtctagccagaagtataccccaccacacaaggagatggcagccaagtcttcactccctcagagtttctcctcaggctcctcactcacctaactcttccattgtcctacatccaagatgctcttgtctcacaggccgtgaggaacagctttggcatgtgctgaagaagaggaccgcaaaggaactggatgagacagcataaggcagcctctataaacctttttggttcctgtatttgcttagcacttcctctcttttgatttggtgagcttttttttttttttcataggttacacagttttaaaaatgtgactgacatagaaaggtagatagtaagatttgcattatggcagtgcattggccagggtgataaagattcaaaattaattttgcaaaatttgaggacctactctgtgccaggattcatcttggattcatgggaatggcagacttatacttgcgttttttccaagtgtaggtaccccactctgagcatctttcttttttcttttttttttttctgtgaagctgggagacacagaggcatagtctccttcttaaaatttgcatcagagttgaccagcatccatttcattttgttgtcttatttattcagaaattatggttatctgctttcctgcatggaacgtaaatccttaaaagtagggcagaagtggattcatgcttggattctcagggcctggtttactcagtggtcccaaaagcaaacatctatagggtggtcacaaagaaggaagccaggtttgacaccagatgttaaactgtgtgcatctcaattaagcataatccctgcctagatacactgccttatagcaatttctttggaaagtaacactgaggttaactcttcaccttttttaccactgtgatttattcaccttgaattaaacatttacaaaaggcctactataaaaaagcaatacgtaaggaactataattatggccctgtgaaatagattttttccccctttttaccaatggtgaaataggttcatgtaatagcaacttgctaagataattaattggtagctttgctacttactataattgcaaagtctgggatctttcctctacaacaccgtagccttctttactttttttaagacaagctctctgtcacccaggctggcgtgcaaaggtactatcatagttcagtgtaacctccaactcgaactcctgaactcaagcgatttgcccttctcagcttctggagtagctgggaccagaggtgcatcccatcacgccaccaggttagcttaaaagctttatttttattttttatgtagagggtggtctccctatgttgcccaggctggtctggaagttctgggctcaagggatcctcccactttggcatccaaaagcgctgggattccgggggtgagctaccacatccagcccacagtggctttttttttttagggaataattcattctccattccactgtctgtacatttttttttgaaaggagattcctcctctgtattactttgagcatccattggatgtcagcactgttccttccaaaagtctgctcactacaaactcaatcttaaaaaatttccattgacactatgccaatcgattattacaactgaaaatgacattagccctatgaaaatggaaaatactcagtagagaatataaaacatttgtctaatatgaagtggtatctgagtcaaagtactggaaggaaaaatgtacttcagcacttgtctacagtttaactgaatgattaatgtgaaatttaaaattggatccccagatcttgtttccagcttctttcttttgggacttttagccctggatgccttattttccaggggtaaaggatgttcttgcaaatcgttccttgattgtaatggatgaaaagaaaaaagaaatgggagaggcccactgcatcaccaactgcaacggaaattccctttgatgaatcaggaagacaaattaatgtcatacgctagcgtgcagaaaagtaacctctgataaagttgctattgtataaaccgcagaagcagatggcttccggccgcagagcttaagagacccttcagcttctcggtgtaggtcaccagtcatgtcacgctcacaaccctttcgcctccctctaggtcaggcaccgcatccaagttaagcaaccgacgccggctccttggtgtcccaacaaggtctagtagaaaagcaactttataattcgtttcacagatttgattaagagccaactg

SEQ ID NO: 914910 - DNA, 4001 bp, Homo sapiens
gcagaaataacacgcgggcgcgggccatgtgcttcagacagacccaaccgccacctgctgccggggaggcctgcacagctcagtgacacctgggacatctcggggtggggtccttctgccgccccttgagctccagccccctcaggcagccaggccaggccaggccactgctcctccaagagtccagcagccatggtcggggagggggtgtcagccccagagagaggaggggtggaagcaaagccttgtggggagcagagggcggaggaagggcgccgggagtgcagccgggtgtggggcacgcatcctcaccggtagatgagggtctcatcttcgctgctgttgtactggatttggaacatccacactgggtcggctggccgcccgggaccccagctcaccagccctgaggtggcggtcacctccgtcacctgcacggctggctcagactccagcgtcccctcaccctcggcagcagtgcgagcggaggcggcgatgtccgagggcccggggcggcccccctcggcactgctgttcccaccatggggcaaggccagcacccgcagttctactcgggctgtggcctcaccagcagggttggtggcgatgcaggtgtagcccccagcgtccccagcgccggtcaccccaatctctaaggtcccgttggggaaagcccgggctcgggaggagttgccaaccaaccggtcgtcaggaccgacccagtgcatggtaggcgcggggtcacccagggcccggcaccgcagcgtggcccgctggccttccagcacccagaggcgctgcgtgtggcgggcaatgaggggcggctcacaggagaactcgccctcgggcactgcccagaagtagcggccggccaggccgggcggggaggcgcacgtttccaggtcgtccggccgcgccagccgccgcagccacagcagctcacagttgcagtgcagggggttcccgctaaagctcagcaccaggggggcgggagaggcctctgcatcacgcccacgagagaaaagcgggtccggagccagcgtggccaggcggttggaggtgaggtccaggcgggagagctgaccgagctgggcgaaggcgcctgggggcagtgcgtcaataaggttatggtccaggttgagggtgtgcagggcaggcatggcgccgatgccggcccagggcacctgccggaggttgttgtaggacaggtccaggtcctccaggctctctaggaagtcgtcgaaggctcccggcgcgatgcggcccagctggttgccgctgaggatgaggtgctgcagattgacggggccccggaggctcccggtgcccagctccaccagcctgttgccgtcaaggtggagggaacgcaggctctcgaggtccccaaaggcgcgggccccaatgcgggtgatggcattgcgagacagtgtcaggtccaccagtcccgtcatgttgcggaagtcagggggccccagggcctggatgaagttgtcagccagccgcagctccactgtgcgccggtccacgttgggcggcacaaacagcaggcctcggtgggcacagagggtgctgagcgactcggacaggttctggcagacgcagggcagcgggcaggcggccgctccactggccagcagcagcagcaggagcggcggggccatggtgagcgccctgtaggaaggggccacagcccaggcacaggtggggctggcgcaggtgcccacttgggcccaggacagtcccagaagccagcttctgtgagcctggcccggggaggggctgggtcagaggcccaagagggccgccagagatgagggaaggttggggcctgcagggccaggccccccagagcaaaggtcacatttcccaagcagttaagggggagtccaggcgctggggacaaggtgaggcatgaggcaggaagcggaggaggaccgagagcagggagggtcccggaacttcctttcccaggcgtccccaggaatcgccagccgcctccccactccccgccataccctcccccgccagagaaggcgccccccgaacctcccgtggagtccgtggcccctccctggccggcccccgcgctgcgcccggcggccccctcacctggtgtccgtcgctcagggggcgcgggccggcctccctgcgagcccggccggcccccgccgactcctggccgctctcccgcggggacgaggcccggggatgaccggccgcccgccgcccaccctcgggcccatggcgctcgggcccgcggccccggctcgctcggttcccggcaccttttcccggcgcggttagcggtggcggcggcgacaggcgagcgggtgcgcgccggcgggcgcgcgcgccgcggacacgcacgtggagggcggacggggaggggcgcgcggggatccacccgggcccgggccggctcctgaggtcacggggacacgcggccgctgcagcgcccacgggtggcgcccagtcacgcccgaggcccgggccggcgcgggccctccgcgctgtcccccggcgctgccgcagcgcactcaccctggcacaggcgcgcgcgcccccggccatcctggcgccccggcatcctgcaccgcacgggcgcccgccgccgcggcgcgaacctcactctgcagacagccagacaaagcgcctgctcgcgggccccttcaccatctcccggagacgggcgtctttgtcacatgtcgctgggcaccctccccaacacacccacacatgcccacacacccacacgtccctgcacccacgggcagggccgagcgcaaacccgcactgttgctgggacccttgcgttcacagacacacgctgaaggtcataaccgttctgcatcaccgagtcacgtggagggtccccaaccggcacggggttcggccgtggggggggctggggcggcgcccctggcagggctgctgcggggtggggccgagagggcttggcctccgggcaggcgccccgcccccgccgccccgccctgtccccagctgcctctcgcctctccctccctccccagctgccccgcccgccccgcgggccaggcgttccggagccaaccggcctccgcctcgggccggattggtctgcgcggcgcggcttcccaaccgccgggggcacgcattgggaagctgtgcgtcctcgcagcgcctgcggcccctccctcccgctctgtcgccgccgggccatttccctggaagagcggctcggaaccagctcctctcagagaaagggctcccggcgtgaggtgggggaggttctttgcttcctggttgagaaagctggggcttcggtggctcggcgagcctggtttccttccagctgtgcccgccaccaccagtggtctgcccagttgggaaacaggaagtcaccacctccccgtgtctcctggtccttaagccacctaaacctcagccatcctcgttctccctccagccctgatccccatgggccaggtggcaggaaactcggggaaacccaagattggaattctgatcctgtcagcacagcagtgtagtcctgggcacgttacctgaccactgaaaacaagttcctcctgtaggccaggagagttggatggtacatacataagcatttcctaggggcgagaggggaggacagctgcagcttgtgaggggcttacaggcagccagaagccattctgtcaccactcactgggcctcagctgtggcgtttgtaaaatgagggggattcagtcctggtgcaggtcaactctgatgtgcagtggcaccagctatgtctttgttcctcttctccccatcaaaaatgttttccaccgggtgcagtggttcatgcctgtaatcccagcagtttgggaggccgaggcgggtggatcacttgaggccaggagttccagaccagcctggcaaacatggcgaaaccccatctctattaaaaatacaaaaattagccgggcgtggtaccgcatgtctgttgggatgaggcacgagaatcgcattaaccaggg

SEQ ID NO: 914911 - DNA, 4001 bp, Homo sapiens
aaccttccagctcccccttccctagggcagaaggcgacaatctcctctctggctttgttggtatccgttttaaccctaattttttttttttttcccagtgccttgccatttcccttgatctttttcaaaacttcctccagggggctgagaggaaagttccatcccctttccttgcaacccgaagggggaaaccccccaaaaagcaaagctgtccctttaaggggcccatgtggtgggaagaacagctacattcctaccccagtagggccgctgtcccaacacgccaaagaggctacaaataaccttccaggagagagccggggaggggagagcgcagagcggagcggaacgtgggccggccaagctaccgctcttcggagagaaagagctcagtccgcgctagagaggacgcggaaaaaagcccctgaaaacccacaggtagtttaaataagagacatgaaaactctgttttggatttgggaggtaaaccaatctttaaaacgagtgcctagacatctccacgccctgccaggcaagttcggaaatctgcactgactttttccacacgagctgtcctacgtgaaagaaagaaccggtaaaagaccaggcagggtctccagacccctccattctgagccccagctcccttcatcggggctgcgaggcaaatggggagactcggaactcccgccacgatgaatagcgatgggtgaatagggctggggttcaaagatcaaagttctttgatctctgggcacaaactagggaaagctgctcaatcacggggtgcacccagggtcgttaagagcccgcggagaagcagattccatcggagccctagtcccacacaacagggggtacgggcaccaaggagtcctgctgcagccgtccagctcccccgagggctgggaccctgccgcgagggcccggcggctgccttctggggttcagggttaccggccccctgcccccctaccccagccagggcagatctgcgggagccttccagcagtttcttccctatattcctcctcagccccctttccaaccacctccctttaggacgatccagggctggaagctgactggccgcagccaagagagggaccccgaaacaccgccgaggggagatgctgcccgcaaacagtgccccagagccccttggtgggagcaagacctggagtccgggaatcgttctccgagtagaggaatcccggtgcccaagtaccagattctaccggggcctctctccgcaacccgcccgagcccccagccccaggaaggagggctatttacaatttatgggtttagcgaccctcctcacccgcctccctttcttcgcacgcattcattcgcaccaaggacacagagcccccgacctaacctgaaagggaagcagcccccgctcttgaaagagcagcgagggagggcgagcgaacgaacgccccggaccttacccgcgccccggcccagacccgcgccccggcccagacccgaacccgcggaagcgcctccgctgatgcccccgctcggactgctggagccggggccgctccgggtcctctcccctgcacgcagccccagggccacggctaggagcgagggcgaggggtctcaggccccggcccgcgccgtccaggtcccgggaggcgagtcctgcagcggccggacccagggacaaactttcccggcgggcgccgcttaccgtgtgcgcagagcagggcgccaagcagcagcgcgccccactgccgcctcatggtgccgcccgcgccgctcgcccggggtcccgccggctcccgccggacggcgcggcggagaagcccgcggagggtccccgagggggaagcgtcccgggtgcacggcggcctgcgcgccccgcaagtcgccctcgggccgccgccgcctccagtgctgccagagccgacgctgccccgccaggggaccgggagggggtgtcccgggcccgaccgccccgccccccgcgccgcagccccggccaccgccaccgcgcctgggcccgcccccagcgccggcccggccccttcccgccctcggccccggctccctggtcccccgaccccacccgccggcgcctcctgcgcggggccccgctcctcctcaggccgcccccacattcctggcccgagagagagccccctccctgtcgctattactactgcttaaatttccctaacttaaaaaaaaaaaattatcctagcagcaagtctcgcccccgctcactccagctctatgcttcagacgagcacctgagctgacccaagtcgcctggacgtgaccctgcccccgcctaccggccccaagtccagacttttttgatgtctgcgaatacgcaaggcttgtggatgcataatcctcttgggtctttattgacatcaaacaagggacatcagggggcctggagtgctgtatcttaactggcgttctcactgtcaaaattccttttcggagattttcttctccctggcctcccccggtctaggcagcgttgttctagggctaaataattcaccgacccccccgccccttttcattcactcatttcctgagatggttgtctgggtcctgttgctccagctcagaggcccagattcggcccatacagacttagttcctccttgctgtctttgtaaatcactgttgttagcctcttcaccttctttgactttctgatcctgacaaggaagggagggggtcaggaaaggagtcctcatgggcagctgcactcccacaaagccctcagcctccttccagccccagtctgtaggtccttccctcagatttaacttttgatttactgcataaaatcataaacttgtctctagtcttccttccttttgtggtctactctccctaatgcatattaataatacggattaatttcaccaccttccatttttccaggttgaatcttgttttgttccttttgcccaaatgcccaactttctgatggcccagtatatcgcttttttccctcccagctgatatgccagcatttcttgggcttggatcatctatggatttcattaactcactttcctcaccagtaaatagagtcaggaagacccaaatgccccctgttagctgaggggaaagtaatttggcatagtgcaaagtggttattagatttctctaaatggatacattgacatttcatccttgcttgtttttttcagtactttcacttcaaattaccatcttttaccaaagctaacatgaaccatactttgcgacagcaacaacaacaacataaaagatgtaaggtgttaactccttgttaggcagtagttttctatatcgttttgcctgaaatttttatccagatgcaatgtggttgaactagcatcaccatggtaactattactgaagcattttctgggtgtgtagttcttcttgctgactgaaggcggcagtagcgtcaggtcaggcttacatgatcttggggctaggcaagactgtcaacatttctggcctcgatcagttaccacagcctaaaatccaaggaggaaaaaacgtcaaaagtagaggctgattccccagcatcctccttcccacctctcatttcctaatgcaggtttggttggtctcagggtttcatatatgttgcttatgaagacttgctctttttttttcttttttgagacggagtttcactcttgttgcccaggctggagtgcaatggcgccatctcagctcactgcaacctcggcctcccgggttcaagcgattctcctgcctcagcctcccgagtagggtagctgggattacaggcatgcgccatcacgtccggctaatgtatttttcgtagacggagtttctccatgttggtcaggctggtctcgaactcctgacctcaggtgatccacccgcctcggcctcccaaagtgctgggattataggcgtgagccactctgcctggccgaagacttgcttttaaatctgttgggaatgaccttgggattctggagaccatatttttttcc

SEQ ID NO: 914912 - DNA, 4001 bp, Homo sapiens
acaaagccatttccgtgcgttcacagcttccaattgcaacaggaagcaatcaggaaaaataattagcggcccacttactggcttcgctgaggtccgaggcatgtatttcacacagtaaaaccagggatataacatcaaaaccgttctgcagaaagattcctccctttccttccattttaggcctggatcaccacattcactggggctcccaggccttgctgcctaatgttaaaataatcaactctatttttgcctcacacacaactgaactctacagctataattctttctcctcaggggctcgaaccacatggacgacaggcatttgactccagcaacatcaccccaaaacgtgcacaaaacccaaaactgcaatgaggtgaaaggcaacgcggtcggcctagaaaccccccctttaaaacaaacagtttccccaaaaccccttttgcctccttgacccaggcatttccggaaaaaggagcggcgctggcctgtactccccagatactgtcgctgttttgtcttcaccttgttttgctagctccagacaaggccccacaatgtaaacacgctcctgaaagaggcagatttggggtgaaactgtccatagaatctctaggcttgggtcagaggcaggaggacgtgaaacaaactccaagctcctcctgttccccgctgtcccccacacctccaagcagaggctgcagcctgggggatctgactacagggccaccccgctgcaccattcacactggaaatattcagggagacagctgtttgccttaaggaggcccagacaaaggggcccgaggtcctccccgctaaactgccacaaacagaacaggagccgcggcgtgcacaggcacttgcggccgtgccacttggccagccatactccagaaaaacaaaacacgcacatccgaagagaatgatttaggtagcaagaggcttgcttgaaaaaccacatggcaatctccaaattaaaagaacatgtgtagcgtttcacgactgcttaagtttcctgagtcctcctgacctcaactccaccccctgggaaacaccaaaagttggagagaaagttcccccgccctacctctccccacgggagtgtacaactgaggcacaagcctgcctcccccactgccccgcgatctgggaccacgtcacctccgcgtagccgacccggggatggacactatctggggacccggcggccacacggggcattcgggtcgcccgggcacctggcaggtgtcagtccgcttggaaacccacagccacgcggctcacaggagcagcgccaccggccaggccgccccgcgcccgggctcagaactttctcgctgcaacttcagcccgtcctcggagcacgcggggcggccgcgcggccgctggaaacaggcttgcgaaccggctccccgggccaggcccgcctccgcgccccaagtccccgctcggtgcccggcccgggccacacgggcccagcgcgggctcggctcggctcccggcttcccgcgggctcgggcaggtgaggacccgcccgcgccgcacctggcggagcgggcgccctcctcgccagcccgggacgcagcgtccccggggagggcccgggtggggagacaaagggcccgcgcgtggcggggacgccggggacggcagggggatcccgggcgcgcgccccaactcgctcccaactcgccaagtcgcttccgagacggcggcggcgcccgcgcacttggccgcggggccgcccgggccattgtccgagcaacccgcggcccccggccggcctgcgcccacctacccgcggcgggggccgggcagccgcacagcgccagcagcagcagcagcagcagcagcagcggccacggcggcccgggcggcgctgcctccatgttgtccggcggccggacgggcccgcgccgcgctcactcgggctccatggcgcggcggcggcggctcctcgcgcggctcccggcgcctccgcctcccccctcgggcgccgcggaccaggacgacggggaggagggagctgggcgcgcgggagcggaagccgcgccgcgtctccgccccccgccgccgccacccgcgccccccgcaccggccgcgccctcccgcgggcgccccccggagccggccggcggccaggcggccccagcggcgcaggtccccgcggcccctccccgcgctccccgccctgccctggaggtgcctccgggaggcttggcgcggggtttccgccccgcggggcccggcggccgatcggggcccggagccaggtgtgtcacctgtggagcctctatgagtggggaaactgaggcacggagcagggcggggttgcccaagggcacacagcgaggcagtttcagggcgggcagcctggggccccacggggcggccccggacacttgttctcacctgtggagggcagagaagggaacagggagagaagtggccggctgggagtggaggtgggtttgaggttttactgtaaactaaatgtgtaccctctaccttagttatgaattatgagacacgaagactgcgaaacagacacactcctctaaaagtgcctctaggctgacagggagaaagtcccgccaggctcccagacgccacctttgagtccttcaacaagcccgccagggcctcttgcccaccggtgtcagctcagccactgaaccctccaggaagaagacgtgctggtaggagaagaatctcacccaggcacagcctggaaggggcacagaaggggctctggaaccagcaagcccaagttggaactcccagtctgctactttctagaacgactgtgcccttggcgggtctaagtagaacctctccgcgcactctttcctcctttgtaaagtggggacagcaatggccaccttgcaggttcagagagggcttgcagtacctcacagaactgagtgcccgtgaacgtgtgtgttcctccagatttgtgacagctttgccaggctggagtcaggctgaacgcctctgccctcatggggtttatattctaggaagaccaacaaaaacaagaagacggaaaattaaaacaacaaaagccccattgacaggccatgaagaatgccatgagaaatgaagggcgttgtgctgcagtgtttggggaaactggcttagggaaggaaggacacttgagctgctaccaaggagcagccgtccggtgggagggcagttcaggaagagcagacatccacggaggaggcgctggggcagagggcagcctggtcgctggattcgggggaggaaccacatcaggccatgagctggagctggtggtagaaggtacaggagaggccagccagggccagcacatgtcagacctcaggcggggaagaggaatcgagaatgcaccccacgagcaatgggaagccaggctaggatttaagcagcaaaaatattttcccttcttccaccctgcatccagctctaccagcacagcctggggttctattttcaagatagaagagacccagactcccagctcttcttacacttctactactgccacctgtcacccactcatgcgtccccacttgcagcctcgacccccttccacctgatctcatggcagccagggaagctccagggctcgtgagggctgccatctcaggaaagaagcaaaagccttcggcacctgcagggcctgctccaaccacacttcttccttgacctctcagcttccttagccactcccttcccacatctcaccctgctccagccacagtggtgtctctgtgggttctcaaacacaccaggtgcactcctgcctcagggcctttgtgcttgctgttctctgctgggactcttttttttttttttttttttgagacagggtctcactctgtggcccaggctggagtgtagtggtgtgatcgtagctcattgcaacctcaaactcctgggctcaagcaatcctcccacctcagcctctcaagtagttagcttttgttgttttgttttgagatgggatc

SEQ ID NO: 914913 - DNA, 4001 bp, Homo sapiens
gagtggaggtacagagtgccagtcccatgccagccaccctggctgtgcccatttaagggaaaggagagtgcaggccgtgggagaggcgctgagcagcctcccagagcagagagcccctctctgcggtgcaggaggccctggaggcacggtggcttcttttcaaacttgacagctggaaggctcaggctatggggtggggagtggagggggagctctctcttcccagcaaggttccaggcacatgctgggaggctgggagaagagaacagaatagggtgggggtgaccccctgccttctgtgccccataccaatctcagggggccgaggagggaggtatgtacgatcagccctgatggaggggtgagggcagcttcggtgttggggcccccatctatttcccacttctgtcccgggcaccagccccactccaagcccctgctcctgggccaggccctcctcgcaagggcagtcctgccccacacaggcacgcagtccatcccagaggtagcggctcctgtcctagaaagggtgggcctaggagacccaaaccccagaaagagggagggtgttgggtgccctgcatccagactcagggagacgtgacaattctgtggccctcagagaccctggttccaggaggaagctggtgcctctgttatcagtggctccatcggggactggacccagcccagacttcttggtctgacaattgcccacagatcagccagggtatagtcagtcctcttactacctaggagtgtctgaagatgagccccagccctgcctgtgcccggcaactcgccaaaagtagccgttccattgacctaagtagggacccaccagtcccgcaggcctaaccagccaaagcttcctagagcccctcctctcagagtggctgaagcccatcagccagaacataggctcaggtgcccagtcctggagcggcttccagggcgcggaagctgcccccgggggcgcccagagcccgggaaccagcgccgcctatgagcaggtcttcctcctcctcatcctcaaaggcccgcgctgggcgccggggcggaggccggggcgtgggctcgtcgcgctccgccatgcgctcgacggcgccctcgcccacgaggaacacggtgtccgcgacgcgcgggggcccggtgacggggttgtggtcgtaggagaagacgcgcagcgcgcgcagcgggtgcaggtcggggaagccgcccaggcggttgcggtcgaggtcgaggatgtgcaggcggcccatgcgcagcagcgcgggcgggaactcctcgaagcggttgccgtagagccagaggccgcgcaagcccgtcatgcgcggcagctcggccggcagcgcgcgcagccggttgtcgcccatctggagcgactgcagcgccaccaggcgcagcagcggccgcgggaagcgccgcaagaagttgccctcgatccagaggcagcgcaggctctgcaactgcgcgaagtcggcgggcagcgccagcagccggttgccgcccagatagaggcgcgtgaggcgcggcaggcggcacaggccgtcaggcagtcgctcgagcttgttgaagtccagcgccaggatgcgcagctcgcgcagctcctcgatctcctccggcagctcgcgcagccccgtgccgctcacatacagcttctgcaggcggctcagcgcgcacactgcgctgggcagccgccgcaaccgccgcccgctcagctccagctgctggtcgccgctgcgcagctgctcctctgcgtccgacggcagctcatccggcgtggactcggcgatgcccatggtcacgggccccggccggggccgccgccactgccaccgccaggcatcgccccgccccggccgccccccagccgccccgacggtgccggagccgcgccggcccccgggccccccgccccggccttcccccgcgccgggaggggggccgtgcggggccgggaggaggcacccacttggggcaccgccgccgcgcgccgcgctccaccgcccgccctcgggcctcccccgttgcctccgccggaggccgactggctagggttcgcgctgactcgcagcttagcgacccgtcgccctggcaaccccgacgcgcgtgcggctgccaatgaggcggagggagggcggggcggggcggggccaaggcgccaccctagtggggtcccagcgccggagcccgccccctacctgcccatccagcccaccgcggagcaagcacaagccgagagattccccgccccggccaagcctggcactgagacccgacgcccgacgctgtttggtgtgcggttgtgtgcgccccagagccgcgggtccaagaaggcgaaggaaacgctggcggtggatcaaagactctggactagaggctcacaaggaggggctgaggggcgcggtcactgcgagccattcacgtccagcggcgtgcggccggcctacctgctgggatcacttcagtgtagtaactcgaaacagtgttactgtccggcccttttcacatctgctggttttaccgggccccagggcttggctccgccccgcctaattgccctacagcttcctcattgctacactcacacccctctctcctgccaggatccctccaccgacgctcaaagtctgtgtgtggctgcggtggacagaggactgggacacgtgaacgcctttgagccaccaatcatggccactctcattccatgactcttcttccttcgcctgctaccaccagcagcagttcccccctgccttctccccccacctcccatccggagccctcctgcgggagctcctggcagaaaagcactggctgtcactggcttcgagcccacgtgtgcccagcactatgctgaaagcattgcgttgagtccttggcacagcctatgaggtagacaccctcatcaccccgattttaaagatggagaaactgagggtcaaagagacatgacttgagctgggtcagtctgagctgagtgaagtgcccaaggtcacccagctgatgagcagctggattcgaagccaggtagtgtgactccagagcctgtgttcctaaccataaaccataccgatagatggaaacaaggttcactccacctccagcaatgaattttctcacaacagagcctctgattctctggacaaagctacaaagacagcactataatcccacatgaaagatgagagaagtggcctcgcggggattaggcaccctgcttacggtcacacaatgcatagaggttgcagcccgggagccaaattttcgggctccaagcctcctgcctcctgccttctcttgaacccggctggtgtgacccatgtaactggctgagtggactgacttcaggagagcacgctgccctttggcccacccccattgccatccccactgcaggggaagggggatggaagacagcccaagggcagagagcagttgccaatgcaacgggaggaagggaaccatccccactggaaagtaagctgcccagccagggaggtttgggcatctccttccctgctggcacaggctctagagcatacagtagacattccatgcaaatttttatttatttatttatttatttatttatttatttatttatttagagacagagttttgctcttgttgcataggttggagtgcaatggcgtgatcttggctcactgcaacctccgcctcgcctcctgggttcaagcgattctcttgcctcagcctcccaagtagctgagattacaggtgcccaccaccacgcccagctaatttttgtattttagaagagacaggggttcaccatgttggtcaggctggtctcgaactcctgatctcaggtgatccacctgcctcagcctcccaaagtgctggaattataggcatgagccactgcgccttgctgaaaaaaacttaacaaaaaaagtggaggcaaacattgcatacagtgaaatgcatagatcgtaagtgtcttcttggatgcgttttgacaaatgtacacaccc

SEQ ID NO: 914914 - DNA, 4001 bp, Homo sapiens
ctgagtggtgagtgccaggtgaggacaaggaagggtcctaggcccttatttccccttcctctgccaaaccccactctatccccaaggtggccctgtgcacatccagaagggatcgtccctgcagcacatgggcactctgtcctggcatctgacgggaagggcccctcagctgtgggccctcctcagtggtgcccaagtacagggtgtagcatttaaagactactctctctcaaaaaggaggacggtgtcacttagacccaggcttgcatccaaagcccaccactcaccagctctgctccctaaggtaagtcccttcctttcttggtgccccagtgtcctgtctgcagggtaggcagctgggttccagttctgccactggccaaccccaactattgtgatgatcaggcaaagaatggtggcgaaggtgccctgcatcctcactgtccttcccagctgacacagtgaccctcgcagggctgagcatcccaggtgaggtgtgctcagtggggaggccccaagcctgcagacaagtggcctgggcaagaggaggcaggagagtcggactctcaggagtccaactcagaaaagtgccaaagaatgtgtgtgtgtgtgtgtgtgtgtgtgtgtgtgtgtgtgtgtgagagagagagagagagtgagagagaaagagcaggggtacggggggcaatgactactaccacaataagcccacccctacatttaaggatgttagtcttctaagcacttgacctatatcatctcatttaattctcacaatcacctattgaggaaattactgtaattcccattttacggatgagaaaacagtttccggaaagtgaagtgacttacccccagagttacccagctcataagggctttggagctgggatttatccagttctacatgacctgaatactgtgttttctccagcacatgctgagccgactgcccccaatagaactgtcttttttttgcccatgaagaaaaggaggctcagagaagtgacttacccaaagtcacacaaggagaaaatagcagggtcacgatcagaatccagttcatctgtctccaaagcaaatgttcccactataccaaatcaaggtctccttccctaagccctgccaacgacccctcacacgcaggagcagggcagactagctcacagtctggcctctgaggtcctctctccctcctctcggcctcagctgacttactggcagagtggggtcctgggagagctgctgcggacgttcctgtcaagcagtgaatcactaagggcaagcctcgttctggagacatgtgcatcccacgggggaattagaccttaacccaaaggaatgtggctgtgatggcggaatttcaggcagctcggcgtgggggtgggggcccctcacatcttaccacccatgaagaaggctgggttcagagccccttggagagcggtgggtgccccctaccccactacgagaaatgggcaggccatctagtgctgtgggatgggcagccccacgcctggctgggatcggagcgttgcaggaaacctgaattcaaattccggtttgcccttgcctagctgtgtgttcctgggcaagtcacggtcttcaggccattgttttcccagctgtcaaatgggaaggccggcctcacccctttgcgggaaagatccgccaagacaggagcgctggggaactcccagggaccgagggagggtcagccccggctccacgcgcgcagtggggatggcgggaggggagtgtttggggggcgtcccttgggaccagcccccgccttgcgctcgctagaggcgcgcgacagtgcgccccccgagggccggccagcctcgcctgcccggcggctcctacctggctcagcgcggccgcagctcctctcccgggcagtctcggcacattttgcgcaaacccgcccccgggtcccaccccgcgccagaccccggggtcacggcccgaggaggagcaggccgctcagctgccccaccggagcccccgcgctccggctgcaatttaaatacctctcccgccggcccgccccgccacgcccccctctggcgaggccgtggggtcctagcgcctggccccgtgcctcggtttatccggagccggcgggggcggagtggggtggggcggcgaagcatcttcaccaccctgggacctcggccgggaaggggcgggggcccagtgtggggggatgagagggcgggagggagaggggttgcagaggaagcgccgtgggagcgaggcccatcccagcggccgccgcacgtgcagttcgcggccccgcggggtccggaggggggcgcggtggctctaggagccgcaggtccacagaggaaatccggcctggccccgatttcccagctgctggcgccgccgcacttaacgcgggggcaaacaggcgaggtgacggcggggctgaatgcggaaggaaatgacccttcgctggccctggggcggccgcggagggggttccccgcaccaagccgtccactctggtgggtcctggcaggtcacttttcctctccggattgtgctctagtgtctggacccgtactcctccatcatctgcgggacccttcaacagcctgtgaaacggcaccatcaaagtcctgttttcggatggagaagctgaggctaggggtgggggcagtgtgtacacatgaaaaccaattgtctgagactagtaaggtccctatttatagctggggaacctgaggctcagaaaaggttaaatggcgtgtccaaagtcaacacagctaataagaatcagtgatttgagcccaatctgttcataaagctaagtctgattcagtttgggcattatcttgcccgaatttttaaagtactgtgcaaatatggggtggcggtattgtcatttagattggaggttgaagcagatctttcccaaagccacctctcttctagatgccttgaccctaccaaatcacaggtaccctgccttgctgcctgtggactctagtatgcgggtccctagaagagaggggccctggctgtcctccaggtcctggttccaagtgtagaaggggcctcttccacagtgtttctcttccctgatcgtcaccagccctgagagtggggcagggtgccccattttacatgcatgaaagtgaccacccagggccttgtggcaaatcagggtaaggctgggctcagaagcgggattccctgaagtctctacagttactgccttttcttacccctgttcagtccactgtggagatggatctggggagatggggtcaacccagagaggacaagccatgatagcaggtgccataggggcctgacctagtcttagaagaggaaatcagggaaggcttccctaaggaggaggcctgagctgcagtgaggggatgggcaggaggtgcaggtaaggaatctctcagcagggcctgcgaagggtatccaaacctctttcccttccctcccagccacccaaggcctcagatctatgtccacagggtcctagctggtccatccagccccctctctggtctctagtgctccatttggtcaaatggaacctcagtgcccctatctgtaaagtgggaaagatagtagctactacttggagttggtgctagaactaagtgcaatggatccagctggagcctgcacccagtggttgttaggcaacttctcactgcctttattgtggcagttggtggatactcctatatcctgtgggcttccttttccaggtccctgtccaaggggccaaatgttcaggaaagtgctttgaagctgccctgcagtatgagcagagtgactggatcattcgggcagttcctggccttgtgtatcagaccagctcccagccatccagacccaggctcgctgagcactgcctcacccttcccggagctgctaccaagcagaaatcactgggccatggcagagcttctgctagggcccaggagggcggggctggggctatggtgggctgggggtgagtgccccac

SEQ ID NO: 914915 - DNA, 4001 bp, Homo sapiens
cagtgagcacagcaccaagccctccgtggctactgggccccaccccctcccatgggaagtgcccctagagaggggctcaccatcctttaagatgcatctcacagcacacaacaggtcagcagcggacagaaaaccgacactaggagtctcggtgacatggggtcgttactgagagcagttctccttggctctcccttcacctctctgcaacgttcccttcacccatccatgccgtcagtgggctctgactgctctccctgaaagagaccccggatcttcctacttccctcttatcactgccacagaccgagacgccaccccaatcctggccttgaccacagcaccctgacctcttataatctgtcctgtacctagcagccagagtgataatataaaatcatctgtcagatcctaaacctcttctgtttgaaaatctccaagaaaatccaggctatccacagtctcctctctgactcttgcccattttcccttccctcaccacattccagctttcctgctgttccttcaacacagcaaattcattcctgccacagggcctttgctcctgcagtttcctctccctgaatgctcttcctcagctcctcacacatgtcattgttttcccacatttatcatttcctcatcatttatttcttatcatgtgggaacaggggcctactaagtaggtactcactaaagactagtgaacaagtggcaaaatcagggcagaagctcagctgcagtggactgagtggtgagtgccaggtgaggacaaggaagggtcctaggcccttatttccccttcctctgccaaaccccactctatccccaaggtggccctgtgcacatccagaagggatcgtccctgcagcacatgggcactctgtcctggcatctgacgggaagggcccctcagctgtgggccctcctcagtggtgcccaagtacagggtgtagcatttaaagactactctctctcaaaaaggaggacggtgtcacttagacccaggcttgcatccaaagcccaccactcaccagctctgctccctaaggtaagtcccttcctttcttggtgccccagtgtcctgtctgcagggtaggcagctgggttccagttctgccactggccaaccccaactattgtgatgatcaggcaaagaatggtggcgaaggtgccctgcatcctcactgtccttcccagctgacacagtgaccctcgcagggctgagcatcccaggtgaggtgtgctcagtggggaggccccaagcctgcagacaagtggcctgggcaagaggaggcaggagagtcggactctcaggagtccaactcagaaaagtgccaaagaatgtgtgtgtgtgtgtgtgtgtgtgtgtgtgtgtgtgtgtgtgagagagagagagagagtgagagagaaagagcaggggtacggggggcaatgactactaccacaataagcccacccctacatttaaggatgttagtcttctaagcacttgacctatatcatctcatttaattctcacaatcacctattgaggaaattactgtaattcccattttacggatgagaaaacagtttccggaaagtgaagtgacttacccccagagttacccagctcataagggctttggagctgggatttatccagttctacatgacctgaatactgtgttttctccagcacatgctgagccgactgcccccaatagaactgtcttttttttgcccatgaagaaaaggaggctcagagaagtgacttacccaaagtcacacaaggagaaaatagcagggtcacgatcagaatccagttcatctgtctccaaagcaaatgttcccactataccaaatcaaggtctccttccctaagccctgccaacgacccctcacacgcaggagcagggcagactagctcacagtctggcctctgaggtcctctctccctcctctcggcctcagctgacttactggcagagtggggtcctgggagagctgctgcggacgttcctgtcaagcagtgaatcactaagggcaagcctcgttctggagacatgtgcatcccacgggggaattagaccttaacccaaaggaatgtggctgtgatggcggaatttcaggcagctcggcgtgggggtgggggcccctcacatcttaccacccatgaagaaggctgggttcagagccccttggagagcggtgggtgccccctaccccactacgagaaatgggcaggccatctagtgctgtgggatgggcagccccacgcctggctgggatcggagcgttgcaggaaacctgaattcaaattccggtttgcccttgcctagctgtgtgttcctgggcaagtcacggtcttcaggccattgttttcccagctgtcaaatgggaaggccggcctcacccctttgcgggaaagatccgccaagacaggagcgctggggaactcccagggaccgagggagggtcagccccggctccacgcgcgcagtggggatggcgggaggggagtgtttggggggcgtcccttgggaccagcccccgccttgcgctcgctagaggcgcgcgacagtgcgccccccgagggccggccagcctcgcctgcccggcggctcctacctggctcagcgcggccgcagctcctctcccgggcagtctcggcacattttgcgcaaacccgcccccgggtcccaccccgcgccagaccccggggtcacggcccgaggaggagcaggccgctcagctgccccaccggagcccccgcgctccggctgcaatttaaatacctctcccgccggcccgccccgccacgcccccctctggcgaggccgtggggtcctagcgcctggccccgtgcctcggtttatccggagccggcgggggcggagtggggtggggcggcgaagcatcttcaccaccctgggacctcggccgggaaggggcgggggcccagtgtggggggatgagagggcgggagggagaggggttgcagaggaagcgccgtgggagcgaggcccatcccagcggccgccgcacgtgcagttcgcggccccgcggggtccggaggggggcgcggtggctctaggagccgcaggtccacagaggaaatccggcctggccccgatttcccagctgctggcgccgccgcacttaacgcgggggcaaacaggcgaggtgacggcggggctgaatgcggaaggaaatgacccttcgctggccctggggcggccgcggagggggttccccgcaccaagccgtccactctggtgggtcctggcaggtcacttttcctctccggattgtgctctagtgtctggacccgtactcctccatcatctgcgggacccttcaacagcctgtgaaacggcaccatcaaagtcctgttttcggatggagaagctgaggctaggggtgggggcagtgtgtacacatgaaaaccaattgtctgagactagtaaggtccctatttatagctggggaacctgaggctcagaaaaggttaaatggcgtgtccaaagtcaacacagctaataagaatcagtgatttgagcccaatctgttcataaagctaagtctgattcagtttgggcattatcttgcccgaatttttaaagtactgtgcaaatatggggtggcggtattgtcatttagattggaggttgaagcagatctttcccaaagccacctctcttctagatgccttgaccctaccaaatcacaggtaccctgccttgctgcctgtggactctagtatgcgggtccctagaagagaggggccctggctgtcctccaggtcctggttccaagtgtagaaggggcctcttccacagtgtttctcttccctgatcgtcaccagccctgagagtggggcagggtgccccattttacatgcatgaaagtgaccacccagggccttgtggcaaatcagggtaaggctgggctcagaagcgggattccctgaagtctctacagttactgccttttcttacccctgttcagtccactgt

SEQ ID NO: 914916 - DNA, 4001 bp, Homo sapiens
agacctcctttctagataagaaaaatttacctggacattacgggtaacagataaaaatatcatgatcataaatcattgacatgaaagacatattataaattatactgacaggagtcttcccatggtaatttttaccaagagctctgcctggagtaccaggtacaaggttgctccaggggtggaggaggggcagcttctcacagttgtcctcttttacctacttctctaaaatcatcatgcaaaaaatattagatagatgaaaggctaggatagcctagggtaataccagagtataatctcttctttaagttttttgtttgtttgtttgtttgcttgttttctttttgtaactcctttttttaaaaacaaatatatatatataatcaacgttttgagtatgatgcctgacatctctcaacttgggtgctctcataaatctttgacccaggcaacgtagcctctgaataaatctattatgttacaatttgcatcttctttctatacatagacatcaacagctggagagaatcacttaggtatgctcttctctacctagttaacacacctgtcatctcttccatgaacgtgtccacagtaacagttcaagttggctaacagtccatgaactaacactattctcttaaggataaaccatccacatgcactggcagatgaagagtaagattctgttgccttcatgtgaggtctcagcattttagaaacctatttacaagtgattcttactcctggggtgaagctaattgatgccaatgcagagataaaaatactaaaagacacaggaacacagacgttatcacaatgaaatgatattttgctttaattaaataactttgggattgaaacaggtaaaatattgtctgcgtttcactttgaaggaaaagcgtggtgggggggaggggggcgggtgaagaaaggcacagttaactaccaggaaactaaagagactgagttaggcaagatgtttgactaaagtcacctgaattcctcatgccacttgcttttacagccaagaatagacaattaagagcaattttcaagcacattcccttctcgggggaccatgtagggtaagaggatgttccaaaatgagcgacactagtcttaatcaggggacactgcattccaaaaggttaatgagatgcaatagcgagagaatcagtgcaaaaagagagaggttcaaaatactaaacaatttccactttgttctcatttgctccaattaagagctggtgaagcagcttttctgtattccacgcattcgctactctctagagcagatataactattcaagaagaaaaaaatagagctatggggagggggaagtctactattaagttatcgtgaaagtccggattacatccccacctccccagcccccagtctctgagcagatacactttgcctctaactcagagcctctgccagtcgcttttctgattaatgtttttcctcaaatttagagagtattgcaaggcaggagaaaggcggaattatttttttccatatttcatatattcagaattccctgtgaaaatgttagataaacaagagaggtacaaaaatggtaagaggaatggggggatggttatacaaatggaaataacctccttggcataaaaaatagccccaaaatgccacacactgagttcttctgagcattccaatctctaaaaatgagcatataaactgcatatacatttccgaaaacaagcaggaaaacacaaacattgcaagacaacaagaactgagatctgaggagtcccgtgacttaccttctttatggatcctcaaagttcaccaaggaaaatttacaatcctctagcttgccgtgcactactctattttcttttcttctttttatttttttttaagtcatatcggagaaaaataatcagttttcaaaggttccatgtatctgatcttccagcaccagcaaaaacgtgtccaagagactccgccaaaaagtaagccaaaaactcatcaaaggcaaaagcagaagggggagtagggaagcaaggaggtggcgaaaggcggggggtgggggctacagacagtgagcccaagtgcctagagaatattgtcacgttgttgaaatctcctactgtacgaaatacctgctttggttgtcacactaacacatacacacacacggacactcacacattctctttcatgcaaagcaggcacccacactcacaaacacacacaaacacacgcactcacacaaaccagtgtaatgaaaactgtcagtagtaacctccaagagctgctgtgtgctgcagatggtacggctcgctgttaccttcccagatctgtgaaggatcaaatgaacatccaaaatcaggggggccccaggactaggtagattccggatccctctcccccaggcagatgcatcaagccagtagcaggtcaatcagcagaggtgtctgcttgcagggtgccccggattatggcaaggttattaatctcgaagtgctgcatccccccacccccaacattcggcagcctgcattgagatgattgccagagctgtgtctgtccctgttctactgcatttgctcagccctctgatgctgcaagtgagacacggtggaggcaagaatactaataaggtggttagctacagtttcttcaaggcagtcggcatgcagtacagtaaatgtgtacttcccagtgctccgtgtgtgagcctgcgtgtctgcagggagggcagtgaatccatctccggccagaagacgaaatgttttgtatcctgcctgggagaactatatcatcatcggaatcatcactgtcctgcaacggcgttgtctgtgacagtattttgcttgggataaagaaggggggttaatggtttagaagcctagaactggcatttaaaagagaaaaaaaaaaaatgtctggggagacaaattagctttataaataggatccaaggagaccgaggaaaattttaacatgctgcttccctggctgttaaatggaaatacaaagcaatttcaaaaaccagctccagactataaagcttggagctggcaacaagtatctgaatttgactgatgggactatagataaatggattcctggtaatataaaaagtttgctcatgcattctgcttcacagccatggatccgatgtatatagcaatttaggtacagttcattcatttttaaacatgaatttagacttgacacctgcacagttttactttaatgtacacttttaaatcacatagctatgaaattgtagagaacatctgtgtgggacagtgtcactagagggattggttgacaattgtccatcgtaagcattataatatataacatttttgcctgaaacgagcttaaagttttcagaaaaaaagtatacatctcttttagtaccaagcaatgaaattaaaatacatgtgtaatatgctaaataagttatcagcctctagagggctaaattttctgcttctatgattcagtttcatattaaaataccttttcattagttcagaacactcactatattctttaagttgaattaaattgctattatctggaaaagtattggacagttggagaaggtagataaaggtgagttatagtgcagtgtaataccaggtattgccagcagatgtcacaaaagaaaacacaggtaaaataattcttccaagaacggcaagaatttaatcttatttagtaaacacagatcttaataaaattgatgggactaatatgaaaaaattgaatttttacaaaattttaaggtgcaaagaagaacttagagaataacttacattttatatttttccaaatatccctctcaaatcaccatttttcataactctggtagattttctatgattaatattggaaaaaacactgtgccactaactaagattagacttgcatataatactatttctattagtgattttattttgttctataaagtatagcatcaacatattgtatgtaatatagcagctac

SEQ ID NO: 914917 - DNA, 4001 bp, Homo sapiens
cagtcttcctttcagctccctaccctgtgcccaaagtttacactgctcagggccttgagtttgaggaaagccaggttctcgtagctgagatccaggtcttggagctgcatgaggtcctggaactctactgcagccctttggccagtccaggactcaggttctgactcttccggcaggccagaacctgactcttcaggatatagtcagggagattgccaggactcaaatcctggcttcaacacttagcagctgtgtaacttccaacaagctactgaacctctctgtgcctcagcttcctcctctgtagagtggcaatctcattagtgttcttctggggataggaagagataggtaaagctgcttaagagagggcctggtaaatagcaagtactaaggtctcaagttcctcctggaacatattggctgtcacgcaacttaagctattgcagctctgttgagattgtgttagtcattactatttatacgagagtttccaacacttggaatgctaaaaaagcattctggtagattagaacagggcttagaagtcagataaatctaggttttattcatggtcctgccactttttaattttttaatttgtatttttttcatggccctgccactttctaagtgtgtgattcctgtcaagcctttttattgttctaaatctcagtttcttcacctggaaaatgggtataataaaaatgggggtctcatgagataatggatgccaagatcttaggtcatggtgaaagctcaataaaaaccaccaaccataggctattctcacttgtctactatccgtctgcctcattaggtcatgagcagcgcagtggtgagggacatctatttaatgaatgaatgggccctcggtgcctcacatgcactggaaggattctacaaacaacctgttggccgagctggtgtacaaagaggcaagcccacattagaaaatgcagtaggtgctttctggctctaagttcccccgctttctttggagcctttgcttcccattgaggcaagccctccctgttgactgccccgttctgcccctctattacctgctgtacagcgctggatccggtttcgcagccacttcagcaggggttccatggtgcagccacacacccagggattgccaccgatctgcagggtcaccagccccggtaggccctcaagagcctccaggctgaggaaggccaggcccccataactgaggtccaggtctcggagctgcatgaggccctgaaaggcctggggatgcaccctccgcagccaggggttgtggctcaggtcgatgtggactagcccatgggcctcctggaacatgtcggctggcacatggctgaaattgttgtagctcaggtccaagtgtgccaagcgcttggcatggaggaagaggccccggggcagctccattaaggagttgttgtgcaaatccagcacctggagctccatgtagcatgtgaggtagccaggcggcactgctgtgatgcggttgtgggccaggctgaggtttcgggtgtccattggcaggtctgggggcacggagaatagccgctggctgctacaatccaccacctggttacggcatgtgcaaaggacggggcagctggtgccggcatccgagtgcatcaacccggctgccaagaggagggagatcagcagcattgctgggtggggtggcccgggccagggaagctgggcccaagtgtcacccatcttaggcagcaggcaacagcagtgctggagggagcccatgaggactgtgtccatggaatcgagagtctgtgacacaggaaggcagctacatctggggccagcgtctgtgaaggtggggcttctgagcatgtggtatcatggctagggactttcccaggagcctctgagcaccagagggcttcctgagatccacgggaggtccccttccggagcctagggggcaagacacccagttgaggtcccctagggtctggaatgatgatcaaaacctgagaaagggaggggacaagaatggggctaggtcagctgccagcaagtcctggaagagttcctgcagatcttttgtgtctctctcacccatgcctgctggatgtttcctcttggtgctgtgtctgggagggaggggctgaaggagatgaaacgtgccctttaaagatccttggcacttcttctgagaaaacttaagtcctgtcccacgtctgggactgattaggaagccggggctgcacctgggtcttcagtgttgaaggtctcagaggccatttgtcctggtggcctggtgggctggagtccaagggggtcccagggtgggtgttttgggaaaagggcccgggaggaagtgagtctccatgggcctcctaaaagcctgagagtcctcagcctcagtggctgctggaatccccaggaagcctctttttttcccaaagagaggaggaccccaggtgatgcccactgtctgggcctctggggccagaagaagtcatgagtcctgaaggtgcaggctgagtgtcagctggcagagctctggcatcttctccaagccagtgccttcctcagcgcagttctgtgttcagcaggtggaggccaaattccctctgtcaacaaggaaagcactcaggcagagaaatcctgtgcccttgacactcccttgtcccttcacctaggacgcttggcttatctttgtctctttcctttgctcccccaaccacaaagttctctgcttactgtctgtcaggtgtgggccatggtaggttcagaccccaggctcacattgctgttacccacgagccctccctgacccaacctgcagccatcctcctctgggttcctgtcttgggttagatgcattttcttcttcttctcataaccccaccctcattagtaccaaacacgccacccttgaacaactccctaagaaaaatctgcatccacactctgggggtttgcacacccctttcaaacactctaagcactcctctctctctcacacgcacacacacacactcactcacacaccattctgtgactcccccgtattttgccctgccccgtgctcacgcctcgcggttttcgctccagcttccttctgcacaggcgattctgcagacccctccccagtcgacccccagcatctttcgcccccctctcagcgcacacccttcatcccagcatccctttccacacactgcactctcctcgccgcccccagcagagggaccgagagtgatgccacgcccagagcctcagccctcgcgccccgcgccctctcgcttctcccttgcccacctgctgtcctcggtcctcccctcaccctcggcctggcgctgcctattttcctaccgcttcaagcctcaatcccgcccacctggaaatcaccccagctccccttcatgcagactcatttttctaagccccaggtctccccctcgcactcccacaggccccaggagcctactcactccgttccaaggacacagccatcaatctgcggcagacgcgggtctccctccctcctcctggaatccccgcttgctccttgcttgcttcagaacagattgcctcccaggctgttcccctcccccggcctctcctcctccttgtctcccggatcccaggccagcatcttctatgatttcccgtcctgcggtccccctgccccttctttcacccaaagggaaatcacagagacaggatgctcggaagaaagttcacagaatctgaatgcttctttctgaaactcagctggtgcccaggctgctggggtataaggcttccgccagagccaggtcttccccctccctccccccttcccaccctctctctctccctccctccatccctcccccagttctctccctttttcactccccttttttttcctcgagggccaggtactgacgtttcgctgtctcttagcaactgcctccacatttttgagcaacaggagaactggctgtggaccccaccacaaagagagaggagagaaggaagcacag

SEQ ID NO: 914918 - DNA, 4001 bp, Homo sapiens
gtcccagctacttgggaggctgaggcaggagaatgccatgaacccgcgaggcggagcttgcagtgagacaagatcgcgccactgtcctccagcctgggcaacagagcaagactctgtctcaaaaaaaaaaaaaaaaaaggctgggtgcggtggctcacacctgtaatcccagcactttgggaggctgaggcgggcagatcacaagatcaggagatcaagaccatcctggctaacgaggtgaaaccccatctctactaaagatacaaaaaacatagttagccaggcgtggtggcggacgcctgtagtcccagctacttgggaggctgaggctggggaatggcatgaacccaggaggtggagcttgcagtgagccaagatggcaccactgcactccagcctgggcgacagagagagactccatctcaaaaaacaaacaaacaaacaaagatgcagacatctgcctcggccccaggccctggaatcatgagctccaggcgtggagtgacaagtgtgctcggagcgtccagtgtcctcctccctgaccaccttcatgtgtcttcagtctggacctggactgatcccctgactgcactccccacccagccttcccagatttatcttcctgatgagacgagttcccttcggagccctgtgtgtcttactacgtgttcggttgagggcctgcctcgccccagagctgtgggctgcacgtggcctgcacgtggcctgcgtgctcctctgctgtccacagtcgcaggaggggatgctcaaatatttgtcgaaggaatccgtgaacaggcagatgcacatgtagccacttagaacgttctggccatggcttttatctgttgaccacgtgtggacactgaagatgcatcctctccatcccgtctagagctgcccctgtgccaggcgagttggccggctgttgacagaggtggtgggtgggagtgttggagcggggcagtggctcaggctctgggtgcctcactggcctggtctggaaggtgaccatgcaccaaggatcaaagaagtgaagcccaaagcagaatctcatggagtttccagcccaaatctcccccactgcctgcctttctccagccagtgcaaggccccaggcctcacagcaggaccccaacactgcatccccccaaagactctggccacctccatcccaggcctgccagcctcgagcctcatggagggcgtgagctggcggggtcacgggcagcccctggacacctatgggtgacactaagggctgagtcagctacccttgtctcctctgtgcccaagagccccaagcatcagactggtctgagccccaaggcctgggggtgcaaggggttggaggctgtgggatccaaagaccccattgaactcccacctcagacactgcacctagtgttctcacccaggcctgaacccatccacacacttcacggccctgctcccaccctgtgtcccctctgcaagcccccatgctccccaaattggtaactggggggcctgtctccacacccctgctagtgccattccctggtgggtagccatcacctctgggtcccctgctgccctcgccccttcaccatgggggctcggaaggcagagcccgctcccctcctgagccccaccctggaaccctgagcaccctgggtcattgcctctgagtctccctcaggggcagggcttggggcccctcctgtctcctgacagggagccctttcagtgcagggccagggggtggtggaggcaagggtcctcaggggaccagatctgacatgcggggccatcactgggtccccgatggctgtgctgcttcgtccccgcgcccacgcctcggcgcaggttccctcctggcaccggtcatagggcgaggcttgcggctcccaccccaagggtgcgctcggctctcacctgagggctcagcctaggtgtccggccctggcagctcggccctgggcgccctccacctccaggcgctgtctcctactccaggctgttcttccggccgccgcggggttgcggcctgggcgccatagcaacgggagccaggcctcatttgaatacgcaaatatttataagtcgccgggggctcgggttccgtgcggctgagccacgccccttagcaacggtcgctagggcggggccacgtggactggcacgtgcgtgggcgcccctgctgcgggcgatcccaggggaaggtgacgcgccaccaactcgagttgggtgggcgcaggcgcgtcaggtgccagcttcctgcggctccgtgcctgggccgtcgcgatgcacgtgtcgcgtttcctcgcgatcctggcgcttcccacgcggggcgggtaaaggcggtctctgctggaggctcgcgcccacctttcccaggtggaagggtcgcccctggggccgaggcctgccgtcctgaccttcggttggaagtgaggccgacggcaaaaggaagcaccgggggaagcgcccccgaggaccaggaaacacacaccggacgccggagcgcacccgagtgcccggcccgcgggacacgctgccgcccgccgtccagtcgccgcttctcactcgcgttcatgcgtgtccgccccgagccgagctctgactgcgaccgcgcggtggacggacggcaggcgggacccccgggaccgcacgtgggtggagccccgggtcagcagcgaccggcgcaggagggcgaggcgggcgctggactgggcagaggcagggtttgcctgactgtaaaacgccttttttgttttgagacgaagtagcgctctgttgcccagtgcagtggcgcgatttcggctcaccgcaacatccgcctcccgggttccagcgattctcctgcctcagcctcccgagtagctgggactacaggcgcgcgccactgcagccgactaattttttgtgtttttagtagagacagggtttcatcatgttggccaggctggtcttgaactcctgacctcaagtaatccacccgcttaggcctcccgaagtgctgggattataggcgtgagccaccgcgcccggccctttttgttttttaatgaggatgtatttctgattcctttgcaattttaaaaaatgttaaaaacatgtctttttgggtttgaaagagctaggatgtgcgtctatgtgcttggggtgagccctgggcacttcgctcccctgtggcaacttgtgggtacggtttaactggaccacgctgagcttctgcagcgttggaacctcaagtttggggggactgggcgggcagggtcgcctgccacgcaggcccgagaaagaggagagtggtggagggggcgttctcacgcctggccccagggcacacggctgcgcccgccgcccggaaccccaccggggctgcaagcgtcctcggggtgggttgcggtgggagtaggggagctggggtgcgtggtggtaggtggggtgcgcggccgctccacctgcgcggaagggcagccgggcaaccggaccccgcggccacccgggggcccccagctccgagcatcccgccttggtcccggcggatcccagcctttccccagcccgtagccccgggacctccgcggtgggcggcgccgcgctgccggcgcagggagggcctctggtgcaccggcaccgctgagtcgggttctctcgccggcctgttcccgggagagcccggggccctgctcggagatgccgccccgggcccccagacaccggctccctggccttcctcgagcaaccccgagctcggctccggtctccagccaagcccaaccccgagaggccgcggccctactggctccgcctcccgcgttgctcccggaagccccgcccgaccgcggctcctgacagacgggccgctcagccaaccggggtggggcggggcccgatggcgcgcagccaatggtaggccgcgcctggcagacggacgggcgcggggcggggcgtgcgcaggcccgcccgagtctccgccgcccgtgccctgcgcccgcaacccgagccgcacc

SEQ ID NO: 914919 - DNA, 4001 bp, Homo sapiens
gcccaccccgacggccgcgtggaccagagtgcgggggttgggcggcaccgcaaggcggctgcaaggcccgaaggcagggatgtcggccccctcgaggccctctcctccagcctggggcacgcggcttgccccggcctcgttagcggccactacgcaaacgacataaatgccccctggcttcagccccttcagttcggctctgcggaccgtagcgttcagcgggggccccttctgcgcagcctcgctgccgtcccaaagcagcagccagtagtggaggaccggggagaagggggcacaccagtggaccactgcgcggccctcttcggccgcaatgcgcacttctcccatgcgcggcgggtcgggcggctgggcggggctggagagtcctgggcacaggcaggccgccggcccgaccctctgtagctccttgcagggcacctgcaggtgtcggcagtggtcgtagtcgcaggggacagccggcaaaggcggccacgccgtctcagtctcatctgcctcctcttcttcaaagtcttgaggggccaagggctgagctctgggaaccaagaaggtcacggccaggagccacagaaggcagggagagcccagcatggagactggaagggaaggggtggatagataaagcctgttcagcccaaaagcctgccatgccctctgcctggacacaatctctggagacaggaaaatgcaactggggatcagaagaggaaagaagttggaatgaggcagacacactcatttgtcaaccaacttctgagtccaggctgtgtgcttggtttcagacaaaaaataaaacatgatctgacacatgagacagatgcatgatcagcatgtgttaagtattagaaacagttaatgaataaacaaagtgctgagggagagaagaggaggacatgatttacttagcccagggaagaacggtaggatatttactagctgccacccagagaaaagatctaagcaaaacaagtaacaaagccgggcccctaggctgatgcctataatcccaacactttggggaagtcaaggcaagaggattgcttgaggccaggattccaaaccagctggggcaacacagagagaccccatctctacaaaaattaaaaagtatttaaaaattattaaaaagttaaaaaacattaaaaatatactgcacatgcctgtggtccctgctactcaggaggatcacttgagcccaggagttcaaggctgcagtgaaccatgatcgccccacaacactccagcctgggtgacaagagtgagacctcaactcaacaaaaacatgtatccgtcagtgacacaggcaaaaacccagaaaggagacagagttgagaaaagagaacagaatggagaaatattgtaagcacagctgtattttttgaaaacaagagaaaaaaatagggacgctggaatcctccctccccacctgctatctgtgcaaatcctgtccaaggagtcctggcccctgcatgcctccctcctcctctctggcccatagcagctcctcaccagtgggtaggccttgatgcagcgggaatccaccagctgacgtctgtgggtgttaggctgagggatccccaagatctcaggctgtgctgtcaggttgtatcttcaacttcaatgccgtttggctggaagcttttataaccttcgactgtgatgtcaccacctagctcccctcctcctccccccacctccctggtgattgccaaaaaagagggctgctcccttcagagggactgagtcacggggccagggatggggaaagccacatgcaatggtttcagctggagcccaggatgcctgggttctggaaggggagtggaatgtggaaagcagccaggagcttagaatccgaaggctgaagtcatacaacgggatggggaggggaacatagaaggcggccacctggctgatattagaggaaaacagctgcgaacagcacgggcctgagccgcaaaatgctgttttggtaaaaatcctaccacatccatggcagtcatttcctgtcttctgcctcccaatggacagagaaagggaggaagggaggaagggaggggtgtagagggggccagaatgatgtctcccagctctgcagacctgccctacaccatccccctcctctgggggagatgaaagtcacatgcagggagtgggaaagcttgctaggggccaggatagcttctccctccttggacttcctaggcttatgaatggaaacatctgtgcttaaaatagcccaggtctggaggccttcccctggacaagaagacctcccctctaatggcggaaagtgagagatgcatgggggacacagggtgttcaaatggccctgaacccatttcagagtcaaggaagaagctgacacaaaatagtttattgaaggaaaaacgaggggagaggagtcaggtgggaaagtgctggaatgtgaggagtctgccccttttcttcaggaactagagcaggtggggcgctgtcggagagcacccccagcaggttcagagctgcccagagtctctaggacaggggcagaagcagaagcaggagcaggagcaggcaggttggcctccgtcagcaaagctgcatcttcccaggagcctgaacctgggccaggaaagggaaaaacaaaatctcaaatgggatattagattaaccgggggccccacccaggtcacgctgcaggatgcccctcaccatcactggcctcaggctctagctcctcttctccgctcaggggctgctgatctggtttctcctcctcggacagctgaccctctgcagccaaaaggggaatgcaggggtcagacccagacactgaaggagaaagccaaggagtcaggaaggagagagtgtggtggctgcgccatacctgtccctgagggatcttcagggctctcaccatcctctgtaacatctgattgcggagttgactcctcctggccttcaggccctgcacctccaaagagggagaggacaggttagggttagggtggctgtgcctggacggcagtgccaacctcaccttcctcgcctttcctttgacccttgtctcagtcggtgataccctaagcctcatactggatgaagcagggactccttctggcccagcccagctcaacctagcccacctcaacagctccccagccaacacctttacctggctgatgagcagagatccttcgttggacttccttccgggaattgtctctttttcggatgttaacctgtggaggaaaaactactgagcagccaggactgacttccctcactaacaatcaggaccctcatgccttaatccccaacatacccctgaccacccacaaagatcaaagggacaaaagggggtccttgcccctttcgacctgcaaagagaagcggtgtcggggccagatgcccccccacacccactgcatgtagctgaagagcacgatgacgctgaggaaggtgaagttgctggcaacacctatgaaggcgcaggtcatcgggaagttgtatagcaggtatctgaggcaggaagtagggacaagaaggtagtagcagttaccagagagcaccagccttctcatgtcccagaaataatttctagggcaattcaagtgagtttggttacagctggctctgtcacccctgcctcccacccacacagtttccagaacctgctataccaggttctaacaaaggccaaggaccttgggaagtctcctgtgggagggccatatgccacagcctcaatgttgtctgtctctcaagagtcaccccaactcttgctaagccaacggttcaaaagagtagctcttaattctgtcagcccatcagccttcctcggggtgctttaaaacattctgctcacaggccggacgcggtggctcacgcctgtaatcctagcactttgggaggccaaggtggacggatcacaaggtcaggagattgagaccatcctggctaacacggtgaaaccccatctctaccaaaaatacaaaaaa

SEQ ID NO: 914920 - DNA, 4001 bp, Homo sapiens
aaggtagtaagtggaccagtcagggccagctagtcaccagctagaaaccagctaatcatggtcacttcagacatgggtgctgtgttagcccttctgtttcctgtttagttaaaaatgttcaagtctcattgtcttagtctctctagttccttttccccattaaaagtttcaggggaggatctgaaattcattccagctgaagtgtaaataatacaaagtaggccacacaggttccttttccctggggcagtttaacttgttccttggaacaagtccttccgctatagaggcagtaggctgaagctaaagagacttagctggaagtcggagaactggagtctagttctagctctgtcactaatttggtgtgtggccttgggcaagtcccttttctctgggtttcagttttccaatctgtgaaatgaagataaatatccttgactcacagagctgttaagagtatcaaaagagagactgtgaaagcactgggtaggttactaaatgtaatagatctgtcgtgagtactaaaaaaaatgaagctctaactgtagagctttgagtagcggaccacggagaaggtgtggggagaaaagggaatctggggacagattgagaaggggttttactccttggaagaagaaggaatgaggcacttcacgccccaggaagtttcctacatctctagaattagggtagcgactgcgatttactcaatctaatgctaaccgcatgtcttggaagagggtctcagttcctcagaggaaaaccaaccccatttctgagggcgtttctgatctcccaggttatgcctggaacttgaagcatccgattttgggagctttatgtttgcgttgggggcggggttcgttgttttgttttgtttttgttttgtttcgttttgttttgttttgagatggaggtatcgctctatagcccaggctggagtgtagttgcgtgatcacggctcactgcagcttcaatctccgggctcaagcgatccttctacctcagcctccctagtagctggggccactggagcgcgccaccaagcccggctaatttttttatgtttttggtagagacagggttcgccatgtttctcaggctggtctcgaactcctggccttaagtggtccgcccgccttggtctcccagtgttgggattacaggcgtgagccaccgctcccggccctgggggtggttcttaagcatccccaaatctgtatggatatatatctcaacgcctatccctccctctgctccccctcgcccagtctgtcccatgtgagtgttgtatcttgttcgctgtgaaaggtgatgagggtcggtgggggaaatctcagatccccgagcaggaaggttcttagtcgttctgtgagtgcccctcccttctccatagatctcttgtcccctagaacgggtttcctgttttcccgcccgactcacccgcagtcgcttcctctccagtcttggcgtcccactgcctcagggttactcagagcaactccatggcaactgctttcgtcaccacaacccggcaggcgccataagtactgacgcgatgcttaccgggaccttcagtttgtcaggggcggggcttcaaggccgcgggtgacgctgggatttgtagttctctttgccttcaagtacaggccggggtccggaagcggtgataccccttctctttcccagtggccctcaaacttccttttcccgggtccttaagcgggccccgccgacagaggccaatcagagggcagcgcgagggggcggggccatagtttaaactaattgtgcgctcacagcgctggcgcgagcccacgaagaggtacgattccggagaatcgcgaggcagagcgggagcgcgcagccaggtaaccggcgcgggcccgcgtttggcgtgcggcctgggcacccctgcgggtgctcaggcctaaaaggggtgctggagaggccgctgcgagcggaaggcctcctccataaccgagtccgaaagggcagaatctatgggggtaaggtttgtgaggagaggcgcctgagagggaggagccggggggggggggggtgccttaaaggggagggtctgtttgggggcgtgtctgtggaattaaatctgaaggtgactggggtcgggggtatagggcaagttcccgaaaggcttgtaagcgaggggtcgggtcctggaaagtctttgccttttatcgttaacaatagcagtagttatggtagtgcagtagtcagcattttctgagctacaccgtccacaatgacctgccaaatgtttatctttttaatcttctaaccacctgttatactttaaagatggggagcctgaggtttataatgtttagcttggcccgggttacgtagccagtgcgaggttggctctactttgggtttatgggttgggcataaatggggacggggaaggtgctttgtgggggcgcgcgttgtcttggactggtcagtgtattttgagcctcacttttcatatatgtaaacaatgaccttacctgccttacctacttcctggggtggttgtcctggtcaaaacaggttaagtcttttttttttttttttttaatttttgtttgtttttgtttttcatccatggactctcacagataacatgtttcatacacgcacctcggagagtacaaatttatgactataagtggtgtgactgtgtgaagattgtgggtgggcgggagcccactgggttgatgctgccgcctctgggtactctcttttgcttacctctgagttagcacttgtcatttttttttttttttgagacggagtctcgccctatcgcccaggccggagtgcagtggcgcgatctcggctcactgcaacctctgccacccgggttcaaacagttccctgcctcagcctcccgagtagctgggattacaggcgcccgctaccacacccggctaacttttgtatttttagtagacacagggtttcaccatcttggccaggccggtcttgaactcttgacctcgtgatccgcccgcctcggcttcccaaagtgcttgggattacaggcgtgagccatcacgcccggcctgccatctggtattttaaaagtctgcgtgtttgtctgcccttctagataacgagagactttttcgtcactgtatcctaatggctaggcaggatttgcgacatgtaatgggaataaatgtatgctttggaataatttcttgggctgaaagggcacaggaatttcgctttcccgttttcatttagtggcatttgaacctcagtattaagctgtcctctttactggaatggcactccctcttgaaaacgtgatgatattttcttgctttaatacataattccctctctctagtatctgttgcctggttctatgtttccaaacttctgggttgtctggtcgttaaagctttaatggtaagggagttgggcctctctgctttgtggagatctttactgctgtgaatatatgggaacctggggcgaacatgaggatcatgtaaggtagctttctgtcagcacagatgggtttatgtttcctcagtccctctttctgtgtggtattttcttctttagaggaagaaccacatacttttttgtgaaagcttccaaagtattcttttcgtagcctaagttctagcaagggatgactaattgtaatgtctaagctcttagttcacagcgaaaagcggtacattccaaaagcttaaagatcttacctgaaagctcgttaagaaacgtagaattcttttttacatgtggaacatggaagtgggaagaatgccttgaaataagacttgaattctagaacttttaggatgagggcaaagccctgctcaggtggctgaacagagctgatcaggggctgtttggacagctgtgtctaattgataaaactatgatcagaagatattaggtttgtgcaaaagtaattgcagttattgccattgaaagtaatggcaaaaaccacagttacttttgcattaacctaatat

SEQ ID NO: 914921 - DNA, 4001 bp, Homo sapiens
cgtggtgcccacctgggcgggagccacagccggcacccagagagaaggaccaagccagcctggcattcaaccacctgctccactcccacagcaccgggatcttcctaccgtagcacccagcagccaggccctcttcctgacacccccacaccatgtctgcctgtggagctctggggtgcccggcctggccaccggcccctccccgaagctttcatggctgaccagcccctcccagactcatcatccctgggggtgcagggaagacatggcagagcagaaaagagtctgcccctgggccggcacttctttcccaggagactccccggtgtatgtccccgggtgctgcgggcaccccctgccaagccccaggatgggagtaagctttggtgcctccctgagcctcagctttcctgtttgcaaaatggggtatgaaggaccagcttcagtgggccgtgggagactcacatggccttgggatgtcctcatggctgaggtcaagtggaccggccttggtcctctgcaccagaggtccagacatccccgtttaaagaggcacagtgagcaccagtgcagccagcgcctccgtcctcacaatggtcgccaggggcgcagtcctatcatccccattacagatgcacaaacggaggctcggaggtgcacctctcacgtctcacgcaggggtcccagggagctgatgacgtggctggggctccaacccctcaacccccaagaaccgggtgtggggaagaccaggcagggacagaggccagaagaggtgctgctcctgaatgtgagtggagggtcctgacccagggggtcccagtccgggtgcagaaattcatttctcagtctcggggaaaaccagccccccccacgccccctcctctgtggggcgccccattttcctcgcccgccctctccttggcaagctcgccagccctcgcctggcctcactgcgttcctccagcatccatttctcgcttctttgatcttcctcctaccgcccgtctttggagcaccaagaagctgtgtgagacagcggctctgagccttctgccccggcacctgctaggtgcggcccacgtgggagagacccctcctcccacacctggggtcggcggcaaggggcagtgcccgggaccctcacacagcttccattcgcacctcagcccctccctctgcccttcccatcctgccaccaccctgcacccgcttctgctccccctccctcctccttcaaggcagcccctgctctccctccctctcagcatttttccctccctttctctcatttctttctcgtgccttcgctttctttctttcttttctctgtcacttctccccaggtagggtttgttctcgtcaagagaccctcacagccccaggcacagggttgcccccctcccagcatccctggccaggcccggccctcaatctcacctccgcaagcaccacctcagctcgcaccaatacctccccaacccgtcatgggtagcagccgaccctcaagcctcccgggtctcagcccacttggagcctggggcaggggccaagcccctcacccttctccctaatggtccccgccccatccaggggtcacccaagggcttctctcccacaagctcccacttgcagtggctcctgtctgccctccagagacctctgtggttaaccccagtccaccgacctctgccaagccgctctgagccggatgctcagtccccggggccatgctccctctggcctcagggtgcctcccctttacggttccagcaggggcatctgggggtcgagtgcccagggcaccctggctgccgcttgctggccgctctgcccagctctggttcgccggctgggactgaagcctgaaccgccgtcctctgggctctggccctgacaccctgcccagggggctgggccactcggtccctgcacccctgctgctggctcgcctgggcttctgggcaggacgggctctgtccgaagaccgacttccagccctgccagggcgggggctaccccaccctcaggatctcaggcctggatgggcccaaggcagccacacccttttggacactgtggttggaggcctggcttcccccagccccctcagggccagcccagcaggctgccagcccattcctgccccactggccacatcaggagccccagaggtccctggaccaggctgctcagggtgggtccctgcctgaggggccttagagccctgcggagagccaagcacggtgtggctgccacatctgtatatgtgtgggcagatgtgtgcccgagatggagggaatggaggggctcacaccgcccaaagagccatggctaagggtgggcacggggctccggggacctcaatgcttgataagaacgtctgccaggctgatccccagcccccctcttcactccgggccaggctacaaggcactctcagccggcctggtgccctctcacaaagccaggaccccacaggtagcagggccaggccgctggctgagtccgggtgacgtctggagttgagtgggctgaagtcctcttgaggtcccctgaccatccctaacacttgccttgcccgagctggccctgggagagccccgagttgcccaggggcaggcaggaggcacagggcagactcccaggtgcctggaagggcagacttggcagggaggcattgggggtaggtcagcccagggcctgaccctgccagccagaagccgcattctggcaggggctgggtacagccagacctggagaaaatggtgttatgggactacatgcagagcccctgggcttgcactgggtgtagacaaggagaatcgctggggcaggggtggggggcgacggggcaggggggacacgttttcccactggcccagagcaccatttttaatggatgtaaactgcattgaatttattccctggcagctgcgggcacctagcatggcccttcagggttcatcactgaggacacagcactttgcctgcaatgcctctcccagccctgcacctgacatggcaggacacccaaggggtccccgggaaaggggtggggtgatgcgggtggaggagggacccagggacccgggctcatcatgcccggctgagtggccttgaagtctcttcacccacagcttctctgagcctggctcactcctttatccaacagggagtgggtagggggcagtctgcctggcctgcagggctgggactggggaagtccgagctgttggaggctgcagagaagagatcatggcagtggtggtgagcgcagtactgtcccgggtggtcgtgtgtgtgtgcatgtgtgtgtgtgggtgtggtgggtgggtggggtgcagcggcctctgggtctgtgtcctggagggggtgtgtattagtgcacacgtgtcagccttgcttcatgtagctcaccttggtggctccccttagctggacaagggactcttgctgccctctgcccagcccccatcaggacaagttccaagggagttcaaagggacgggtccttatgccaccaacccactggctgaccaccgcaagtgaggtcccctcctcactgtctcctccccaggtccacagggactggccccgagcctgagcccacgcggcttcagtgcctcctccccaggtccacagggactggccctgagcctgggcccacgcggcttcagtgtctcctccccaggtccacagggactggccccgagcctgggcccacacggtttcagtgcctcctgagtgcggcttgctcacctggggctgcagttggtgctgggcccgctggacggatgctcatggccgagcccctggtgacaagggggtgagccaccgcacagccaggcaggggctctgcccctcctccgggggctgcacttccttctcttgggcccatttgttaagtagcactggtgagcctgggggattgaccccaggcactcctcaaatcccaggccacagagctcctggtggacagcagcgtcccctgggaaaac

SEQ ID NO: 914922 - DNA, 4001 bp, Homo sapiens
gagctcctgcatcaacttcgccccagagtggtgatgccaggactagtctgagtgcgggccggggtgactgcagcccaggcatgcccgccacacacaccccgtcccaaaggtgcccacgccagccggacagaccccaactctaccagcgcaggccagggtgactacagcccaggtctgcccgccacacacaccccctcccaaaggtgcccacgccagccagacagaccccaactctaccagcgtgcaccggggtgactgcagcccaggcctgcctgccacacacaccccctcccaaaagtgcccacgccagccagacagaccccaactctaccagcgtgcaccagggtgactacagcccaggcctgcccaccacacacaccccatcccaaaggtgcccacgccagcggacagaccccaactctaccagcacgcaccaggatgactgcagcccaggcctgcccgccacacacaccccgtcccaaaggtgcccacgccagccagacagaccccaactctaccagcatgggctggggtgactacagcccaggcctgcccaccacagagaccccgtcccaaaggtgcccacgccagccggacagaccccaactctaccagcgtgtgccagggtgactacagcccaggcctgcccaccacacacaccccgtcccaaaggtgcccacgccagccggacagaccccaactctaccagcatgcaccagggtgactgcagcccaggcctgcccgccacacacaccccctcccaaaagtgcccacgccagccagacagaccccaactctaccagcgtgcaccagggtgactatagcccaggcctgcctgccacacacaccccgtcccaaaggtgccaacaccagccagacagaccccaactctaccagcgtgcgccagggtgactacagcccaggcctgcccgccacacaccccccctcccaaaagtgcccacgccagccagacagaccccaactctaccagcgtgcgccagggtgactacagcccaggcctgcctgccacacacaccccgtcccaaaagtgcccacgccagccggacagaccccaactctaccagcacgggctggggtgactacagcccaggcctgcccgccacacacacccccctcccaaaggtgcccacgccagccggacagacccccaagtctacccagacacccaacaggaggggtgcccgtgcagcggcagacagcgctgaccaaagggcatctatgaccctggaaacctcatggtgtggcctccgcagagccgcaagccttggccccctgctgagactggaaaatggagcctggtttcccccaacccctctacccctggcttcccattggtcctcagaggctgggtcagggaccgtcctcagagcagggtccagaaccggcttgatgtcctgctgaccagcccatcacctcccttgcgctgggtgccctacctcttttgatgtgctctgtggtcagccctgtgccggcagcacccttgtcccgctctgcagctgtttcacatctctgcccccatctgcggcgaccagcctgggtcggaggttagggccccgccctgctcgtgggtggccctgcctgctgcatcccggcggcgtggctgcggctctgcctgccccgtgcctgctctttcttcccccctcctcctgttctgcgtgctgtgcatatggctttctgtcttcctccgtgtcactaaccacaacgctgccgagcccgtgccacgagcgaggcgacctgcgggacctttctggggccctcgcctgcactccgcgatcagcgtcctccgccgcagctctcaccctcgcatgcgtctacatgcagccccactcggtgcctgcttcccgcaggaggggaccaaggagccctgatacctacaggtccaccgacagcccggctgcgcctcccgcctttgctcgacggccctcgggagcgctgcggcgcctgggccagctgggactgccctggcagagctcttgccgtgctcacgaggcaggcttttggcacgttctgggacacgcaaccagtccctggcaacggctcgaggctctgccatcctctttccttcccagctagccatgcccagatgtacctcacatccctgaagtctctgcccacagatgctgcccgaagcgctcccatcctccacgcaaccagaggcttcatacattattcagacgtggtgcccacctgggcgggagccacagccggcacccagagagaaggaccaagccagcctggcattcaaccacctgctccactcccacagcaccgggatcttcctaccgtagcacccagcagccaggccctcttcctgacacccccacaccatgtctgcctgtggagctctggggtgcccggcctggccaccggcccctccccgaagctttcatggctgaccagcccctcccagactcatcatccctgggggtgcagggaagacatggcagagcagaaaagagtctgcccctgggccggcacttctttcccaggagactccccggtgtatgtccccgggtgctgcgggcaccccctgccaagccccaggatgggagtaagctttggtgcctccctgagcctcagctttcctgtttgcaaaatggggtatgaaggaccagcttcagtgggccgtgggagactcacatggccttgggatgtcctcatggctgaggtcaagtggaccggccttggtcctctgcaccagaggtccagacatccccgtttaaagaggcacagtgagcaccagtgcagccagcgcctccgtcctcacaatggtcgccaggggcgcagtcctatcatccccattacagatgcacaaacggaggctcggaggtgcacctctcacgtctcacgcaggggtcccagggagctgatgacgtggctggggctccaacccctcaacccccaagaaccgggtgtggggaagaccaggcagggacagaggccagaagaggtgctgctcctgaatgtgagtggagggtcctgacccagggggtcccagtccgggtgcagaaattcatttctcagtctcggggaaaaccagccccccccacgccccctcctctgtggggcgccccattttcctcgcccgccctctccttggcaagctcgccagccctcgcctggcctcactgcgttcctccagcatccatttctcgcttctttgatcttcctcctaccgcccgtctttggagcaccaagaagctgtgtgagacagcggctctgagccttctgccccggcacctgctaggtgcggcccacgtgggagagacccctcctcccacacctggggtcggcggcaaggggcagtgcccgggaccctcacacagcttccattcgcacctcagcccctccctctgcccttcccatcctgccaccaccctgcacccgcttctgctccccctccctcctccttcaaggcagcccctgctctccctccctctcagcatttttccctccctttctctcatttctttctcgtgccttcgctttctttctttcttttctctgtcacttctccccaggtagggtttgttctcgtcaagagaccctcacagccccaggcacagggttgcccccctcccagcatccctggccaggcccggccctcaatctcacctccgcaagcaccacctcagctcgcaccaatacctccccaacccgtcatgggtagcagccgaccctcaagcctcccgggtctcagcccacttggagcctggggcaggggccaagcccctcacccttctccctaatggtccccgccccatccaggggtcacccaagggcttctctcccacaagctcccacttgcagtggctcctgtctgccctccagagacctctgtggttaaccccagtccaccgacctctgccaagccgctctgagccggatgctcagtccccggggccatgctccctctggcctcagggtgcctcccctttacggttccagcaggggcatctgggggtcgagtgcccagggca

SEQ ID NO: 914923 - DNA, 4001 bp, Homo sapiens
ccattgctgaagccccctgagcttcatgacccacccagtgctgcatgagggccctgagctcctgcatcaacttcgccccagagtggtgatgccaggactagtctgagtgcgggccggggtgactgcagcccaggcatgcccgccacacacaccccgtcccaaaggtgcccacgccagccggacagaccccaactctaccagcgcaggccagggtgactacagcccaggtctgcccgccacacacaccccctcccaaaggtgcccacgccagccagacagaccccaactctaccagcgtgcaccggggtgactgcagcccaggcctgcctgccacacacaccccctcccaaaagtgcccacgccagccagacagaccccaactctaccagcgtgcaccagggtgactacagcccaggcctgcccaccacacacaccccatcccaaaggtgcccacgccagcggacagaccccaactctaccagcacgcaccaggatgactgcagcccaggcctgcccgccacacacaccccgtcccaaaggtgcccacgccagccagacagaccccaactctaccagcatgggctggggtgactacagcccaggcctgcccaccacagagaccccgtcccaaaggtgcccacgccagccggacagaccccaactctaccagcgtgtgccagggtgactacagcccaggcctgcccaccacacacaccccgtcccaaaggtgcccacgccagccggacagaccccaactctaccagcatgcaccagggtgactgcagcccaggcctgcccgccacacacaccccctcccaaaagtgcccacgccagccagacagaccccaactctaccagcgtgcaccagggtgactatagcccaggcctgcctgccacacacaccccgtcccaaaggtgccaacaccagccagacagaccccaactctaccagcgtgcgccagggtgactacagcccaggcctgcccgccacacaccccccctcccaaaagtgcccacgccagccagacagaccccaactctaccagcgtgcgccagggtgactacagcccaggcctgcctgccacacacaccccgtcccaaaagtgcccacgccagccggacagaccccaactctaccagcacgggctggggtgactacagcccaggcctgcccgccacacacacccccctcccaaaggtgcccacgccagccggacagacccccaagtctacccagacacccaacaggaggggtgcccgtgcagcggcagacagcgctgaccaaagggcatctatgaccctggaaacctcatggtgtggcctccgcagagccgcaagccttggccccctgctgagactggaaaatggagcctggtttcccccaacccctctacccctggcttcccattggtcctcagaggctgggtcagggaccgtcctcagagcagggtccagaaccggcttgatgtcctgctgaccagcccatcacctcccttgcgctgggtgccctacctcttttgatgtgctctgtggtcagccctgtgccggcagcacccttgtcccgctctgcagctgtttcacatctctgcccccatctgcggcgaccagcctgggtcggaggttagggccccgccctgctcgtgggtggccctgcctgctgcatcccggcggcgtggctgcggctctgcctgccccgtgcctgctctttcttcccccctcctcctgttctgcgtgctgtgcatatggctttctgtcttcctccgtgtcactaaccacaacgctgccgagcccgtgccacgagcgaggcgacctgcgggacctttctggggccctcgcctgcactccgcgatcagcgtcctccgccgcagctctcaccctcgcatgcgtctacatgcagccccactcggtgcctgcttcccgcaggaggggaccaaggagccctgatacctacaggtccaccgacagcccggctgcgcctcccgcctttgctcgacggccctcgggagcgctgcggcgcctgggccagctgggactgccctggcagagctcttgccgtgctcacgaggcaggcttttggcacgttctgggacacgcaaccagtccctggcaacggctcgaggctctgccatcctctttccttcccagctagccatgcccagatgtacctcacatccctgaagtctctgcccacagatgctgcccgaagcgctcccatcctccacgcaaccagaggcttcatacattattcagacgtggtgcccacctgggcgggagccacagccggcacccagagagaaggaccaagccagcctggcattcaaccacctgctccactcccacagcaccgggatcttcctaccgtagcacccagcagccaggccctcttcctgacacccccacaccatgtctgcctgtggagctctggggtgcccggcctggccaccggcccctccccgaagctttcatggctgaccagcccctcccagactcatcatccctgggggtgcagggaagacatggcagagcagaaaagagtctgcccctgggccggcacttctttcccaggagactccccggtgtatgtccccgggtgctgcgggcaccccctgccaagccccaggatgggagtaagctttggtgcctccctgagcctcagctttcctgtttgcaaaatggggtatgaaggaccagcttcagtgggccgtgggagactcacatggccttgggatgtcctcatggctgaggtcaagtggaccggccttggtcctctgcaccagaggtccagacatccccgtttaaagaggcacagtgagcaccagtgcagccagcgcctccgtcctcacaatggtcgccaggggcgcagtcctatcatccccattacagatgcacaaacggaggctcggaggtgcacctctcacgtctcacgcaggggtcccagggagctgatgacgtggctggggctccaacccctcaacccccaagaaccgggtgtggggaagaccaggcagggacagaggccagaagaggtgctgctcctgaatgtgagtggagggtcctgacccagggggtcccagtccgggtgcagaaattcatttctcagtctcggggaaaaccagccccccccacgccccctcctctgtggggcgccccattttcctcgcccgccctctccttggcaagctcgccagccctcgcctggcctcactgcgttcctccagcatccatttctcgcttctttgatcttcctcctaccgcccgtctttggagcaccaagaagctgtgtgagacagcggctctgagccttctgccccggcacctgctaggtgcggcccacgtgggagagacccctcctcccacacctggggtcggcggcaaggggcagtgcccgggaccctcacacagcttccattcgcacctcagcccctccctctgcccttcccatcctgccaccaccctgcacccgcttctgctccccctccctcctccttcaaggcagcccctgctctccctccctctcagcatttttccctccctttctctcatttctttctcgtgccttcgctttctttctttcttttctctgtcacttctccccaggtagggtttgttctcgtcaagagaccctcacagccccaggcacagggttgcccccctcccagcatccctggccaggcccggccctcaatctcacctccgcaagcaccacctcagctcgcaccaatacctccccaacccgtcatgggtagcagccgaccctcaagcctcccgggtctcagcccacttggagcctggggcaggggccaagcccctcacccttctccctaatggtccccgccccatccaggggtcacccaagggcttctctcccacaagctcccacttgcagtggctcctgtctgccctccagagacctctgtggttaaccccagtccaccgacctctgccaagccgctctgagccggatgctcagtccccggggccatgctccctctggcctcagg

SEQ ID NO: 914924 - DNA, 4001 bp, Homo sapiens
cgggtccttatgccaccaacccactggctgaccaccgcaagtgaggtcccctcctcactgtctcctccccaggtccacagggactggccccgagcctgagcccacgcggcttcagtgcctcctccccaggtccacagggactggccctgagcctgggcccacgcggcttcagtgtctcctccccaggtccacagggactggccccgagcctgggcccacacggtttcagtgcctcctgagtgcggcttgctcacctggggctgcagttggtgctgggcccgctggacggatgctcatggccgagcccctggtgacaagggggtgagccaccgcacagccaggcaggggctctgcccctcctccgggggctgcacttccttctcttgggcccatttgttaagtagcactggtgagcctgggggattgaccccaggcactcctcaaatcccaggccacagagctcctggtggacagcagcgtcccctgggaaaacacattcccgttgggcagggagggaggtctgaccagcagagcctggaagcccaggaggaggaggcttatggggggccaggggtagggggaggctgggatgaggtgtgcccagccaggggcccactgcagatcctggtgctggtcctgaactcaggtgacagccggagaccctgccaggtggggaccagatcggagccatctctctgcatctgcacggacccaacaagtgggagctggggaggaggggtgagccgggctgccctcaactcctcagaccccacttagctcacccccatgggcatccctggctctctggcctctcagagtctcagcactgagtgcctggcctgggtgggcagtggcaagccgaccgatgccagccctgccttccagtagctcgaggtccggccagcatgctccatgccatcaaaggaagtcagagcaggacagccctccaggttaggaagaagcaaggcagccttcaagcaggaggtggtgtttcagtttggcttaaaagcctggaagggttgaggaggagaaagggcactacaggcggctcagagtggctgacggtgcagagggatatctctgagactgcccaggctgggtcttgaggagccttgggccctccaaactctgctctcccacctgaccccatgaagggccacaccactactttacagaggaagaaacaggctgggagagggcaccacactggcccaacacctgcaggtggacaaggcccgggcaccttccctggccctgaggagcctcccactcagggttggtggctgcagccagggccggtaagctcagcccaaagttcagtttcatgatctgtgaagtgagggtgactgaagggtgcccaggatccgaaggaccccacgggaggccccagaagccacccagaggatgggcccttcattttgggggctcagagtcaagcagaatccctggggctcggggagaggtgtgagcaggtgacagtgcagccggcggtgcaggtgggacggcgtgagcgggtgacagtgcagtcggtggtgcaggtgggatggtgtgaatgggtgacagtgcagccggcggtgcaggtgggacggtgtgagcgggtgacagtgcagccggcggtgcgggtgggacggtgtgagcaggcgacagcgcagccggcagtgcaggtgggatggggaaggagaatgcatgggcagctgccaggagccaggaggaagagaggcctcaagcagcctccgcactcacacatgtacacgcaaccagcctggcaccctctcgctgcccacgcttggggcagcagagcctaccgaagctggggggaggcccagtggcccggtgcatgtggcagcccagcatgggcaccctgccctgccctccatgcccagccagggcaggagggacctacctcaagaggtatccaggccctgtctgctagagttcctcctcagaagcccgggactgcccaggctgcagcctctgctcaggcggcgacctggcctgaccccagccccggggatagagcagcatctcaaaggctcctgtcctgctggccctcctctctgctgccctcctcccgcacccctgcccccctgtgcccagctctccttggctttcctgcctctcctggcccctctcactcctgcacttccttggcgctctgccctggccctcggtctctcgctggctgtcacccctcccctgtcccttctctctgtctggtgttctccttgtccctgtgaccctctgcctgcctgtcttggcccctctggcccctggcacaggagtctgtgggccggctcccttgggcagcctggtccctccctctggcacctggcacaggggtctgtgggcagcctggtccctcccttcggctcctggcacgagggtctgcaggccggctccctgcaggcagcctggtccctgtgtccccatccctgtgggtctccctgactgtgggtctccctttcccctctcctacttcaggactctcagcagctgcttctcttttgtttcccccagcccccttctcctcccgcctccatctcttccacctccacctcctcctccttccgagaagagtaaaaatgtcagagcgaaaactctcccagcccagcagcgtggggctcagccagacctctgtggcgcgctgatgggcagcgtggctgcctccttccctccctccctcccttcctctttcccttcctccctccgcctctgccctcaggccaccttggtagccgctgcccgcttctcggtctcccctagccctctgtggtgcccctgccccaggcacaggggcctattctgcccatcgccgcctcccacctcggagtgcctcatgccctctgccaggccctgcccgggccctcctctgttcttctccttcgtcggccgttcttgtccagcccctcgtcaacctgccacctccctcaccatcatcgcaggcctggacccttcgctggttcctctttgtcccgtcccctccttccccgtctcgcactcagcccctctctcctctctcctttccctctggtgtctctgtccctatctctgtctccctccctccttccctcctccctcccttcccctcccctcccttcctctcccctcctcccctctcccccgctcctggttctccactttccctttgttcattcccggcctctgctcttgttgtcacctccagagaaggcttggcaccccaagaaccctctctgttccccaaatggggaggctgctgcctttcctggtgggcccaaccccccagccagactgcagagttgacccaagaggcagagacgccaccaacgcagcatcttcggtttggtattggcacagcatggtcccaagaggtggccagtgggcacaaagtgggcctggtgccctcgccagccaggccccccttgcccgcgtcctctggccctggcccagggaggagcagcccagccctctgttcctctggttgggcttggctgctgtgactcactggagaacactcggggctagtggccggacggacgaggggtgggatgggacgcatgttcagggctcaccgagggtcagctccgcgacggcagtctcacatccggcggtttgcccagctcgctggcactcagaaccaccatgtacccatgtccaggatggagaaaccaaggtccagccagcagcactggcatccaaggtcacagagtgagggcctggcacagccagaaccagagccagatctgccggccgctggccacccaattagtcctgggccaccatctgtgcacgggcactcatctgcccatgccaccctctgtccctacattcaaggagaacagccacctcttgcctccccagctatcatgaccctggccaggccagggagttggggttgcgcagcaccttgggaacactgagggaagcaagggtgaggctgtgagcagacgggcaagcgggtgaatcaccgcggagggcagcacgccgggggtggcggcaacagtcggaaaattccacatggg

SEQ ID NO: 914925 - DNA, 4001 bp, Homo sapiens
tgtgccagggtgactacagcccaggcctgcccaccacacacaccccgtcccaaaggtgcccacgccagccggacagaccccaactctaccagcatgcaccagggtgactgcagcccaggcctgcccgccacacacaccccctcccaaaagtgcccacgccagccagacagaccccaactctaccagcgtgcaccagggtgactatagcccaggcctgcctgccacacacaccccgtcccaaaggtgccaacaccagccagacagaccccaactctaccagcgtgcgccagggtgactacagcccaggcctgcccgccacacaccccccctcccaaaagtgcccacgccagccagacagaccccaactctaccagcgtgcgccagggtgactacagcccaggcctgcctgccacacacaccccgtcccaaaagtgcccacgccagccggacagaccccaactctaccagcacgggctggggtgactacagcccaggcctgcccgccacacacacccccctcccaaaggtgcccacgccagccggacagacccccaagtctacccagacacccaacaggaggggtgcccgtgcagcggcagacagcgctgaccaaagggcatctatgaccctggaaacctcatggtgtggcctccgcagagccgcaagccttggccccctgctgagactggaaaatggagcctggtttcccccaacccctctacccctggcttcccattggtcctcagaggctgggtcagggaccgtcctcagagcagggtccagaaccggcttgatgtcctgctgaccagcccatcacctcccttgcgctgggtgccctacctcttttgatgtgctctgtggtcagccctgtgccggcagcacccttgtcccgctctgcagctgtttcacatctctgcccccatctgcggcgaccagcctgggtcggaggttagggccccgccctgctcgtgggtggccctgcctgctgcatcccggcggcgtggctgcggctctgcctgccccgtgcctgctctttcttcccccctcctcctgttctgcgtgctgtgcatatggctttctgtcttcctccgtgtcactaaccacaacgctgccgagcccgtgccacgagcgaggcgacctgcgggacctttctggggccctcgcctgcactccgcgatcagcgtcctccgccgcagctctcaccctcgcatgcgtctacatgcagccccactcggtgcctgcttcccgcaggaggggaccaaggagccctgatacctacaggtccaccgacagcccggctgcgcctcccgcctttgctcgacggccctcgggagcgctgcggcgcctgggccagctgggactgccctggcagagctcttgccgtgctcacgaggcaggcttttggcacgttctgggacacgcaaccagtccctggcaacggctcgaggctctgccatcctctttccttcccagctagccatgcccagatgtacctcacatccctgaagtctctgcccacagatgctgcccgaagcgctcccatcctccacgcaaccagaggcttcatacattattcagacgtggtgcccacctgggcgggagccacagccggcacccagagagaaggaccaagccagcctggcattcaaccacctgctccactcccacagcaccgggatcttcctaccgtagcacccagcagccaggccctcttcctgacacccccacaccatgtctgcctgtggagctctggggtgcccggcctggccaccggcccctccccgaagctttcatggctgaccagcccctcccagactcatcatccctgggggtgcagggaagacatggcagagcagaaaagagtctgcccctgggccggcacttctttcccaggagactccccggtgtatgtccccgggtgctgcgggcaccccctgccaagccccaggatgggagtaagctttggtgcctccctgagcctcagctttcctgtttgcaaaatggggtatgaaggaccagcttcagtgggccgtgggagactcacatggccttgggatgtcctcatggctgaggtcaagtggaccggccttggtcctctgcaccagaggtccagacatccccgtttaaagaggcacagtgagcaccagtgcagccagcgcctccgtcctcacaatggtcgccaggggcgcagtcctatcatccccattacagatgcacaaacggaggctcggaggtgcacctctcacgtctcacgcaggggtcccagggagctgatgacgtggctggggctccaacccctcaacccccaagaaccgggtgtggggaagaccaggcagggacagaggccagaagaggtgctgctcctgaatgtgagtggagggtcctgacccagggggtcccagtccgggtgcagaaattcatttctcagtctcggggaaaaccagccccccccacgccccctcctctgtggggcgccccattttcctcgcccgccctctccttggcaagctcgccagccctcgcctggcctcactgcgttcctccagcatccatttctcgcttctttgatcttcctcctaccgcccgtctttggagcaccaagaagctgtgtgagacagcggctctgagccttctgccccggcacctgctaggtgcggcccacgtgggagagacccctcctcccacacctggggtcggcggcaaggggcagtgcccgggaccctcacacagcttccattcgcacctcagcccctccctctgcccttcccatcctgccaccaccctgcacccgcttctgctccccctccctcctccttcaaggcagcccctgctctccctccctctcagcatttttccctccctttctctcatttctttctcgtgccttcgctttctttctttcttttctctgtcacttctccccaggtagggtttgttctcgtcaagagaccctcacagccccaggcacagggttgcccccctcccagcatccctggccaggcccggccctcaatctcacctccgcaagcaccacctcagctcgcaccaatacctccccaacccgtcatgggtagcagccgaccctcaagcctcccgggtctcagcccacttggagcctggggcaggggccaagcccctcacccttctccctaatggtccccgccccatccaggggtcacccaagggcttctctcccacaagctcccacttgcagtggctcctgtctgccctccagagacctctgtggttaaccccagtccaccgacctctgccaagccgctctgagccggatgctcagtccccggggccatgctccctctggcctcagggtgcctcccctttacggttccagcaggggcatctgggggtcgagtgcccagggcaccctggctgccgcttgctggccgctctgcccagctctggttcgccggctgggactgaagcctgaaccgccgtcctctgggctctggccctgacaccctgcccagggggctgggccactcggtccctgcacccctgctgctggctcgcctgggcttctgggcaggacgggctctgtccgaagaccgacttccagccctgccagggcgggggctaccccaccctcaggatctcaggcctggatgggcccaaggcagccacacccttttggacactgtggttggaggcctggcttcccccagccccctcagggccagcccagcaggctgccagcccattcctgccccactggccacatcaggagccccagaggtccctggaccaggctgctcagggtgggtccctgcctgaggggccttagagccctgcggagagccaagcacggtgtggctgccacatctgtatatgtgtgggcagatgtgtgcccgagatggagggaatggaggggctcacaccgcccaaagagccatggctaagggtgggcacggggctccggggacctcaatgcttgataagaacgtctgccaggctgatccccagcccccctcttcactccgggc

SEQ ID NO: 914926 - DNA, 4001 bp, Homo sapiens
ccttggccatgcccgctccaaccccccctccccgctcctggcccgggggatccagggcatttgagacagctgggagggggtggccaaggatgaggccaaggaggaaggcgggggtgccccagcccagaggctcatgtcctgcccttctatgggcatgaggtgaccaggagcagcacctagtccagggctgggggtggtgctgacaggagggcccgttttgcagctgggacacagctgttgtgcacccagaagcctgtctccctgcacacggcctgggcagggcatcctcccacctctccctggggacaggcacggacgtcccgacccagccctcagccagccccggcctctgcttagcctccactccactcacggcactcggggtcccttcagtggccccccgcacctgtacccaagtgggatttggcagcaagaagtcagagatgcagacccctcacacataccagacccacagcaatgtgacggccaccaaggacacagacacaggacagtgactgcagccaccaacagcacaggagctttgtgtgaaggccgggaggtggtccctgcaccgccccgggtcgggtagaccgggaccctctgctgtcagcaccaaggcagagactggtagcagccctggctgcagttttggggtatgtgagcgtcaccctgggcctcctctcaggtccgtcctgtgtggctgcgggcatcacactctttctgcaacctgggccccagcgccttcccttccgcacaccaggccacagcccccgctgacctgctcctaggccggcctctatccccagcaccggatccccatcccctgaccattagcacgtcgcccctctgcccctcaaagccctacctgtccctgcaccgcacgccctgagccctcccatctcttctgggacctgcaccgggggcaactcgggttcccctggcgaggctcagctgtgatgcctggatgcctgctggccggcagctcccctctgccagggagcccagttactaagccgctagccctctccacccaccccagcacagggctggatgcccattggtaccacagagtacagctgcccgctaggaggcctttggcagcggggtttttctgcccagctctggcagtcctacacacaacctctgccatgccccctcatgtccccactccaaccaacacacggtgcctggcacccagcacaggcacctgccagaatccttggccttgtcctttaccgcaggtcaagggcagctttgggtgccctgccctgaggcctgctgggccccaagcctggcggcctccagaccctcaaggcaggatagcccctctcagatagtcctgtgggcaggtggccaggcccgggccagttccacccatcccagaacagctgctccccagcccccaccttgcctcttcccaagctaacagggcccacagtccccagctcctccctggcagtccaggacacgtcttggggtctcctcgcttcaggcatccaccatgggcttaggatcccacgcgcctcccccagtgagtccagggcacagaggcaggcggaagagacctccacccttgttgtgagaggggggtcccagcaagacttcctgccacctgtctgtgggtccccagtttccccatcggacatccaagttctcccattgggggccccagattccccatcaggcacctcagttctccaccctccatgcagctcaaggactatgcacccgtggacacggcacagggcgccgggcgtcgccgcagacccttaccccagcaactcttcccgctcctcggcacccgggtcactcgaagcctccgccatcagcctgtagtctgggccccacagggtgctggcagatccctggagtgggtgtacgtgctgtggctttcagtgctttctggggcggcttctgagcccccacccccagccgagtttcacttcccccttccggctgcaggttgaggtttggaacctgtctcggcttgggtcagggtgttgttttttaatctgttgctacaagaggagaggaagaaaaaaaaaaaaacccaaaccacccctcaggaagcgttaagcaagttacaggggcctggggtgacagagacggggtgcgagggccaagatggccgcaggcagctcttcatggctcggggagggggacccatgttacccctggtccccgctagtagctctggccatcaggtccacctgtgagtggccagttctcctgcagcatcagggacaaacacgtctgtgatcccataagcaccacgtgagcgttttagcttctttgggtgaaatctacccagaggccggctctcctacaggtgctcatggaacttggtggagtcttttctcgaagcctggggtcatagccttgagcacatcaaacagctgtgggtcccaggtggctttgggggctgtgcccgggatgcccctgcgttctacccgtcgggtgccttgttctgtcttggactgccttgctgatgccgagctgtcgggcatccgcctcgtccccccgctgccccttgctctccgtgctctggtcgctggagttgaccaccgagtggttcgtgtccccaggctctaaaggcagtgcctcagggaccctcccaagaggcataggccagcccgaggggagggatggaggctgtttccagccctcactgtccccagcttctgggagtgaccacgcagtggctccagggtcaggaggagggatgcatgactgcaggagccagaccccaaaagctgaggcaggggaggacttaagctgggccagagtagggcagccacagaggtggcgaaggcttccctgctggaaacctcagcgcaggagaatgggagaagggagccctggccagcggctgggcctgagaaatccaaccagcaaggacttacagggggtcccaaggcaaagaggggctggagagaggccaggggttgggagggccctgggcccagagtgttgacccatcagggtggggccgaaccggaggccgcctccttgggactcagcgagccccccacccaccaaacacaccacaaagaccagcagaggctttcagagccccacgagtggaggcaccagagggatccgtggcccagacgatgggcagggctaaaaccagatcaggcccagcgccatggagatgaacaggccatgcctgtgtcttccccacgcctcctccctgggggtccctaagggcccccaagtcccccttgcagagtggcacatggcagagccctgcggttctcaccatgcggcctccatcctgaggccatcctgaaacggctcccctcatggtggtagggtctcgcctccaggttgcagccattccgctcacccacccgtccaggcactgcatcggcaggtgcaatgcctgtgtcctcctgcccttgaggtccttcccttggcctgcagaagggcagccccagcatcgtcgctgggagcttcaggaaccttgccaggaagaggacaggcaggtggaggctggggtccaccccctcctgccctctactgcccgaaggctggaccggctgcctcacttttggagctagagcaaaatgagaatgcagaaccctgtggttcaaaaactgagaattttggccgggtgcggtggctcacacctgtaatcccagcactttgggagcccgaggcaggtggatcacttgaggtcaggagtttgacaccagcctggccaacatggtgaaaccccatctctactaaaaatataaaaatcagccaggcgtggtggcgggcggctgtaagcccagctactcgggaagctgaggtaggagaatcgcttgaacttgggaggcggagtttgcggtgagccaagatcgtgccactgcacttcagcctgggcgacagagctagactccatctcaaacaaaacaaaacaaaaacaaaaaaaccctaagaatttcaagagggagacacagagcacaaaaccacactcagccccaggtctacgaagccgctcgggcggaggggga

SEQ ID NO: 914927 - DNA, 4001 bp, Homo sapiens
aacattcccatacatttggccgggcgcagtggctcacacctgtaatcccagcactttgggaggccgaggcaggtagatcactcgagatcaggagtttgagaccaggctgaccaacatggtgaaactccatctctactaaatacaaaaaaattggccaggcgtggtggcgcatgcctgtaatcccagctacttgggaggctgaggcaggagaatcacttgaacccagaagggggaggttgcagtgagctgagattgcgccattgcactccagcctgggtaacaagagcaaaactccatctcaaaaacacaaaaacaaaaacattcccacatactctctaacagcgactagagacacacacccaagacaacacaaagacgggtacttcacagtgtgccacgccatgcccatggcatgaccccagacacaggggcaatatgcgcacagacacacgcacgcacaccccatctcatgacaaatttgagccacatgagtggggttccttagctctgtgagtgggagagtgaatataggaatgtgtaagaggggctgttttgctggtgccatcctgggcctggcctaattaccctgtccaggagggtaattactgctgggacacctccccgagcctggcccacggggcctagcaggaggatgactgagccccaggcctggccctttaaagagagatgctggggagggggtggactccaagctgaactggggagggtgtaggggcttgggggaggatgaggggggccctgagggcctctgaggcaggatgttaggagcttatggggaggcattggaaaaggagaggctgagaaccccgaactagtccctaccttcaggcctgcaccctacttttaggcctcaacaccctccctactcagaccttgccagtagccggctcccatccccagccctgaccttagctcctcctcccagggaatgcaggtgtctactctggcaggccctactttagacattttgtaaagacttttcttgtttcttccagcaagtctgcttcttgcgggaatatttagcccttctctgaggcttcctgtccccggctcacattcctcaaaaaccctgtgtgctcctgctcagaactcagcaccttctgggaagccagtgtcatccaggacctctgcatttccccaccccttaggccccaaccctaacgcaaagcttcaaagtccaggcctccatgcagccctccaactctggcccccagagttccagcctcccaagttccctgaggcccctggtcccccaggccctcggatctctgccctttataccctcagcccccagtctctaaggccaagaccccactagctctcccaccgggcctggtgcctgtccttcccctgcccccagccgtgcccccggccctcacccacgcggaagccggagcccgtgagcgtgtctgtgctgtggccgttctctccgatgagcgtcatgttggagccctgctgacaactgtcccgacactggcccttgagacaggtccgcttgcagatcaccggcgcaaagaccaccttgaagcgctcgcgggccagcgccccgcccccgcctgcgccccgctcgccggccggccccccctcgaccctgccgcccaggcccagcagcagcagcagcagcagcagcagcagcgccagcagccccgccgcccccgccccgcgcatctcaggggccaggccgccagcagcccctcggggcccgggcatccggggccgcaggacccgggggagggggggcgcgcccgggcggggcgaggggcccgcgcccgaagggagtagagggccgggagccccgggagagggtagggggcagcgagggagggcagcgggggaagcgggcgggaggggaccgcgggggcccggcgggaggcgcggagatgcagactggacagcggggagcgcagaaacttcccagccccaggacgaagcccagaccaggccccgaactcaggcaggagcgaggaggccggagcaagttgaggcggagaggaggagcgagggagaggaaggccgggcggccggcccgctccgcgcctccccctggccgggctcctctcccgcggccgcggggaggcagggagcgcgcggggagggctcagggagaagtgagcagttgttttccctggctggagcgcggcgcggcggcggcgaggggggctgggacgctggccccgggccagggacacagtttttttttttttgttgtttaaagcgtcgcctctgccgcctggagaagcgagggtgtgcaggctggcggaggctggggggtggcgcggggacagtccccaccccagatgcccgcccccgccggaacccgcggccgcgctgggccctttccagagggccctcacctgggaccgtctggccggccgcggattcctccgggcggggcggggcggggaggcctgcgtagagcgagataccgaggctgagggagagaggtggccctgccgggtcacactgacgatggaggccgggtggagccggagcccaggccttccagctctttcccagcctcccttgcaaacgtgggggtctcagggccccaaagtaacttctcgttagtgctggtccaatcccctctgaggaaagggctaaagggtggggacagcctttggccagggctcacggaggtcccaggaggaagtctgtggggtccagaagaggagcagaaagaacaaagctagaacccagcttccctgccagccccctcggaatggcttcctggtgcccaccctgccacctcccccctttcctttcgtctggccgtgctggcggggctggctctgggcctcagacactctggaatcgccaaggtctgagctcagggcctggcccccttcccaggctaacagccgggaggacgggggcgctgtccgagggcccaggggctggagaggggcacagcagagccccagggcaggggctggcagcggctgggggtgggggtcttcaggttggccatggctggagaggagcatagttccagaccaggcttgtccgctggtctggaaggaaaggctgcaacgtgcgggggcccaggccttactgtggggcctgccaggagaccccagggttccgtctctgactcacagaactcagcaggaggtggggacggctagggcacatccaggaaaagcgctgccaagtcagggcggcaccagaccctctcccggacagcacccggggcagcagtctaattggggagaggaggttcagggactcactttcaggcacacctgtccaaggaactctgtttttactttgagcgtaagttgatgtgggtagctttagggggacgcttagtaagtcccccttactaagcggtgcagggctgggagggacaatcacatgtccccagggatccctgctgccggaatccaggatggggtgtgaggggcaagcccctgcttcttggggccctggtccacacggaggcagggaataatgctaggtgccgaccacctgccaggcacagggctgagcattgtatactcattttttcctaacactcatctgaacctgtcctgactctgcctagagctggctgtggctcaccatggagcacagcacagtcaaacagtccagggttggattcttactgtctctaagccccagtttccttgcttgtgagatgggtatctattcactcaacatctatgttcaactactggtaataaaaaacaaaaaattaaaaaataaatgtaaaaaattcactcaacaaactgagactccaccacatcctaagctcttggccacaaatagaaccagtcctgccttcctggagctgctgtactaggagagctggatatgtgccagatcaattcacacagaactgtggctacaacagaggctggtaccgtgacagagaagggcagggaagcaggacaggagagggctgggacctgggagacaaagagagtcttccatcggaagctggaagatgagtaggagtgagtcacacctgtgggcatctg

SEQ ID NO: 914928 - DNA, 4001 bp, Homo sapiens
actatagagctttttcattcaatttaattatagtatccttaaaaagcaaatgtacttttggaactctagagatgttcacagtctaaaatcactgtgggctggatttctattgtttaaatatttcctattatttatgcatgtgttgactgtcatctacttaagtgtccaaagttagaaaatttcctttctctagaagactaaatcacaacataagagtgaatggcaagaatttaaagaataactgtgatgcataatttgtattgaactgttgagagctaaccacaaatattaaaatgggctctgtatttagagcaactaattataatactgggaagcaaactggttttctttaaaaccatctgcactttatgagctgaagtgacaagcaaaccttacagaaaatgaagaatcaaacttacatttcattttaatctgggaaagtcacctgggctttgtttgcaaggaaagactaaatttatcaattattgagggtaaatgaaatagtctctacactaaaaggaaagtttggttacacaggcctgaaagaaggtgtgtagattaggaacggaatcaagaattttacagccttgatttgtaagacagagtaagttttcttcatccttttccatttcagaattagaaacaaccctatatccctactttatttgccatcagatgcacaatcaaataatgtttctattcacgtagacttgaaaggatcttcatcctgtgtgggttattttattttatagtagccaagggaaagaggttgctgccaatatgatgctaagggcatgcagaataaagacagtcctgggcaactaaacagtccacctttgtgctgcgcttgtggaagaaaaaagcaaacccatcacaactttgggacttgatcaacagtggggagtcacaaaactcttctcaatctctgcattttaaatctccaccaaaaatagctcctctgtaatggggcttaaagtcccatccatggccagtgatggagtacagtacttaattgtttctgactagggtctctgcatcagcactctgagagtgtcttctaacttttaatcgccttctgtgctctttaattagacctgttcacaagacagtcaaaagaaaacgcctatcactaagcttatccaagacgttgaaacatgccatttcaggagtccaggaacttttgtacaagtcttagcatcttccaggattaatctgttttctctggtttcctcttccttaaatcaggcacacttgggggaagggagaagctctatggttattaagacaactccaatgtaaagacactgcctggtggcaattccctccttgcctatttccgttctttattttgttcttttaccgcgtgttaccttttggctactaataggaccggagggtaaaatgtcttttctctccttcggaagagaaagcttttgatccctcactgagagcaatcctaagactttctccagggggctgggataactaggaaagggctctgctctctcagaaggatttcagagcccaaaccatacagcgtccctcttgcttaggcgggagatgcaaacagctgaagtgccttggcccccactggtgacccacagtaggaccaacctcgccccggcagcgcccctggcctcaggtcactcacgctcctggactcacctggtgctgaggaccagcgcaggcaggagaggcagcaggtagtgcgctgggctgaatttcatgctgctgcctgccggggtcctccttccctcgctgccttctctctctctcttcgggatcctgtcgctccttggtgcccggctctgtccccagccagtgatgagcgctcttccgaggcggaaaggcggagacgggcacacgaacggacgcctggggaaggcaggcgctgggagcgaggagtatcttcaggagtgatgtcaccggcgaggcgagccctgccggggattgttcggcgccgccgctccggagcccggagggcgcgccgtcactcgcgctggaggcggcgcggggagagggagggggcgcctcgcgatcgccccgtgcgcttcggtcaccgggctgcgctctggtcagtcgggtgagcactggccaggggcggatcatttattcccgctgctccccaggatggcgcggggcggggcacggagagtagaaacctaatctgccgataattgaacttgcgtactcggcaggagatgagacccaattcactgggagagacttccagacgcgtagggtcctaggcaggtgtctctcgccgcttaaaccgtgtttggaagaacgtcgctctggagagagtgtttagaagattgttctaattagaactgcataatgatttgcctgaaacagatggaaggaagcgggagtaagcagcgtccagaaatgcaacctcagcccgtcatggcattgcaatcttcttaacccgtgaatgttgactgcaaagaaccaaagaacgtttcgggaccgttaagacatctgctgctctgggttttgaagatttctgatcttcctctgatttcagtcgtctgtaccagcacctgccaatggggttggacctggtggctcaagttcacacacctgaaggagtccttttcctcaggtgaaactcatcaaggagacctagcggacaaaaaccattaaaatgttaacagtaatcagctcggaatgatggtactggaaggtagaggttttgtaggtcatttggttttctatattttcaaatgttctatcataagcatccaatatttaataggctctatttagaaattttaattagaaaaattaaatagcacaattataatccaaaacaccattttgcaaaagcaattctgagaaacagaactactatctctgctactgagatattcaattctaggatatttataagatgatattgcatgtgtgtgtgtgtgtgtgtgtgtgtgtgtgtgtgtgtgagtgagagtgagagagagagagagagagagaatgagaattccatctggatattatcctggttatataactgtgtataaggcacttcttcatacagtatttaatttaatcttcacaagagccatcctagtgaaatagacgttaatatcactattatagatatgagcagactgaatatcatcaaaatctgactatgcatattaaaaaaaagaactggttctactaagtcctaagaaaaattccactgttgcctcaaacatcacaactagcactcctagcccagtgtttgacacaaagttgtgttcagtaaagggtgaggtgcaccaaagtcccgaaagataatggacagctgtgtccaggaattcctatctagaggtttcagttcatgttccaattatttcgggggcaagctctttacagaaaaatttagatgatacatcctcttcaatctcattttcgaagacatttgtaggaaaaatgcatttgctgtaaagctttattttaaagaggatgcaaatctaaaaggttaaccatctaatttactattttttttaaatgggattgaaggttaagacatgtatgtaaaacagatttgcttcaaaatcttgagctgctgaactagatgagtaataagttttgaaaagtgaatattagccccttgggcaataataataagatccacaacattatcgatcttgtatatgcctaataagtaggcatatacaaataaactaacatgtgaattgcatatcatttaagagaaaaaaacgacaccacacttttctaaaacagaactctgattccaagtaaaataaaaactctggtttgctcctgccagggttttctaacatagattccctgctcactttgaaggagattacttgagttgtatactcaacaaagacataaggctacttggcaatttttttaatgtgtgcaccaggaaataacactcatatttgtagaatacattttttatataacaactttgcatccattatcttacgtcctaatcatagaaaccaaatgtggtagttatttctagtatttttctcttttcc

SEQ ID NO: 914929 - DNA, 4001 bp, Homo sapiens
ttatcagaattaaattagataacttgtacctagcagaggcggggcccagtaggaagtcaacaacattagtcattttatgctttcctatttcatttagggatcaaaagagggagctggaatttaagggagtactccagtaactccttccttaagatttctcaggaaacagcaaacatagtagaaatagtgtatgcttaggagttagatataaggatgtggaatcagataatagcatatgcttaggaatcagatagggctgaattcaaacccaatatttattatgtactgcctgcatgacattgggcaagtcacttcacctataaactgtctttttgagaggattaaatgaaattgtatatacacacctagctctggatcactatatacttggccctcaaatatagttcccacccctattcacttaccttcatcaactactttattctgcagtcatggttatgctgacttttggttgtttccaaaaatgtaatttccctagaaaatctttttcccttgctgaggatagtccagagtgtgatggagtcattttcaaaaaacagtgtccaatagtttgaataatggcagcattgtggggaaaaatagtctccccagaggatttcaaagaggaccaaacttatttgaaagtaacagtattttaaaaaactaatcatataactctgacctttcttataaaatgtaatgcaacaacatataaatcaactctgaatgtctgtttctagcatattttatatctcaggtcatcttccagcataggaacacacattttcctattaaagtgctcagattttcatttgcccagagctgcaatgagtgatttgtggttacaatttttttgcctacagtgcaaaatgaggtttccatttaggcatctcaaaagcccagcgatcactttaagtcattcctttagtagacagccgatggcttaattttcaaacttatatttttacagatttttttcagctaatttgctatttactgaatatttttttaaaacattgcacctcattcatggtatgataaaatcaaaattaaaataattatgctaacactcccaaaaaacataaaaacaggccaattttagtgaaagttacccattattcccaagcttagtgattgctttaaattttttacaatcatggtttgcgtcttcaatgaaatacttaaaaaaaaattattacttctggatgcagtggctcatgcctgcaatcccagtactttggtaggctgaggcaggacgatcacttgaagccaggagttcaagaccaggctgggcaacaaagcgagatcccattgctacaaaaaatttaaataccacccatacaaaaaagagtaaaaatcaaatggtttctcttcagtgttttatttcaaaatgtcctcattaaaaatattccataaccaaaagtaaaagtccagatgatacaaacgtaaatgtcaatcattttggtgaagttgacaatatggtggtacatttttggcagagcagtaccaccaattagacctgctgttgacactgagggtcaccctcattcccagaaatccatagtcaacagcttaggaggcttaggactgaagccttgcttcagtttggaaatctggtgagaaacctaccttctgcacgcaaagagccttggaccaggagcctcgtggtccagatggaagtgagaagcaacaccaggctgaagcacctggccatcgtgcctaccccttcagagccagggaaacacctcagatggccactggtgatatgagaggcagatgctcaataactagtccggatggagagttctggaactatgttgaggctcacactcactgctccacttcataaccgagacatccggatttccctgctttcaagcttctgacttgtcaaggtcactgggggaaatgaatgacgtcccttgaacgcccaggctgtactttgtggatggccttctggaaaatttagctaatgctgactcagaaaacacacaaatgaggaaggcagatagcacagtgtgaactgctaaaggttctcccaattcccatattccctgctgttcctcctcccccagcagctcagttctcacaccattcactgttactgcctgtggagtccatcgtttatgtactcctagaaacatctctgtccctaaaggagactgagcataggttgtgcctcttttcctcccgcaatcagtgatttttccacccagctgttcggccttgtgatctgcagggtatgatgctgaagctcatgaaagtaaatgtccacttaaatactgagtctagaaccttctgccttcctttgagtctccttttacacatttgaaatctctacaccactacaggtgattcctttttcaaagaaaccaggcacatataaacattcacatttacataacacaagtaggagggcaatttacaaaattaaacattttacactttccccaaggatttttaactttacaatagtaatcaccacaggggtcttttatgaaataactttctcttaataactcctttcatattctggtaggccagaattcaagtcagactccacctttgttgttcgatgaacatgaggtttatctgtgctgtgtaccagcagagtgtattctatgtttttccagccggattttcagtggtttttgcttcatggtaattatggagttctggcttgtaagcaatgtcttgggcaaaggtttatgagatttttccaaaatgaatgtcttttataggaaaagtatatggataacgaattcttttttatataagtggtactggtcataaagttagatatttgtgtgaaaaatatcaataacaaaaagagaatctgctctaaacaaatgcagggaacttctaaaagaccagggtaacagcccttacacatctccaataccgacctcatgatctgggtgagcacaagccccagtttctcagaaacatgcatgactctatcatcacagcaccagggaggcagacaggcagagtcctggcctcttcatgattattcttaaagcctaacaccatgcccgaaagagagctagctttctagcatttgttcacttattgcaaaaagaacgaaggaagacaggaaggggaagaatgaatcagggaaggcaaggctttgtgtcaaggaggagaatgagagtcacagtgatcaccagccatagaatttctggaataccaatgaagaggccttagaaaggtcgctgtgccagctttctattgctgtccaacaaattaccatagacttagcggcttaaacagtactcatttatcatttaacagcttctatatgtcagaggtctgagtgggctcagttgggtcctctgccctgggtctcacgaaactgacattaaggtgctggctgggctgggctcttacccagaggctctggggaagaatccacttcgaagcacatttgggttgttggcagaattcatttctttgaggttgtgggaatgaggtccctgtttccttgcagggtgtcagccagggaccattctcttctcctagagcccttccattttcaaagcagcaatgacacactgagtccttctcatacttctagtctctctttcacttctacagttagccagagaaagttctctgctcttttaagagacacggtcttgctctgttggctggagcgcagtggcgccatcgtgactcactgcagcatctacctcctgggctcaagcagagctctctactttttttttttttttttttttttttgagacagagtctcactctgttgcccaggctggagtgcagtggcgtgatctcagctcactgcaagctctgcctcctgggttcatgccattccttgcctcagcctcccgagtatctgggactacaggcgcccgccaccacacccagctaattttttgtatttttggtagaggcagggtttcactgtgttagccaggatggtctcgatctcctgacctcatgatccgcccgcctcagcctcccaaatgctgggattacag

SEQ ID NO: 914930 - DNA, 4001 bp, Homo sapiens
tgtaatcctcacaccagattacaagctccatgagggcagggcccttgcctatctgacacatgtctgagtccccagcctgaccacctagggggcgttcaataaaagtttgctgcatgattggaaatcccacctcgaagcaaaagggagaccccagtgacaacacagcagcccaggaaccccagccccatcacaaggtccggttgctttcctggcaccaaggagtggggctgtgggggctggatcctaaaaacagcggcagccctcgagcaggtgcctgggcaccttgtctccgtagctctttcccaccctcctgggttgttgtcctctgagagagtgctcaggggagcaggggtctctgtggggacagtggctccccctccaggggtctctgccagccccaaactcctcctgctgttctggggcaagggccaagtgcctgacaagttctccatctgctcacgggctaaagtcggtgctttctgccgtcacttttagatcctggcgcaggccacacaattcatgtcaggagtaaatcattttgatttccacctctggtcccgagaaagccatcttctcttcacccctaacaccgcaggacccccccatcctgcctgcccagcccagaggccacacctactccaccacggaggcccagccaattagccacttccctgcacttttgaaaggggatccagccgggaagagtcacaggatcccaggaggcaggccctgaaaggcaggggcagctgggtgcccggcagggctatttggggctcagtagcggcagcttgggttctctctctccccaggccccagactcatgccccctccaggagcaagaggaagtggtgtgattcttgaagggtgtcatcagttgtcacagggacaagaccccacctctgccctgctcctctaacctctgttcctggcatgagcaaactgctcacaagtggccagaggccagcgagaaggggaaaagggcgccagaccacgtgcccaggaaggcatcagagtgcgggcttggggtggggtggaggcaggacaggccagcccaggaaggtcactctgtgaggttacgtgccccaccaggtgggacgccagccccggagctgttccctcagccccattcccgaacacttaagaaccacactgtgcaaagtttggagagtccgggatcataacctccactttgccaccagctccgagtgaccttggggaagccagctgtggcactcggcctcagtttccctcctgcacagggaaggaagttggtaggtcctgcacaatctctggggtgccctgtgacccattccaatggggtaaggaaggccgccttcctcacgctgccccctgcgtggacacttggacctggtctggagtgaattgttctgtggggctgggaacacgcgcgggggcggggggggctgtcaatggggaggaggggtccgttccagggcagatggggcctcaacttccccaggtctctcgggtggaaggggctgctcgctcgttgggggccgcccagccgggaagctccacgtgaggccgccctctccctcgcgccccctcgtgcttacacttacatttcgcctccttccagtcggtggaggtgctcaggtccaccttcgccgccatggccaggggggcccaagtgcgcaccccggctgtccgccccaccgccgccgccccccacgccccaactcccgccgaggtccgcgcacggcggccgaacacgcccaggaacgccgggggaccgcacgtgctgctgcgggtcctcgtggcacccgccaagtgtccgggccgggggcgcggggggacgagcagctgccccgccgcgcgcagctgtgccaggcggccggacagtcggctctgtagagacatgagcgggcggcgcgggacggctctccgcccacttggactctatttacggcgctcgggagtgtctctcccttatttactctgggaccgggtggcgactgccagccagcggcgacctgctcggagccagcgggaggcgcggccagaaaacccgggagcgccgctgggcaccctggaacttgtagtccgggccgccggatgggcccacgcactcgtatacacacgtgcgcgcccgcccgggctcccagtgtcgcggatggagccccgcctgagcccttcgacttctcccgtggccgccaggcgcctcccctccgcgagacctcggccgcctctaactttctggttggctgagcgtcggcttccccggcacgggctgaagcccccgggccttccacgcagccccgggcccctctgccgctcggccccgcggcggagcaggcgcgccggccgctgcgtatcgagctgggagagcctggcgcggcttccgcagtgccgagcgttttgcagcctgggagacccgggcttctctccccgcgggtcagcagggcaccgcctccacaccccagcctgccctcctagggacaggtgcgacgaacgggtaaatccggtttggggacttctccccagagcctctgccttctaacagccccggggccaaggctcagctggagcagaatctaggacagctggggaggagagtcgagggtggaaatagtggaatttggaggcaggaaacttaggcttcaagtggcgttcaagggtggaaggattggggtgatgtttttgtgtgtgtctgtgtgtttttttttttttttcttttcttttttaaacaaaaaccggccgggcgcggtggctcacgcctgtaatcccagcactttggtaggccgagttgggtggatcacgaggtcaggagttcgaggcctgcctggccaacatggcgaaaccccgtctctactaaaaatacaaaaattatgcaggcgtggtggtgcatgcctgttaattacagctactcgggaggctgaggcaggagaatcacttgaacccggaaggcggaggttgcggtgagccgagatcgtgccattgcactccagcctgggtgacagaacgagactctgtctcaaagaaaacaaaacaaaaaacacgaggatggatttttaagtacttttatatatttttatgtactattaatattactttatgataaatataatgaatacaggccgggccattataataatataatgaatgtaataatgaataatgaataagtgctcacacctgtaatcccagcactttgggaggctgaggcaagaggattattagaggccaggagttcaagaccagcctgggcaatatagtgagaccccctcatctctacccgcccccacacaaaaaaattaccctggtatggtggtagacactcacctctagtcccagctactccagaggctgaggcaggcaaacacttgagcccaagggttcaaggctacagagagccatgatggcaccactgcactacagcctggacgacacagtgagaccctatctcaaaagtaataataataatgaatatattttaatacgagggaggaacgagccagggtttcagagaaggttctagtactagtgttgctgccctagggtaccctagccccttaagactcaaacttcttgagctgtcagctaggaataagagagtctggctggttgcaaacctgctcctgtgctccaggcctctgactctgagtgtggcaataaccatggatggccgtacgaggatccctgacctgccatggatgcagatggaaccactgggatggtgacacgggctcacccttggactccagacattaaatctgcccaagagaggatcagcatagacttgccagcagcagggtaggcagtcatcagtactgggagtgagggcaaaggggagccagaggccaggaaggaagagcccacggcccccagcattccaggaccaccagcaaggcctgcaccctctcctgaaaacatcagcaaggcacggttcaggatgtaggggtcaggctccaggtcacctcaccagttgtggcccctccagtaactcagagtaaaggaaggaccttgctgactgcaaccag

SEQ ID NO: 914931 - DNA, 4001 bp, Homo sapiens
aacctagagacacttctcccactgacagtacctgctaagaattaggttgtcttctccctcatctgtctgtagtttgtacttcgtcctaattctggcttttgatagtgatatctctagaacaccaccaggtttctgagcacgccatatattcatttctaggtatcaccactgcttaacgaacccaaatagtcccttggttctcccaactgcaatagagtcatgagcaaactgcaggaggtggggcactataacagagccgcactcagctcctcctgagcagaatccaagggggagagaaatagagaaatgaaatgggatatgagtaaaaagcataatttgttttaataaagaattatgtagttaacctgtcatgggattcgaaaaaaaaaaaagaattatgtagaaatgactagagtgagagccaaagtatcttaaagtaaaacagaatttatagaaccagagctctagactacaccttgcaatctatgtttacattgaaaacccggagccctctccaaccaaaatctcaaagatcaggcctgaagcacctcctactgagtacgcatcaggcctctctagccttggtgggatctcagtccctctccactgacaactatctgacgaaactcaagtcactcacaatcatttccttccagagccacaaggaccctgagatcttgttattattctagctacgggtggtaggataaatttttagccagagttcacatctgatcagcagccactgccttcagttattcagattgcaaagataactaagattttccttctcattctctcctctctcccctccccaaaaagactaacacctttaactcctctaaagactaaatcctctaacatcacccacaactcacactcttgtcttcacaaccaacgaggctccgactctgcctcttgcctcaaccatgtttactaacgtagagcctctggttcctatcttcctgtattccaaaagcatccagctcaaaatgcatatctatctgctgaagtccgacatcaccatcagctccacccagaggtagatttaggattcacaaacttttaagttatctatgccttttcagcagaaatagccatgctaaccaaccctttggattcgtccctcattttggacaggatctcacagtaaaaccacaggaaccagagagcgatatgacatctctgctgacgtgaacacaacaggaggctctcctcccctcctctacctccccaggcagtgaccttgcaagctcatcagcacagactggtccagcgtatgggagaactggagcaaggaggctggcagctggcagggttggggtagaggggagggcagggaaaggtggaagaaggtagatacacgaggatggggaggagagcgattgcagaaagatgaaatggtgttctctctccagcaagtcaattttgaaatatcaagttaaaaaaaaaatttcttgagaaccaaacgtgtttctccaaattctagccaaaaataaggcgcaagcacgcacacgcacaagcacacccgccaagcgctgtgcgggttcggccccagggctggccagctctgcccgccccctcacctgctggacagttctcccccgcccccgcccccgccccgaacctgaacccgagccgcccgctcggcaggaaccaagcccagtagcctgagccccctcctctgcccggggcgcccccatccccgtccccgcccctcctcggcagacccccgtccccacgccccttcacactcccccagggcctcctgagagaccccttcctccaagagccacggtgtcctctcagagcccgtctcccgctcggagtccccagacgctcgcccaggaccccaccggcccagactctcctacctcccaagctctgggggactggccaggcccagcccgacgtcccccggcagcggggcgtcagtcgctccccagcgcggcgccgctccgagcgggcgccagttccgcgtctgcactggggggcacgcaccactcgcgcggggtgcggagggggaggccggggccggggccgtaccattcagcccggggggccggggctgcaccgagccgagcgccgcggggcggggccgacctcgggagacagcggctgcgcacagacctagcctagcgcccgtgggcgcgggagggcgcgccaggccgacccagcgccgtcgcgtgccaagtgggggacccacagcagtaccttctgtttgggttgctcagagagactctcacccgacggggtcatagcgcccgtttcgacgacatggggattcctctgaaagtcacttcccaagataatcggcccctgagacttcctgacgggctccccatcccccagtccccaccccccactcacgcgctttggcggtgctcggcgtccgagcagggaagccggctgccgagcggtggagcctaccaatcctgggcagcgggggcagaggggggcgcgcggccgcggttacctccaccgggcgcgcgcggggagtgggggggcgtggccgcgccgcggcgcccgctgggagatggagtccagtcagtccgcgaggacagccccgcctcaggacatcctccccgcggccacacggctcttctcttcctgtcccaaagggcctggggaccgacactgggttctaggtctttcaggttgtgcctttttcagatgccaaaggaaaaaccaaggcatgctacacatgcacgtgaggtgcaccgccgacgccttagcgctgaaatccaacacttcctcctccaccgcagaaaggcaaccggatcctacccggatcccagcaggggaagggggcgcctaagcctcagcattccatttacccatatggcgcagtgggggttagtaagaagaggccccctctcacggccaaggctgtcatttgtgactctccctcctctgggcctggaggcggatcctaaagatcgcaggcttcctcctctattaccgtgtccccacccccaatccagaaattggtttctctcattttgtattcattttgatcttcctgttcaaacagtaccagacctatcagtgaggcggcgctgaggcatttatggccataccacagagtgacagtggagaatttttcttggggccctgtgggaaaaacaggaagtggtggaggcaggatgggcagggctctggagaaccctgtgcaaagtggcccccaggcccatccgtttgtggggtcagcatgatcttcagacacagcacagtgttagcgagggctccactgctcagtagccacaaaactcgcaaccctttgactctcttttaatgccacgggaggatctccttgcccagctcccaggaatgtttgcccttctcagtctgttccacttctaggaggcagccaccaggcctcagccatccggccaagaaaacagaaaatatggggacagaacagtcattcgtgcacatcccagatctcagagagcagcggtgggagctttttgtcctgcagacgcagtgcaaacacttgctctgagtggacgctgctcagggtccggaggctcaccagtttcattagcatccgtgggaacatcagtcggtcctggggaaaggagagagacaaacacagcttttgcctgtccccagggaagcggggcaagagtaggggagttgtgggagaggtgaattgtctgcacagcatgcagtcagagagaaattcttgaagggaaagtaggtatgtcagggaatgggcctgtgtgtgggaaggaggaaaaggaacaccatggggagactcacatggggatggtggatggagacgtaggcatgcagggcttccacatatgtgtgctgcagcctctctacctggagctggtcctgcacgttgggccggtctataggtcaccaagagagttgaggagcaggtctggccagggtccagttccataccccaaattgcaaccaaaatatagagacatgctccagccaagctctctcatcctaaaataacacagcaaatgcctccaccctcccaa

SEQ ID NO: 914932 - DNA, 4001 bp, Homo sapiens
caccttgcaatctatgtttacattgaaaacccggagccctctccaaccaaaatctcaaagatcaggcctgaagcacctcctactgagtacgcatcaggcctctctagccttggtgggatctcagtccctctccactgacaactatctgacgaaactcaagtcactcacaatcatttccttccagagccacaaggaccctgagatcttgttattattctagctacgggtggtaggataaatttttagccagagttcacatctgatcagcagccactgccttcagttattcagattgcaaagataactaagattttccttctcattctctcctctctcccctccccaaaaagactaacacctttaactcctctaaagactaaatcctctaacatcacccacaactcacactcttgtcttcacaaccaacgaggctccgactctgcctcttgcctcaaccatgtttactaacgtagagcctctggttcctatcttcctgtattccaaaagcatccagctcaaaatgcatatctatctgctgaagtccgacatcaccatcagctccacccagaggtagatttaggattcacaaacttttaagttatctatgccttttcagcagaaatagccatgctaaccaaccctttggattcgtccctcattttggacaggatctcacagtaaaaccacaggaaccagagagcgatatgacatctctgctgacgtgaacacaacaggaggctctcctcccctcctctacctccccaggcagtgaccttgcaagctcatcagcacagactggtccagcgtatgggagaactggagcaaggaggctggcagctggcagggttggggtagaggggagggcagggaaaggtggaagaaggtagatacacgaggatggggaggagagcgattgcagaaagatgaaatggtgttctctctccagcaagtcaattttgaaatatcaagttaaaaaaaaaatttcttgagaaccaaacgtgtttctccaaattctagccaaaaataaggcgcaagcacgcacacgcacaagcacacccgccaagcgctgtgcgggttcggccccagggctggccagctctgcccgccccctcacctgctggacagttctcccccgcccccgcccccgccccgaacctgaacccgagccgcccgctcggcaggaaccaagcccagtagcctgagccccctcctctgcccggggcgcccccatccccgtccccgcccctcctcggcagacccccgtccccacgccccttcacactcccccagggcctcctgagagaccccttcctccaagagccacggtgtcctctcagagcccgtctcccgctcggagtccccagacgctcgcccaggaccccaccggcccagactctcctacctcccaagctctgggggactggccaggcccagcccgacgtcccccggcagcggggcgtcagtcgctccccagcgcggcgccgctccgagcgggcgccagttccgcgtctgcactggggggcacgcaccactcgcgcggggtgcggagggggaggccggggccggggccgtaccattcagcccggggggccggggctgcaccgagccgagcgccgcggggcggggccgacctcgggagacagcggctgcgcacagacctagcctagcgcccgtgggcgcgggagggcgcgccaggccgacccagcgccgtcgcgtgccaagtgggggacccacagcagtaccttctgtttgggttgctcagagagactctcacccgacggggtcatagcgcccgtttcgacgacatggggattcctctgaaagtcacttcccaagataatcggcccctgagacttcctgacgggctccccatcccccagtccccaccccccactcacgcgctttggcggtgctcggcgtccgagcagggaagccggctgccgagcggtggagcctaccaatcctgggcagcgggggcagaggggggcgcgcggccgcggttacctccaccgggcgcgcgcggggagtgggggggcgtggccgcgccgcggcgcccgctgggagatggagtccagtcagtccgcgaggacagccccgcctcaggacatcctccccgcggccacacggctcttctcttcctgtcccaaagggcctggggaccgacactgggttctaggtctttcaggttgtgcctttttcagatgccaaaggaaaaaccaaggcatgctacacatgcacgtgaggtgcaccgccgacgccttagcgctgaaatccaacacttcctcctccaccgcagaaaggcaaccggatcctacccggatcccagcaggggaagggggcgcctaagcctcagcattccatttacccatatggcgcagtgggggttagtaagaagaggccccctctcacggccaaggctgtcatttgtgactctccctcctctgggcctggaggcggatcctaaagatcgcaggcttcctcctctattaccgtgtccccacccccaatccagaaattggtttctctcattttgtattcattttgatcttcctgttcaaacagtaccagacctatcagtgaggcggcgctgaggcatttatggccataccacagagtgacagtggagaatttttcttggggccctgtgggaaaaacaggaagtggtggaggcaggatgggcagggctctggagaaccctgtgcaaagtggcccccaggcccatccgtttgtggggtcagcatgatcttcagacacagcacagtgttagcgagggctccactgctcagtagccacaaaactcgcaaccctttgactctcttttaatgccacgggaggatctccttgcccagctcccaggaatgtttgcccttctcagtctgttccacttctaggaggcagccaccaggcctcagccatccggccaagaaaacagaaaatatggggacagaacagtcattcgtgcacatcccagatctcagagagcagcggtgggagctttttgtcctgcagacgcagtgcaaacacttgctctgagtggacgctgctcagggtccggaggctcaccagtttcattagcatccgtgggaacatcagtcggtcctggggaaaggagagagacaaacacagcttttgcctgtccccagggaagcggggcaagagtaggggagttgtgggagaggtgaattgtctgcacagcatgcagtcagagagaaattcttgaagggaaagtaggtatgtcagggaatgggcctgtgtgtgggaaggaggaaaaggaacaccatggggagactcacatggggatggtggatggagacgtaggcatgcagggcttccacatatgtgtgctgcagcctctctacctggagctggtcctgcacgttgggccggtctataggtcaccaagagagttgaggagcaggtctggccagggtccagttccataccccaaattgcaaccaaaatatagagacatgctccagccaagctctctcatcctaaaataacacagcaaatgcctccaccctcccaagccaccacccccctccccccaccgattcctgtgggacctgcagccctccttggtgtaagtctcttgctgtttcccattgcccctcctccacacctgcagagaagatgctgatagcaatgagcaaggcaaactcggcatcattgagttgcagctcattcatggccctggagaactcgaagatggggttgatgaattccacttgcagccctggggaggaagaagggaggctgacgcaagcagcaggagcagcaggaactttcttctctcctcaccttagggaactattaggaactcactaagaagtttactgaggccgggcacagtggctcacgcctgtaatcccagcactttcggaggctgaggcgggcggatcacctgaagtcaggagttcgagaagagcctggccaacatggcgaaaccccgtctgtactaaaaacacaaaaactagccgggcgtggtggcaggtgcctgt

SEQ ID NO: 914933 - DNA, 4001 bp, Homo sapiens
actgccttcagttattcagattgcaaagataactaagattttccttctcattctctcctctctcccctccccaaaaagactaacacctttaactcctctaaagactaaatcctctaacatcacccacaactcacactcttgtcttcacaaccaacgaggctccgactctgcctcttgcctcaaccatgtttactaacgtagagcctctggttcctatcttcctgtattccaaaagcatccagctcaaaatgcatatctatctgctgaagtccgacatcaccatcagctccacccagaggtagatttaggattcacaaacttttaagttatctatgccttttcagcagaaatagccatgctaaccaaccctttggattcgtccctcattttggacaggatctcacagtaaaaccacaggaaccagagagcgatatgacatctctgctgacgtgaacacaacaggaggctctcctcccctcctctacctccccaggcagtgaccttgcaagctcatcagcacagactggtccagcgtatgggagaactggagcaaggaggctggcagctggcagggttggggtagaggggagggcagggaaaggtggaagaaggtagatacacgaggatggggaggagagcgattgcagaaagatgaaatggtgttctctctccagcaagtcaattttgaaatatcaagttaaaaaaaaaatttcttgagaaccaaacgtgtttctccaaattctagccaaaaataaggcgcaagcacgcacacgcacaagcacacccgccaagcgctgtgcgggttcggccccagggctggccagctctgcccgccccctcacctgctggacagttctcccccgcccccgcccccgccccgaacctgaacccgagccgcccgctcggcaggaaccaagcccagtagcctgagccccctcctctgcccggggcgcccccatccccgtccccgcccctcctcggcagacccccgtccccacgccccttcacactcccccagggcctcctgagagaccccttcctccaagagccacggtgtcctctcagagcccgtctcccgctcggagtccccagacgctcgcccaggaccccaccggcccagactctcctacctcccaagctctgggggactggccaggcccagcccgacgtcccccggcagcggggcgtcagtcgctccccagcgcggcgccgctccgagcgggcgccagttccgcgtctgcactggggggcacgcaccactcgcgcggggtgcggagggggaggccggggccggggccgtaccattcagcccggggggccggggctgcaccgagccgagcgccgcggggcggggccgacctcgggagacagcggctgcgcacagacctagcctagcgcccgtgggcgcgggagggcgcgccaggccgacccagcgccgtcgcgtgccaagtgggggacccacagcagtaccttctgtttgggttgctcagagagactctcacccgacggggtcatagcgcccgtttcgacgacatggggattcctctgaaagtcacttcccaagataatcggcccctgagacttcctgacgggctccccatcccccagtccccaccccccactcacgcgctttggcggtgctcggcgtccgagcagggaagccggctgccgagcggtggagcctaccaatcctgggcagcgggggcagaggggggcgcgcggccgcggttacctccaccgggcgcgcgcggggagtgggggggcgtggccgcgccgcggcgcccgctgggagatggagtccagtcagtccgcgaggacagccccgcctcaggacatcctccccgcggccacacggctcttctcttcctgtcccaaagggcctggggaccgacactgggttctaggtctttcaggttgtgcctttttcagatgccaaaggaaaaaccaaggcatgctacacatgcacgtgaggtgcaccgccgacgccttagcgctgaaatccaacacttcctcctccaccgcagaaaggcaaccggatcctacccggatcccagcaggggaagggggcgcctaagcctcagcattccatttacccatatggcgcagtgggggttagtaagaagaggccccctctcacggccaaggctgtcatttgtgactctccctcctctgggcctggaggcggatcctaaagatcgcaggcttcctcctctattaccgtgtccccacccccaatccagaaattggtttctctcattttgtattcattttgatcttcctgttcaaacagtaccagacctatcagtgaggcggcgctgaggcatttatggccataccacagagtgacagtggagaatttttcttggggccctgtgggaaaaacaggaagtggtggaggcaggatgggcagggctctggagaaccctgtgcaaagtggcccccaggcccatccgtttgtggggtcagcatgatcttcagacacagcacagtgttagcgagggctccactgctcagtagccacaaaactcgcaaccctttgactctcttttaatgccacgggaggatctccttgcccagctcccaggaatgtttgcccttctcagtctgttccacttctaggaggcagccaccaggcctcagccatccggccaagaaaacagaaaatatggggacagaacagtcattcgtgcacatcccagatctcagagagcagcggtgggagctttttgtcctgcagacgcagtgcaaacacttgctctgagtggacgctgctcagggtccggaggctcaccagtttcattagcatccgtgggaacatcagtcggtcctggggaaaggagagagacaaacacagcttttgcctgtccccagggaagcggggcaagagtaggggagttgtgggagaggtgaattgtctgcacagcatgcagtcagagagaaattcttgaagggaaagtaggtatgtcagggaatgggcctgtgtgtgggaaggaggaaaaggaacaccatggggagactcacatggggatggtggatggagacgtaggcatgcagggcttccacatatgtgtgctgcagcctctctacctggagctggtcctgcacgttgggccggtctataggtcaccaagagagttgaggagcaggtctggccagggtccagttccataccccaaattgcaaccaaaatatagagacatgctccagccaagctctctcatcctaaaataacacagcaaatgcctccaccctcccaagccaccacccccctccccccaccgattcctgtgggacctgcagccctccttggtgtaagtctcttgctgtttcccattgcccctcctccacacctgcagagaagatgctgatagcaatgagcaaggcaaactcggcatcattgagttgcagctcattcatggccctggagaactcgaagatggggttgatgaattccacttgcagccctggggaggaagaagggaggctgacgcaagcagcaggagcagcaggaactttcttctctcctcaccttagggaactattaggaactcactaagaagtttactgaggccgggcacagtggctcacgcctgtaatcccagcactttcggaggctgaggcgggcggatcacctgaagtcaggagttcgagaagagcctggccaacatggcgaaaccccgtctgtactaaaaacacaaaaactagccgggcgtggtggcaggtgcctgtaatcccagctacttgggaggctgaggcaggagaattgcttgaacacgggaggcagaggttgcagtgacccaagattgcactactgcactccagcctgggcgatagagcgagattccgtcaaaaaaaaaaaaaaggtctacaaggctttgctgtgtaaccttgagcaaatgtcttaacccctctataagcctcatctgtgaaatgggaatcatatctgaacccttctcagaaaattgttggtatagttcaatgacaaagtatgcagggcactt

SEQ ID NO: 914934 - DNA, 4001 bp, Homo sapiens
ggaaaacccaggagtgagcaccaacagaacatgatgagtaggcgcatgaaaccacccgaacacacccaatggcctttaaggtagtcaggtgacatcttggcctttttcattgccatccactctaccttaggccaaagcaaactctaccctcacaaaaggtcacaggaccacagccagaaccatgagaaagccaggtgcttaccgcaatcagggctgagttcctctggtcccctggggttgaagcgggcggctgctgctctccgtttatcccaccactgccaccattattgctactgttcagcaggtgctgctggtggtgatggtgatagtctggtgggggcggtggggctgctgttgctgctgcttgggaggccgcaggaggggcagcagggggcggtggaggggctgtagtggtggcagcagtggcggtggccttggtgtgtttgccagctttccttgccccctggccatgctgtacaaggctcaggagctgcaaggtgctttctctttcccggtctgagctctcggccctacctcgttcatatcgtccttcacagctcaggtggtgttggcggcagacagcgatccgagcccggaggcgctccacgatagcactgtgcactctcggggtgactgagccccctccaaggagccccgccccagaggccccccctagccctcctgcgggggcctgcgggggcgctgtgtcccccatcttaccggacacaatgattgctgcctctgggatggtgaggtggaaagaggctactgctggctattgcaggcaagtctgtttttgacaatgtgagctcagtgttcagggccacatgaatagaggtcttcagaggttgtgggggagccgtggagaagttgtgggggaggggagttagtaaaaagagggtggggagaaagaatagaaaccaactggggggaggataagttggaaacaaaccctgattaacttactctaattgcatttgacagctctggagaagttggacagagttggtggattttttttcctccaccaagctgacaagagccactaggtactttgtaaacacacgatctgggggttagatcaagaattcagggattgtccagcaagagacagaaacacacagcaaaaggtattgagagaggtattaatagagaggactccccctcacctagttgtttccgacaattctttatggggatgtttctgcagagaaacacatttctaccatgtctatgtaaccagcagccttgacttttcctcaggttaaataaaaaaccaaaacaaaacaaaacagtgctgtttcagaagatgtttaagtcactgttcaaaatgtgcaaaaatcaagggagactgtcttttggcttttaatttttcctccctttcctttcgctccggtgttttctcctctttggggtactgtaggatgttgtcttctcccaaaagagggagacagcttttcaactgttaacaatgtcagtaattggacttttggaccatgcttttttcttcagctaatccaatcaccggtaaaatcctcactccctctaaggtttcctagccttaaatgaaaagcaatcttaagtcgctagccactgagagagatccttcaacacatttttttctttcccgcttacgtttctattcctcacccccggctctattctaatacagtatcaagagagacaaactcttccgagagtaatttacaaacgatggtcaaacttacaaacttccagcaaattgcaccgagtcatgtccagccacttttctgtccacttttgtacattccatccccggccagtggatctgagggtctggactcgcaataagcaatctggttctatctcctgtatttgctccgctttatagatggaaaaaaaaagtagcttgtattttcctttctctttctcgtctgttgttagccgctttgctgacactggctcgcgcccggagtcacggcgatacacaggctttcattgtgctccgataggagagggagagaaagagagagagtgagacagagaaggagaaagagagagccagcaagctgcagatgggggtgggggggcggggagagggcgggagagctcgttcgaggctccctggtggaaggctggtgccactgcgcgagtgagtaatcgcagccaggcaccggggaaaggggaacgcagagggcctcccagtggctgaagaggtaaatcccaagccctgcgcatctcagctgccctggctcagctcagcatcagactcggttaagcggggaaggctggggaaattccccaacctctacacaaccatttcaccagctctaaatgtttaagaaattccgggccaggaatgtgttttccctttcagccctacattacgccccgctgaggatatcattttcatttttcagtatattgtaaatgacaccactgagcaacctagcacgagctgtgtgagcaccgaggaaatgttcattaatagaataaggaagatatgaatgtgtgtgttgagggcggaaggggttgcgcgtggagaggagaggtaatcacattgttagctcctaaagggcaggcaggtgtagcgtttgtctacctgcctgcccatttgtgtgtctctggataagtgagtctgggtgatcacaggcaaatcagttgggataaataaaatattttatgagaatgatacaattatcgataccagttctagaaaaaaacgctttttttttgggaatgcatgattgcctatgaaaaaccaaatataagacctgaagtatccttagctacctggtgcacatatacaatgaggaaagtcaatgtgtagcagctgagtttcaaaaagttttttttttttttttcttttaatggagtcttgttatgttgcccaggctggagttgaactcctgggctcaagtgatcctcccacttgagcctcctgagtagctggaactacaggtactcaccactactgcacctggctctgagtttcaagaagtttaataatagaaaccaaatagatctcacacagatcattgttcccccattttcaagtgatccaacctttaaaatatccaatcctggccaggcacagtggctcacgcctgtaatcccagcactttgggaggccaaggcaggtgtattacctgagttcaagagttcaagaccagcctggccaatatggtgaaaccccgtctctgctaaaactacaaaaattagctgagcatggtgtcatacgcctgtaatcccagctactcgggaggctgagacaggataattgctggaacccaggaggcggaggtcgcagtgagctaagatcacgccactgcgctccaacctgggcaacagggtgagtctctgtctccaaaaaaaaaaaaaaaacttattgtggattctgcttattttcaattatgaagattaaattaaggtgagcataatactgcaacagtcaggaccaaaaatattctgggtatcctaatttggaagtcatttggatttgaggtctcaaataatataccttcagtaatctaaacaaactctggcatttcacgaatatggtcgtttcaaactgagctatggatagaaataggcaaaatcaaggcaaacatctcaatactggatttatttgcaatttagttccctataggatagcctactttagtccattttattttcaccaatcctgttagcttggaaatggggacaaatacactcagattttttgtttgttttataatttcttttatttctttttttaaattttattattattatactttaagttttagggtacatgttcacaacgtgcaggtttgttacatatgtatacatgtgccatgctggtgtgctgcacccatgaactcgttatttagcattaggcatatctcctaatgctatctctcccccctcaccccaccccacaacagtccccagagtgtgatgttccccttcctgtgtccatgtgatctcattgttcaattcccacctatgagtgagaacatgcggtgtttgtttcttcg

SEQ ID NO: 914935 - DNA, 4001 bp, Homo sapiens
ttctcttgggccatgatgggcagcgtgtcgggggcttgaaatgatgggagatggagtctcccttagcccagcactcccatcccaagcactgatttcaggctaggccctcttggcgatccagccctcaaatgtccatctccatggctgaggacccgctgtgggttggggatcgcaggtcgggcttgcccaagctgttgagctgtttcactctccctttttacagattctgaaattgaggctccgagttggagtaaccagctagaggtcatgaagccagggagggctaggccagaattccagccctggccttagccttgactgccaaggagggcttccctctctgagatatctgttctggaggagctgcccatgacgacgggaggggaggacagagcaccaactccacgaacatgaatttaggggaggagaagatgaggagcacgagcttccagaggacttccttgaggtgggagccatggctgggcaggatgcttatggcccacctgagagataccaatttcttaacttgtccaaaccgcagctgcaggctggggtcaaggacttctgaagctggcgcaggaagactctgctgggtgcctggggctctgtttgggggctagcttgagcccatgggcacccctggtcagctgggaccccctagggtgggagctcctacctgcagtagaccctaagctaggctcagtggaaggttgggagcaggtgtgtaccagagccatgccacccccaaccatgcccccagaaactcactgttgttggacttgagatcacggtggatgacgggcaccagggcctcgcagtgcaggtagtgcatcccacgggcaatctgcacagcccagttgaccagcacatggggaggcacgcgccgcccggccagagctcggctgaggggcccaccggctgcatactccatcaccaggcacaggttgggctcctccaggcacacagccttgagggcaatgatgttggggtgtgccagcatggcgaagagccgggcctcctggcgaacgctctcggctgtcacactgatgtcctcatcggggtcctggcgagctgccttcacagccaccagctcacctcgccagctgcccctgtacaccttgccaaagcctccaatgccgatcacctcctccagccgcagctcctggaagctggccacctcgcaggggggcgggccgccaccccgagacacatagttggacgggaagatgcccacctggccacccacctggcccgcccaccagccctcgtctcctgagatggctgcgtcccgggacagcacctccacacggtcacccttcctcagggccagctcatcctgcccactgggctcgtagtcgaacagggctgtccacaccgggttggcataacccgctgcctttggagacccctcaggccggcctcctccaccgcccccaccacccccgctgccactgccattccatgaccctagagggctcttgaggaagaggctcttcaagggctccatggccgggagccggcgctgggatgtgtggaggaccttctctgggtgcccgtggtccccacccccgctggctgccaaggccctagtcccggaacctgggcatccgggccctggccctcagccccagacccacgcctctctggggagccaggagtgttgtctcccggccccccgcatctcgggcttctggaggagggcacccagggcagtgtggtcaggccgggggggtggggccccggggcctccggcgcctcaccatggctagcttggagggacccgagcttccctcggttctggagcagtcctgggagcctggctccggcccccgccaagtgtaaggtggggccttcaggggcagcgcctcaactccggttgggtctttttgcgcagggggtggagggagcgtccgcagttgggccgagactgcctgttcctggccccgtctcctttggccccgacggctccgaccccgctcccttcttcctcctccctttgtactttggccccgggggcgggaggcagaggtggagggtggagtttcacttttttccgctcttctccctcctgcaggaaacagcatcagatgacgcgggcggcctgcaccgctcccctcccagaggctccaggcggggagttcccgggtaggcgggccaggagaggcagagagggaaagggcagaaccagatcccccatcacagcaggcttttgagatctagaaagaaaagcccccagctgcgtgctctgctgcctagggtggaggttggtctctgctaaggatgggccatctctgccctctgcatccgcatcggcggcagcaaaacggggttacagaaccacacttgggaagggggtgaacccgagtctggtcttggctgcgaagttgtgggactgtgcgatccatcgattctgagcctcattattttctttcttttttcttcttttgagacggagtcttgctctgtcgcccaggctggtatgcaatggcgcagtctaagctcactgcaacctccgcctcccgggttcaagagattctcctgcctcagcctcccgagtagctgggactaccggcgcgtggcaccacggccggctaatttttgtatttttagtggagacgggtttcaccatgttggccatgctggtctcaaacccctgacctcgtgatcctcccgcctcggcctcccaaagtgttgggattacaggcgtgagccaccgcgcccggccattcttttcatatatgatatgaggacgagaaagctctgcctcgtagagctagttggatggggtggggaagactggaggacagacggaactggctgcacctcaagctcttggagtggattgcctaaggctctcttcttctcctcacctgggaaacaatccgcttcttcatatcccttccccattggcagaaacctgagacttgtccagaactttgcccaggattggattcagaatagctgagtcgccctcacaacttctggatagggctgccccaattgctttgagcctgtcactttaagaaagacgacgctatcctatttcgactattcctgcctgttacggaaggttgttctctacaccctaggtctgagctctgacccggaagtagacgccgctgggagcgaaatcggtcgtgacgtacgaggtccagcattaaagggggcgggccgagaggggcgtgcttcggtagtgcagaactctcgctgctactaggggagtccacgcctccaccttttccccgcctcctgtaactcattggaagagctgtgcgccaattactttgccgttacccaatggctactcaactgtctctttggttccgcccagtcgtctaccctgggttggcaacgcctgggtctacgcatgcgcccaaacgcttttacgctcgaacttgctttagtcctggagtctgcgcacgcccaaagggcacccctcgcgtcctaccgcgccatcacctttctgcgcttgcgcattcatgccgtcaagttttccttttccgggtcccaattggaatcgttgggcgcatgcgccactgcaggctggcggttcgcggctccttcttccggcctcctccttaggccggcaccagcagaagccgggcgagcgcggagccccaagcaagtgacctgcgaccccgaaagtggaccccagatcctggggttctccctggtccggagactagggagctgtcgcctgcaccccgggagcacccaccccacgaccacctctggatgccgccgacgggtacccggcccgtgccccgcgcctgcctgccggctcggcccctcggagcaattctgggccaggagtggggacccggaccccgcccctgatgcagccccacccccgcgtccgggccttgcaccactgactgtcccggccggccccgccccctgctcgcaccctcgcgcggccgagcccccctcccccgctgggggaggccatggcgtgagcgtgaggccgggccccggggccctcaggcgccagacggggcatg

SEQ ID NO: 914936 - DNA, 4001 bp, Homo sapiens
ccagggctctggctcggctgcacctggcagggctcagacgggcaggtggccccgcttggtcacagctgccgcaggccctaggcaaggccaggtccctctcctgagaggggtcaaccaccctctatccctgacggagtgcctggtcccatgtcaactccgtgcagacccaacctcctctattttccagcagggagggagtaccgttccatcttctaagcagggaaactgagactcaagtggcaaagtgacttgcccagtgacacccaacccttgagtccagggtagccggggagggtccacagagccctcaccctgatggtgtccccagggtactgacccagtttgacatctccctggagagtgaggagaaggttggctccctgtgggaatggaggagagacaatcccatctggtgcccccgagggcctcctcctccctccccaggagtgcccccagctaggtgcctaccttgatgtctctgtggatcttcccctgagaatgcaggtggtggagcccctggcgacaaagaggagtccctgagagcagccacccagcactgtcccacctccccaaaccccctctcaggactggggccccccactcaggctgcttcttcctcccctctccccaaacaggaagtgactgagccaagagggaaatggactgcttccggcaacagggctggggccccttttccccaggacctacagcccctcgggccagccccacccgaggcactccacccgcctccctgctggtcatctgggctcctggcccacagcttctggagaccagaggtgtgggcacctcacaggcccagctaccttcagtgcctctcggcagacgtaggcaatctgccgctcctccaggggcccagtggctgaaaggaaaagggagaggctggcttgggggcccgggggtcatgcccaccctcccaggctaccgtgtgtgggaaaagcagcaggcactgttaaatgaaagcggtgttggccacgtcccctcccagtttagtctaggatactgaacccagagatggacagtatttctctcaaggtcacacagccaggcaggagtggagaggagcccaagtccagggcccagagtcccctctggtaccccagtggggtaggggtgggggaaggctggggcctgctggggcctggagccctggcctcaccatggtaaatctcctgcagggagccccctccgcagaactccatgcagatccacaagcggtcattcctagggacaaagagctggggtgggcacaaagcaggtcacatgggggctgcctggggccaggaggataaggcagcctcacctgaggtagctgccaatgtaggccaccacattggggtggcggcactcacgcaggatggtgatttcctgctggagggagctgatgtcgtcccctgggaagcacaaagcatcatggggaaggcgcgctggggttgccctgactcagtgcccccatctgcaaaatgggcacagagtgcctccctccgggccaggcaggtgcaggtgacagcacctcccggggcacgcctctcaggggtctcggaaacgtcaaccctccgcccgcaccccgcgcccgcgggcgctctgcccttcctctggcgcagaggcccgacccgggccctcacctgggtctagcttgactatcttcacggcggccagttcggacgtgaccgtgtcgcgggcctgcaggggcggagggtgaagcgggatggggggcggggccgggggctagatcctgccgcggggtgcggggctggcaccctcctcccggctctcccgcccgtcccgtcgcaccttgtagacgtcgccataggtcccggcccccacgcgctgcagcagctcgaagcggtcccgcgggtcctgcagcgacacatcccgcagcagcgccatggcccggcgccgggcgggccggcaggcgggcgggcgcgagctgcggagccggcgcggggcggcgcggggcggggcgggcgcccgtggctctgaggccgcgggggcggggctgaggcccgggggcggggccgcgccggggatgccccaccgccagtccgggaggaggcgcccgcgggacgggccctcggcggcgcggggaagccccaaggccggggcggagcctacgtccttccgccgccactgtcgctcgcgctccacaggtagggagcgcaaagtcccgggagccagaagacagagggaagagggggcgctccactccccgccccatccccaatttcccagataaacatggacttgcgctttatattttttttaacaaaatgtattcatctttcttggaactgaaaaataaatctatgtacaaaacaggaagagatcaggctcttgtcacccactcctaaccctctgcagatttcctccgggatgctccgagatgggctggacctctgggaggttcccagagggtcggaagggaggtcctgctctgatccggggccagtttcgtcaggaagagggcggggctcaggatgctcataggctgggggcggagttttgtgtcccagactcgggatacgaaggagaggaaactaggatttccaaattctggagcaggactgaagttatttggggcagggagcttggattcgcaagatatggaattctgaagtgcggaaatatactcctaggggctgagtggtcctaggctcccgggctggaggtgggacctgtgctccttgggttaagggtgaaacctcagctcctacaagctgggaggagccctgagtaacgttggtctggctctaggtgagcggttccgaggaggagcttgggtttctaggggctgggcctttaaagactggtaattaggacccagcgtgaggtttccattggccggctgggattctgggagaagagacctatattctaacgactggggcagagccctgggttctgagctggagaaaatcgtgggtttgatacagactgtactcgggaccgggaacctagggtttgggtagaggtgaggcctgtcccctttgggctgggggcagaacatgggctcagagttgggggactaagggcggagcctgggtccccacaagcggtccgaagtccccagtagttcagaggcctttgcgctgccgcttgaggaaagacagagtgtagtcactaggggtggacactttctgcttcttcatctgcacttgcgactgtgccgtgagttgcagcttgatggcgctcgagttgatcttggtggccaccagcagctccttcatgcccttcatcttctcactctggaaagtgagcactggaccctccggcggtggtgatgctgtgggtgctggcacctgagccgtgctgccaccttcagggcctcgggctgtgccagcgacagtcccaggaggcttccgggggggtcctgacactgcaccctggccggtgcccaggcccttgtccagtgctggcttcttgggcggcgggggctcctctggcttggactcccgccgtgggccccgccgccggccttcccgggcttcctcgccccacggctcctcggcctcggccgcctcggcctctcggctcactatgcgcaccttctgccgcacctgggccagtggggagagcaaggtgagagcaaggttgccggccagtggctggaactccaggaccctgctctggccatcccatcccacccagggggtctcagtcccatcggcacccaaggggatgggcagatgctgcccctgggccagaaaagtctgacaagcccgtggctgctgtcaccacctgtagtgcccagacctctgtgcagctgtccctcacctgtccctcaaaacggcctagggactgcacaagaaaggtggcccagcccacatgcagcacaggcgtgggactgccctcctcccatttgcagatgccgtcgtagaatcgcagcaggtgggcgaagcactcagggtcctggagggcggaaccttggctctgggtgccctggacgagggggaagggagggcacagatcagtctcttactcac

SEQ ID NO: 914937 - DNA, 4001 bp, Homo sapiens
ttgagtgtgctggagaaaggggtttttggtggcaagagaatgagagacatctggagaacatgtagggaaaggagagagaaagaagatgcctcaatagcagagaaggctggaggcacctaggaagtaggatcataaggtatcatgtggaaggtaggaatggaaccaagatgtactaattaccactatgtgctaggcacgagctgttctcctgattatctcatttaatcctcacaatgtccggcacactgcctggcatatagtaggcactcaaaaatatgttgaatatttaatattaactaaataaaaataaaatgtttaatattaaatcaataaaagtgtgaacaatcctaagagatgtctattaccaattacatcttacagataagaacatgaggcccagaaaggttaggaaacttgcccaatatgtcacagctagggagaggtggaaggacaatgacttcaaagttccagcggtggaaggtggggggtaatttgtaaagatcctgtgggtaatctagaaaaaggtatggtgcttgggtgttgcccagagactgagaaagggaggaaagaatgaagggccaagggaactgggctagggaggagggcgagaggccacttggaaagaattcttcttctggaagaatggggaccctgcaaagggcaacatccaggctaacgcagcaggtgagttggatgggggcacgacggaagcacagcctctgctgacattgcaaagggtctctgtgggaaggcagggatctgaggtgggagggatggagaaaagggctacagcggtaaagtgaaagagccaggcaggctgagatggaatatactaacagcttgcgcatgggacagggcagaagagaaggcttcgacaggaggtggcctgggaggcggctggggagagggtgtggcctgggactggagggaggctgcacgctaggcctgcgctggggatcctgggccccgggcagcccgcggggagggtctgcgtggtgactcccccgcgctagcagcggccgcgtctcacctgtaggagctgctcactgcactcgccacctcctcgcggatttgccggttgagggcgtccgccgcggcgcgccccctgccagcctcggggccggtggcctggacctgggcctgggccgcgggcagcggcgtctgctcgtgccccaggccctcggcgcggcgcacaatccaggcaggcccggccttcctgcgcgtgtcgcgctcgtccgccccggacgcctttccggccgccaggccacccgctccgccgggggccgcctcctgctcccgggcctcagcggcggcctgcactggccagcgctcctggctctgcggccggcgcttgggcgccccgagaatgggcgccgacgcctgggaggccgcagagatctgcacgggcttggggatccacgggtggtccccgcggcgcggcagcggccaggcgcggaagtccttctggtactgggtctcgcgctcgaagggagcgtcggagggctggtattcgctgcgcggccggcagctgggctcgggccgctgcaccttccaggctcggtaatcctgccgcatcaccgagtccgcggggccggaggtggagccggagcccaggcccgggcccggcccgctccggccggggcccgccgccggctcgcgctcgccggtaggcccaggcgctggccccgttgcccgggcaactgcatccaactcgccctgggctggctgcgtctctatggcaaccgcgcgcgccgaggggggcgcgagcgccggctgcgcctgctgctgcggcggcggtggctgcggcggggcgcccgggtgctcggtggcctccgagtacttggtgaaaaccagcggcacagcgatgtccgctttgtccaactggttccagaagcgggcgatgcagcaggccctcgtgatgcacggccacgccatgatgctagctgaaaagccggcctcctctttcttcttgtggttctaaagcaagtctctataatcttccttcagcctccgatcctgaccggccaatgtggttcccaccgttttctacccccgatcagccggagctagttcgccctcctccctcagcgagcacccggggagagctgtcctaggagagtctgtagagtccctcgattaccggtcgcaaacgcctttgggagcgcagtctgctgcgagcgccgaagggtgagacgcacggcgttcccgagtccccggcgagggtgtctgggacgcgcccctccctgcggctgcggcggcgcacagacctcggtcgagcgaggcgacgtgaggagaggtggctacaggcttaagccatggcgcagaggaggggccgggcggtgtggccgcagggtccgcggaccgggctcgagtctccttcctgccggcgtcctagtgcagccggccacctagcagggctgggaggccatcacctccagcggagaccgagcattgctgcctccgccgctgcccgcgaggatgccgcagccgccgccgccaccgcctcttctcctgggaagcgaccccacccttttctgcagctctcggtctccgccgctgcccgcgaatgatgctgcagccgctgccgccgccgcctctgcctctgctgcagggaagcggccccacccttttatgctgctcagcagtgagaaaaaaatccaggaacgatgctgactgaaagagtgctgcagaaaaaaacaaaacaaaacaaaaacacctgctgtcgtcagcttgcgctgctgggagcttgccttccctccccaccaccctccgccctggcagctcctccctcctctactcccgggcaacagcagaatctggggacgtagtgggttcaagtcccaagctcgtgaggactttctgtccttgtgcttgtcgcttcatccccaggagtcggaggctcctcttttgtaaaatagggccaatggggggggggggtgctattaaattttaaaacatggaggaaactcctagtgaaatgtctgtcccagaatagatgctttgaaaaggggagctgctggaattggtcaaaaccggcgggctgtgtttgagcccagtttggttgcctcctggttcaagcacttgccagtcttacgcacaggccttgctcagatgtgtcggaatgggagcaccagggctggtggtgccctggatgttcctttcctagggaatctttgcgaaggtatgttttagactcccccaagaaccgcccagtccctgttcagttcaggtgccacactggggcagaggtagagaaaagaaaattctggaaagtggcttaattgtggaggttgggagtaggtaggacctgtgccctaggaaacggcagtgcctggcctgcaggggccttctggcacgttctcactcctcgccgttgctcttcttctatcttcaaagcagaagagattttgaagtccgaaagacctggtttggctctgctactctctgtgccacttgggcaagttgagtcatccctgtgtttcagtctcctcatctgtagaatggaggaaatactacctgcctcaaaaatggttttgtgggccgggcgtcgtggctcacacttgtaatcccagcactttggtaagctgaggccggtggatcacctgaggttgggagttcaagaccaccctggccaacatggtgaaaccctgtctctactaaaaatacaaaaattagctgggcatgatggtgcgtgcctgtaatcccagctactcaggaggctgaggcaggagaatcgcttgaacctaggaggtggaggttgcagtgagccgagatagtgccattgcactccagcctgggtgacaagagcaaaactccatctcaaaaagaaaaaaaaagtggttttgtgaggatagcgaaggacccagggcagaagctttgagtcaaatctaatctgcagagattcaaatcctggcttttgtagctcttaactgtatggcagtgggcaaatcactgcaatcttctgaccttcagtttcatctatgaatgggggtaccaatact

SEQ ID NO: 914938 - DNA, 4001 bp, Homo sapiens
accctgcctttgttaatctcaatcacctcatctataaaatgggcaggtcactaccctctcttggggcagttatgagggttaaaggaggggccttgggaagacactctggacagcagcgagccgtagtgttgtctgctagtgtgggggctgacacttgttgaacactgacctgatgtgctttttctcctttccaggcaagaatcaatattaattagcccacttaacagatggcacccagagaggacaaaaacctgcctgggtcatgcagttagaaagtagtggagctaggatttgaacccaggtccctctaagccccatgtgcttccactgcagaggcctccaggtggggaggcagtatttgcatggaggcctcatgcaccatgccaggtggagtctcagacctcagtctaaggcattatcagagagctgcagccctggagccttcaggcctggcctcctccatctggccccctctggtccttccagctcagctcagggcctcagggaaggtttctgagtttgatgatgctattagagatccccaggggtctctgcccacctgaggacctgggagccagtgaccccttgctcccaggaggggctggcaccacagcccagctggagcctggctggggtggtgccccaggagaggggaaggcgccagttctcgagatggggaaacaatggggtatgtctaagcctccctctctaggccgggagcagtgacttcggcctcttcctccccaccaactagggttcagaattatgggggaggtacatctattcctcctccacacaacactcacccctcacttctctgaaatgcatcgggcctaacaccagattggggggtgggggtggtggaataggagctcaggtcagggttctgggtatttaccccagcagggatcccctcgacaccctcgctggccctggctactccagagccgagccgacttcccttcccgcagccgggcctaggattcccctggttgaggctgagccttcagcgcctgccctgagagacacacctgcctaggtcggtgctgcccaatccagagaggggcccggccacgccaggcctggcaggtaggcccatctggccaggcagggctcggggaggggctcaaacatcctcctcccagcaccaacaatgtcgttgccccaggaaactgcgacccgcgcccctccaggctgttcccagctctattcacaggctaagatgcagcctgcctgcccgctccgggatcgcaaccccgaccccagaccctgccgcagcccggaggttggggagaaggaggcctccgagccccctcctccaattccagcgcagacctcccagcctaggaccaggaatggcggagggaacagcctcgtgaacatgcaacggctaccagtccggacttgaggctggcggggcttctgaggggggctctgtcccgggaagagaccccactcccacgcagccctttcgttcccgggttcccgaggttctggggtggggggcgggcagggcagccaatgcggatcagtccccgctgaagggcgaggcgcgcggcggccggggactctcacctgaaattgggaggcgaagcgatgtgcagccccaggaacggggaggcggcgggcggggacgcggccccccctcccaggccgccgctttctcgctccgccattctcgggcacagccctggccatccgggcggagcgcggcgcggaggaggcggcggctgcgaaggaggcggaggcgcggcgagagggcagccgccgccgcggagttcgggctaggcgggcgcacctgtgtctggcagggcgcggcacagcaccgcgcacggcccgcgggactggcgagagcgccccgcgcgcgcccccgggacccggccggggtctcgcgcgccccgcccaggccccgcccccaccccgccagccccgcccccggagatggcgctctccgcggtgctgaagccacggcccccgcggccctgggcttggttcagccccgccctaaatccgacatcgactctcctccaccccgtggccggtgtgggctttgtccctccggttgggcttagtgcccgggtatcagatgactaatggcaggacactggaccccaaggtccaggttggccccccgcagcagagaccaagaaggcaggcggaaaaggagggtcgtggaggaaggcagagaaaggagaggatgtcagtgggctcttaaagtgtacaggtttggagtcaggtggtgtgaattcactggctccacaagtgactgggcagtggggccttgcattagtgacttcagagcactaaggtttggtcttcttatctgtgaaatgggacaatagcagtccctctcatggttgttgtgagaatgtaacgtaacacaaatgtgttgcctgagacccagaaacactccacctcctgcgctgggatccagccctcaccccagtcctgtccctttaccttgaggggaccctcccaaagactctccctagaggctgtcttctctaaagattgacccaaatctctcttcagccccaaacagctactcgtggtgaattgagccctccaggcttctcggtctctcgccaggaccttcccagcattctccttcttagcgcctcaactgcatttcctgcagagcacccctcttctgcacccacagacacacattctaagacttggcgcctttccctctcctcccactgttgacttcttgggatcattttggttgtttctgttccctctggcacctccatccctgctaggctttggccatggcttcttcctcattgtctctccctcgagagggtgttattcctgggcttccaggccttcaagtccctgagtttcccgattgagttatttcagagtacggactgccaaggctagggccttagctttgctgggtcgtagagcctctggtcaaacctcattggcttctctggtctctcgagagaaccctagagaccctgtccacagggcagaaaacgtgcagagcaaactgtgccacaactcgtggagtcctatttgcaaatctggactgccgaccagtcatgctggcccctttccttcagtgcggcacctagcaaggagctggaggcaccttccgtgcagaaggcaacctccgaccaccagccctgagaatatcccaatacctagagccaaaggtcatggctgcttctcttttccctgtccctggggcccagaggggtggccactactttctcagctttcgtgatcaggcccctttcactgggccctcacggtaatcatctgctgccatggtgcctggcttttcctctcaggaaagcagtcttgccatcatggctactaatcgttccttagaatgtagacctgcctcagctagggaacatccttagcaggtcaggggtggatgtaaaggacaactccctcttccagaaccttttgctcaagagcaaagttatcttagctccaaagaccaacccaaagccattattagagagaagccagaagggcaagaaggaaaggcaggcccaggtcttggtatgagggaggccagcaggagcttcagagcagagccaagaatgagacaagttcccaaggcaggttcctccccttttctccttcttcactctgtgcaggccagactgtgatattcttgggccttgcctgggccccttcccagaaagttggggtgtgagctaataaagctttcagtccaaggctagcatcccctagcatggaagcagggcacactgcacagagaggggccattctctggccaggagacaaagccagcatccaggcgccctaggcttggctgtgggcagatctcaaccacctagtcacagccagagagcctgcatcccctcctcaccacaggctgcagcttaagtggctgcattgaattaaaggatggattgagggcgtggagcaggccctgcactgactgacccccagcctgggagggggtttaagtgggctgcaaggctgggtggcactgcaggatggcacttagg

SEQ ID NO: 914939 - DNA, 4001 bp, Homo sapiens
ctctgggatcaaaagtgagatgacacagaaaggctaagacttgggtgaaaaacatagcagtgactgccaggatgagggggaccgtgtagagtcgtgaggctgaggtgtagctcaagaaactagcatgcaaaacacctggacttcctgggcattacagagacttagccaataggaacagaatggatccaagcacggtgtggggatacacaggacatgaagaaggcaggagactaatgcggagatgaaaggcaacgctgattaaaaggcacagtaaggaagatggggtgagggtggagaaacaggaaggcaacaagcaagaaagaaaatactctaagtgccaggcacgggagtgaagacacagaaagtcatcatggtttgtgttccagcgtacgaagacagaaaggcaaaaactgtgatgcagcgaggtctgggaaaggactgagcaacaggttgtgttaatacggtggggccaagtgtctttgggttgggagaaagagcccagtagaaggctggtagaacactcacagagagaaacaagaggcccagggacctaaaagccaaacccgaggggaagagaacaagagggatccaaagactctgaagggagtgatgattggaaccccaaacgcaacctgtgggaaaactatgcgcatgacagctgtggggaaacacggaagcgacaaatgccagcgccaggatccagggagctcctggagcaaagaagggaaagtgatgagcaaagagtaggcgaaggatttggaaaggtgatgagggtggagctggtgggttgcaagcaagagggagagcacaatttggaaaacgaagaagcagggtagaaaaagctgggggaactgcaaggggccagggatcgagagcgcagtccagggcaaggaccctgagggtgataacccagagactggcagaaccggtgcgggcggaggggaagcgaggcaggagagacgaagggagaggtggacaacgatctgtggcaaatcgcggggtgctgctattcgaggagcgggagggtggctgctttaagcgtgggtggaggaagaccagaaaggcccctgagagaaaaagggaagagaaagggaagctggggaggtgacacggaagagcgcaggagggcggtgaggggagacgggggttggcagaaagacaagtgtgcagcttggagtcaggacgaggtgggtcccaggtcaggactcggaagcgggatgtgcggagccggagccaggagccggatgacagggcagccgaggcttgcaggatggcagcaggggcacgaggagagcagaagagggaggaggctccgcaaggtgcaaagggcccagccagagaattcggggagccctcggggctccttacctgctccgtgtccctctcgttcagcgtgggtaggggggtccgagcgctggacatggcgccggtatctcgggggagggaaccgagaagcttggaggaagggagggaagggaaggcgcggagcccggccgggcggggcttctcacagcaggagcacccgccgcatgggccccggccgggggtgcggggaggccgggcagccgctcacgccagcccggggatgcgccgctcgggctaggccgcgccggctccgagcggctccggaccgcacccccccgacccccggctgggctgtgccgcctttcggccgggccgcgccgctccgcctactctctgccgccgcagccggccgcctgcctcgctcctcccctgccctcagcggcactgctccgcgcccggcacacaggcagccgccgccggacctgctgctcccaacatggccgccaccaccgccggccctcggctcttttcgccggcagcagccggaaacatccgaagcggctagaaacgggaggtggggcgcgccttctcctcccggccacagactacgggtgaattccggaaacagccgaagaaggtaaaccccggggacgcgctctcctcctcgattccgaagacgaagcttcggctctgtttacggaaatccacgaagcgaccccgggtgcctaccccccgcccccgtccacggccatccagccacgcccaccggcctttccccgcccacttcaagggggctttcggcagtttccggaaatacccgaagctgctccgcgtgctgagccggccacgccccctcccacagccctgccgagggcggtcgtcggccatttccggcaacacccgaggccctccgagcacccggtcgtttccccgggtggctctcggagtctgattcgcttcgtgtctttccgtcagttttcgggcattttcaaaccttgaacaggaagcgtgggtcacctgtctgtgcttgtgatttgactaaatacaaaacaagattgttagccgtccctgtgattggcatcctctggttctatagcagcttcctgtctgcatttctgtccatctgtcggtcagctcataaaattcatcttctttttatcatctagcctatcaatatacctgtcaaatgcagcatcagtctattgcctgtctgccaccgtctatcttggcttctgtggattcatccgtgcattcccgcatctagtccgcagggctcggcaaggccccaggcaggcccagggcagcgtcctctgcaccggatgcgggagcgtccagggccctgcatttcagccccagctctgccaagtgccaatgctgcgtgatcttggaaaaatcacataacatcactgagtttaggctcctctttcctttgcctttgctcctgcgttgacattcaaaatgacatttctgaattccagttaccttttaaaatgcctctgcaagataaggcatttaaagtttcttttctttcctcctctgggcctcattttccccatcagtaaagtgaagccattggattcatgaactcggaggtccttctcagctttggagagcccttgactaacaggaagtctgtatggcaactgcagtccattcctcacttccccttacactgcgttaccaaggacagggagtatcctgggctgatttccccagcgccaagctgtcctcacccatagtacctggaacacgttggaaccacaccctcccatcagtggcttaaggtgggcaggaggcagaggccccgcaggagtcagaaaccagactcaggcaacaggttcccaaaggtacaggagcagagaggctccaggagttattgggaaaactgctgattggacccctgctacttgacctccaactcccagctacagcatcttgagccagccttcatcccatcaatcagagaaataggcatctgagcagatgtaattaccagggtatgaaagtacttcctaaggcaacaggtatcactacactcttagtaaatcctgggacttcagcactgctccccatgccccataccagctctattcaggcacccaaccgttgaggaagaaggtgaaggcacacccatgaaggtgagggaaagagagaagaggaggacagagaacacctcactccccaacccaaattcgatccttgagaatcatctgccctctggtggccaaagggagacacgttgctgattcctgtgcctggtatcacctctaatgccagggtctggaaagcagggaaaagagagaggaagcagttggtggttggtgttccagcagtctctccctggtccacactctcgtctaaatagactccatcttctccaagcttctcactctagctctaacccctgcctcacccctgccctttgaccttcatccccaacccctaccctacctatcctttctcttccttgctagctttgcacaaggctgctgagcttgtctccccgcctagactccctccaacctactgcaccagacatgtcagaataatcttcccaaagtccagctccaataacatctctgctctgctagaaagctatcaccagctccctcactggttataggcagggctggcttcttgggcccacgaccccatgcagtcacacagagccctgtgctcaggtggaccctgagctt

SEQ ID NO: 914940 - DNA, 4001 bp, Homo sapiens
gagagtcaggaactcaagacagggtggctgtgaagggctggtcccacgctgggtatccaggacagggaaagagaggaggttctgcttgttcaggagccagagaagcaacaagcactggtgcttgctctttgatcccctgctccaaagtcaccaacccccttttcgggactgaaccatccaactcagaggactccaagtgctcaatccttcccttacttacccctgcaccccttcttctatgctgtaagatgtttcccacagcagggatgtgagccagggtaaggaggcaagccactggaaggaagcagagaaaagaaaaagggaaaagagaggagagagtctccaacagaaatgcttcttgggccaaggccccaagtgaggcaacttcctcacctagcttcttccctgaaggataaagaggtaagagtatgcagtggctaatatggagagagagtttctcttttttggttctggctgcaccattcagcttggccctgggtctcaccaacaggatggcaggctgaggattagctgccctgctgggccaactcaataggacctggcaaaagccacgctctcccctctaccaccatcctccctgcttatagtaagacgtggcacaccaggcactcccaaagctctggcctatatcatactctagacaggccctaaaggatggaggaggtctgtcaagagtagaccctatggctctcaagtagcctttagaaagaataaggggtcaccctgcaaggcagttatttggaaccaaaaggcaaaccaagtagttactaagcaggcctgattcagaagtagggctgaaacagctttggggtctgctactgagaggaagagagaaggcaggacatggaggagaaaataaaaagatagttttgcatccactgggcctgtcaggccccttccgcctgggatctcagactcggcctaggtgtgttgtcaggcttgcccggaagacagcctccaccccgagaggcctggcgctgactcaggtaggcagggcccctgccctaatgctggaggctcctaccaacagttgtcccatggagaagctcatgctttggggctctgcattcagggctggcttcaagtgtcctttggcttcccgagggctgagaaggagccaaaccaggaggggtgatattccctggccagaagcagagtaagccaggcactatagagttgggggagaaaagtgtcccttgggcaccagtcctgggcaatggccccagatcctaggctccccctcactgtagcacgggagcatcctctctgaggcctcaggcctctgcctcccaccagcccctcctcgcccacttgtcaagctgcttgttctcaggggagacccttctggtatgtgccccctcttcctttcctagtcaatgcctcttccacatctggacacccttcccatgaatattactatgctggactcaggcagggcgccccttagcaactctctaaagatcctatgtttgagatgagaggaaagaaagaggaggaggcaatcctagagtaaaaagggggacaacatacccgactggagaaagggaaaaggactaccagcgacttccattcagcagagcccacagcagaacctgtcaggcagcgagggcaaagtacagaggccgggaagagccaggcctagggcgggggctgccggctcagccagccacccttactcagccagagcaggcgacaccttccaccacctcctcagtgaaaagtagctaagcagccaggccgagcggttcctgcctgggaacctggacggtgtcgcaaccgaaaccaccactagcagagagactgggtttggcaaggagagcaacagggacaaagccccgctggcttctcaagggccagagcctggtggtcaggaagcgcgtgcaattccaggacagcacaccagaagcaaggtgggagggaaggggcaggaggggaatagggcaggaagggagacagagaaagaggcgggtttagatcaacttccttctcccctccccctccccccctccccggaagtgggcagccccaccctccccaaggtgctttgctgggtaacagctggcgagaggtcgaggagactcactgcagccacggctgtcataaaaccctagctcacctgtggcaggtgggacctgggtaggggcagatgactttaacaaagcctccaatagggctggggaggaacatgtgtgactcagatgtgctgacccagagtggcggccctgccaaagaccagcaaaccaccccctcaagaacgaagtggggaggagggtaagcagaaaccagcaagctgacagtggcggacggacctcctacttcctaaaaaagcagtgcttaaccttggaaacatgcacattccacttagacacaaaatattttgagcataatttcagggagtttggggactctgtaaagccccctatgaggtgtatgttttctagattaagagcctttatcactgatagagcattctatcaatgaaaaaatcatatttaatcctagattttgcccaaaagctagaaacaatccaaatgtcccttttaagttccttccagccctgcttctgaacgttcatccctaggttctcactcacctccaagtttccagtcaccaatcccctgccttaccttcaaaacaacactgctttctcaaggaattccaaaggcctgggattcctcacaccttcctcctgctaagcccccactatctgggcacatggtgagcacagggcaagctggctgtctctcatctggagaagactccccttctagaccaacgacccctgtctatgtgctggttgcagccttgcctctggttctcagaacaatttctcattcatcccctattctaggctaggctccctctcattaaggaactccgtgaccttctcacgttggtagccattaaccctctagggaagggcaaagcttcctctgtgctctcacagcacttaagcatatattcctgcaagaccatgctactcaggagtggccaagaaatgtttgccttacacatgagccctggccaacggattcagcatttctgatgctactgtatgtccagcgcttacactttgttttctccaaacacagacctatagggtaggtagtctccctgttttccattgagaaattggcattcagaggttatgagacttgcccaaaatctcacagcttctcagtacagagctggggccggagcccagagcttttgtcaccatttcagcactctgctgttcttgacagtcccccttaccagtttctcatcaacccttcttgatgcctaatcgtgctctcatttcccccaaaagataagcccctggctcctcctccataagctaggaggcagaaggtatgaagactcagggaaggtgctcgggacactgggaatgacaatgtttgattcaggccaatggtgaagtgctgtttaaaggcctatcccagtggtcccacagcaacccttccttttcccagccccccaaaagtgggccctgacttcagtgggcccactggatcctgggctcaagcttgcccgggccctccggcccttcactcactggtagactgagaaccagagcaggatcaaacagcttcatttttctagtcccttcatttttctagggctttgcaatgtgacagaaggactgtttcctcaatcctatttgtgggagacagtaagggattttgtaaactgaggaaatacaaagcactgactacaaacagaaaagctgggaagagatagggtaggatttagattaaaagccacatgggggccaagcatggtggcccccaccatgtaatcccagcactttgagaggccgaggctggtggatcacttgaggtcaggagttcgagaccagcctaagcaacatggcgaaaccccatctccactaaaaatacaaaaatttgctgagcgtggtggcgtacacctgtaatcccagctactcggaggctgaggcatgagaactgcttgagcctggg

SEQ ID NO: 914941 - DNA, 4001 bp, Homo sapiens
gcactcacagaaaaccagtcgacatggctgaggttgccttgggactgggagaggccgcacttcagaagggctgtgctgcccacttccacctccaccagctcaggcgcaggctgctcagcctctccgggcacacctgggggagggaggcggggcccccgcagctgtgtcagctccggctgctgtccgcccctcccctcgcagcgctgctgcagctgtttttcctgccactcagagggtctgcagagggccctgtcctctgaacgctctacccccaccccgacccgcgccccacctgggccagccctctccccgtccaggagatcccaggtccttggagccaagcagagattgagcagagactgagcaccgaacagctccagctgaggctggtagaggggcagaaaggggcaacctaggctcggggccaagaggaaggcccctttccttccaggccccctcctctccgggtgagctcagagtgtgggaatgcaaagcatgtgccaggctggggcacacaggcccttttgtgtcaccaccgccaggggaagacaccactgctctatcctctgccctccaaaatccctgccctcactccccagcgggctaactctggcggaagttccggtctcatgctccctcagcagcacctccatgaacactccgcacacacccgcggaccccaccctaggtagctggtaaggatggagaggtcagagtctcccccaggggtcagggcaagggccaggcagtgggcaggagtgacgtcagtggtgccagcgtgctgccagccctgtgaggaggtgatgtcactcgacaccatctgcctgggctctgggatgcctgggttgttaccttggctctcggacaaggagggcaggtggaaggtggggtctccaacccagagcctcagacccctgactcctcccagagctagaagagcagggcagggtggagctggaccggctgcaactgtggagcccgatttagccctttccccagaaataaagtcagcctgggaggcagtagcctggaataccccagggacatggttggcactgggcatgaggccagcgagctgggtattgcctagccctccccttccccagccggacagcggctgggacggcggaatgggagccaagagaaacacgcgacaccgctgcgggccatacaagggcagcgtggacccgagagcgccctgctaccaggcggatccggagaaacgctccgaggtgcccgggcgcacttcccacctgaatgtggtccccaaaataagccagcgggcgcttccagtatgggaatcctccatccctcatctctgtcccctatgatcccatcactcggggaggcgcgaggcgacccacaccgccccgcaacccctgccaacgcccagctcgggcgggagccgccgaacctcccgctctcgctcacctccagcctggcgtgatgcccaggcagaagggggaaggggtgggtcggcgcaccccctccagcgaaggaagctgccttttccagcaacaggcgggcgcggaattcaggctttgaggatgcgccccagctgcgcctcctgcccggcttcaattgcgggcccccagagtgagcacctcagggaccacccaccccccagcaccccgaaaggctgagctccaccccttctcgttcccagaagcagcctcctccccgccttccgagtgctgctcccgggatactctagaatcccggctgcaaactggctgcaaagaagagttgctcgcgcgcaaggcgcccggggatcggggacccagggaggaggctcgtcctcccagacgcaacgccccgaccccgccgcgccgctggctctgctccctggcacgctccaccgcagacccctagccggggcgcggcccccctgcgagcgaactcacccgcgacgcgaggacagcagcagcaggcggcgagcaagaaggcgcagaccagcctgggaagccccatgcttcccggccggagggcgagagccaagtgagcagctcgaggctgccgggggctgacgtcaggggggcgggggagggggcccggagcgcccgggcccgccccgccccgcgcagcccccagcccccgccccgcgcgccgcagccctagggggcgggccccggcgccgccagcccgggagctgcgcctaggagcgctgccggaggtaggccagagccggactcccaggctcctggcttgggaaggctgagggggtagtgacaggtgtctcggggtctgactggccgaggtggcagcgaggagaagctgtcccggatgcccggagtcgccccgggtcgaagccagccaggctcaccgctgctcagcccctgccagccaatgtagcccctaggggacctcctgggggaggagcagtagcggacctggtcctcggtgtccccaaggggcctcccacttgggctcccctcccttgccacagagaattcaggccggcctctatcgcttcccagaacgattgcaccactgccgctgccgccggcctgacactgcctcagcctcagtgctggcagctttgggagaagaaccctgcgccagtcccacagacccagaagtacctgtatggggagtgcagacgatgccttctgggctgtcccttcaaacgcaagctcctgcaagtctagcctttgaccagagaaaggaaggagggggctgaattcgcaggcccaaggtgttcacacttgtccagacctgggccttgagaatcatgtttcttccctcttcactctggagcctaccctggaactcagtttcccctcacctaagagaaagaaacagggagaagaaagagttaatgggcgagggtccccagcctgaccctgcaaacctgttgctgttcctgatgattgaaaggatcccggcagcgctgatcttcccccaccccatgtcttccccagccctattgattgtgggtccatagctgagggaagaatcaaatcagacctgcttgggtggggagctctgcagctccccttctcccaaaacgccggcttctccctgggtcttctggcctcttgaactaaggctctagggagggggaggtgctcttgcctcactctgaccccagcagcctggcctcagaaaaggggtccacatctgctggcgcgcctccaccagggagtgccaaataggggcctggatttgggtagaggtctgttgcccagcggggccacccctttgctcgctgggggaggtggagggtgagccagcaaaccctggagatggccaggtgacttgagagcatgctccggggtggcgttttgatgacgcagagatgactggaaaaccacaccaggcttgtctttcagagccttctcgacccctcctccaatgccattagtctccagccagaggctgtgcagagcccaggcccaccgggccaggggcctggagcctggagcctgcagggagaacaagaggaggacgctggctcgccctccagagtgaatgtatggactggccccaggcccagagctgactagatgagaatgttttgtctgctgggctggagtgggaatggctgaaggatgccgtttgccctggcaggcccggctgggcatggagctggcttccctgcccaacccccttccttcacttaacaccattaactaatcattcgcctctctggcctgaaaacaaagccagctaaccaccaaggacagtcagttctgaattcttcttccgctggaggagagtgaagccaggtgggggtggaggatttgtctctgcggtgaaagggaaatgaggtcagagcctagagcccagggtgacgtcccttcgcattgccccaccaaacaagcacagaagactgtcctttaaggaagccagtagcctggggctgtctaggctgctcggaagtgggtcatagcctcaggggacagatagctttgggatggtttcatgaggtgggcactttgggattccaaactaaagacgggtcaggacctcggaaaggacgcaggagtggaggcagggag

SEQ ID NO: 914942 - DNA, 4001 bp, Homo sapiens
tgggggaggctcaagcttcccagaatcccttgtccctccccactttgggcacttaggggtggggctggggagtgagagggacaaggcagggcatgattgattaaagctaacgagcagacagaaggcactggtgggtcacatctcgggcctgggagagggagggcgtgggccaggccccatgtgacaccaggggctccttggcatccaggcttggcgtctagtcctttcccttccctttcttggctgtaaaacaagaaagaaatattaataccatatcagcagttaggctgacccattgcagaccgccggctccacaaacacccgggcatcagggaaggagaagattctgccccctagtggtttccaatcagctgactcggaagcaggggatggggcagccattgtgatgtggacatgggacatccccagcttcctatttccacttgggatcagaaaaccttcaagtttccagtcctagtcctggtcacagcagccctgggcatcctcagcctcctcacctgagaagcgggcagattcacccctgccctgctggcctcgctgggctgagtcacgagtgagctgagaggcccagggtgggccttgacctcctcccaacactagaaagggcagagctgaccaaatgctgcccgtggctggagagctgacaaaggcaagccgttccaggacactctccctgggtcctaagccagatgctccaatggagtagtttgagttggtccctatttgggccagggaggatttatgtccccagcatcacctgcggcctctcttgtagtgcccatcttcagacttttccaggcagggaagccaagtgaggcgatgtcaggaagccactggccaggactcaaaacttaaggtttaacttggaattgtcccctcacaggcgggggggggggggggcagccccccgcgacagccccacccccttctcctttcgctgacctttggcctttgctttggtcttgggggtgcagggcttggtgacgcggatggtctcctggcactgagcattgtagcgcgccttcttcagggtgccttggcggactttggtgcctgtgcccccatcacacgcaccccagttctcaaacttgtacttgcagtcggctggcgagagagcggcccaggtcagcgctgcgcggcccgcggccccgccctccgccaagggtccgcccaggcttcggcgaggctgtgccccccgtctcctgccctctgactgcgccccgcctcacctccaaactccttcttccagttgcagggcaccctgcaccggatgcgctgggtctgggccccgcaggtgccctcgcggaaacccacgccgcaatccttgctgctgggggtgcagggcccccaggcccactcagcgcactcgctccccgggccgcccttcttcaccttatctacaacgcgcgaggaacagagttcaggactggggcacggggagactccctcgggagccgccttcctggggttccaggctaggaacccaggcggcccagcccagaagtggaggggcctcgcctgcccgtccccagccctccttcgatcatcccccatcacctttctttttggcgaccgcggaggtgagcgccagcagggcgaggagggtgaggaggaggaagcctcggtgctgcatcctgaggggagagcccgagtctgaatccctggcccgtccccttccccaccgggggccgcgtgcagggccctcccacctccgcgtgctccactttccaggccccaagtcgggctgctaaggtggcggcggtgggaagacttggggcggcccctcgccgctagcccggacgcaccgctaagaggcgactccccgggggacgcctcgagcccaggacgcagctcagacccccacccccgcctccagcccccagcccctagatcggccgcggccgggcggaccaggggccgccgcgcgctcactcgctcgctgcccgcgctgcttcgctccctcccgcgccgggcccgtcccgctccggccgccgcggccccttttgtctccagaaccggtctgagccggtcacatgggcccccgccccctctccccacccccccagggaaggacccgccccgccccctcccctcaaacccgcaccgcccccgaccccggcgtccccgcccccgctccagcccgcgccccccgcgcttctactccggcgtccgtgttcccggccccgcgtcctcgcgtctccccgccggtgccctctgcgctgcgacggcggcctctcccggccccatcttccgagcggtggtctcccgaccccgggccccgtcccgcccgcgcacaccggcccccggcccactccctgcgccgccgcccgctgcccccatcccaggtcgtcccctgccgtacgccaaggcccgggccgttctcaggcctcagcttctcttgcctgccgcggagccccggcgcctgtataacccgcgggacccgctcccctccacggccggctcagccctggcgccctgctggctgctggggagggggcgcggcccacctggggcggtttccgcgggtgggcagggaagcgctctgctgtgctggggggagtctgggacccggtcgcccagagaaagccacgggtgcggtcgcccagtgcctttccgggagcacaggcttgagggactgcgagtgggggtcctgggggaggagcccgcaggcctggatttggtgaaacttggcgctgacaggagccgtctgagaagttccagatccagccacatcggcagctgcaagtgcccaccccctctaaccctgggcctgtggcattgcctcgcccggttcccccaaaccgggagagcccccgaggcctgggggaggggcttgctcaaggccacagggcaaatgggccacagaacccgggctcgcccccgccccacccctctttcactttcattgttgttctccgcgggaagcgggaagccggagggatcggccccgcccccggccccgacgagcgcggccgccgggcagaggtcaggaaccgggcaggccctgggaccaaccaccaaacgggagccggggccccaggaaggtgctgtcgacagcgtccagtcccccaccccgaggacaaccccgcagcccccgctgcttgttagacctcccccgcaaaagaagaaaagcagaaaagaaaaaaaaatccactttactgagtcacacccagctgtaaacatgtcaccgtgagagtcccgccccccacccccaggccgcacagtccgcgatgaaatgacaggggagcggggagggtcgccggagcgggtgccaagcaaggcagggcaggcaagtgcagcaggcgctgagtttccgggaggaagcccggaggaggtggggtggggcaggagcgggggctggggacccggccgaagaccagggggcccaggaagcctcttcccgaaggcctccccctctccagcccctccactcctgggagggcatctgctgcggccagggagcgccctgccccagaaccccggcaaaggcatatccaacccagccgtgtcttgttccctgtgagcctccgggtccggcggggtcctcaggggaacaggtgaggcccccccagctcctgagtccagccctaggtctgggcggctccttagggggcggcatggggctctttccctggggcctaggtccccccgtggccgtcccactggaatgtggcagtgaggtgggcaaggaaggcgctcgtcccctggccgcattgtccctcctgctgcccgtgggcggcccgctacacagccgtctcctggtcctcccgctggatcatctggtagtgctgccggttctccaggtaggcggccagctcggtgtcctgagccttctcagcccgctgccggggagtgtcgccctggaggagggcggagctgcgatcagcaggggccagaggcaggcctaacccctagcaggctgagaggcaggggctctacctccctgtggcctggtcagggagggaggcctctctgcccac

SEQ ID NO: 914943 - DNA, 4001 bp, Homo sapiens
ctgcccgtggctggagagctgacaaaggcaagccgttccaggacactctccctgggtcctaagccagatgctccaatggagtagtttgagttggtccctatttgggccagggaggatttatgtccccagcatcacctgcggcctctcttgtagtgcccatcttcagacttttccaggcagggaagccaagtgaggcgatgtcaggaagccactggccaggactcaaaacttaaggtttaacttggaattgtcccctcacaggcgggggggggggggggcagccccccgcgacagccccacccccttctcctttcgctgacctttggcctttgctttggtcttgggggtgcagggcttggtgacgcggatggtctcctggcactgagcattgtagcgcgccttcttcagggtgccttggcggactttggtgcctgtgcccccatcacacgcaccccagttctcaaacttgtacttgcagtcggctggcgagagagcggcccaggtcagcgctgcgcggcccgcggccccgccctccgccaagggtccgcccaggcttcggcgaggctgtgccccccgtctcctgccctctgactgcgccccgcctcacctccaaactccttcttccagttgcagggcaccctgcaccggatgcgctgggtctgggccccgcaggtgccctcgcggaaacccacgccgcaatccttgctgctgggggtgcagggcccccaggcccactcagcgcactcgctccccgggccgcccttcttcaccttatctacaacgcgcgaggaacagagttcaggactggggcacggggagactccctcgggagccgccttcctggggttccaggctaggaacccaggcggcccagcccagaagtggaggggcctcgcctgcccgtccccagccctccttcgatcatcccccatcacctttctttttggcgaccgcggaggtgagcgccagcagggcgaggagggtgaggaggaggaagcctcggtgctgcatcctgaggggagagcccgagtctgaatccctggcccgtccccttccccaccgggggccgcgtgcagggccctcccacctccgcgtgctccactttccaggccccaagtcgggctgctaaggtggcggcggtgggaagacttggggcggcccctcgccgctagcccggacgcaccgctaagaggcgactccccgggggacgcctcgagcccaggacgcagctcagacccccacccccgcctccagcccccagcccctagatcggccgcggccgggcggaccaggggccgccgcgcgctcactcgctcgctgcccgcgctgcttcgctccctcccgcgccgggcccgtcccgctccggccgccgcggccccttttgtctccagaaccggtctgagccggtcacatgggcccccgccccctctccccacccccccagggaaggacccgccccgccccctcccctcaaacccgcaccgcccccgaccccggcgtccccgcccccgctccagcccgcgccccccgcgcttctactccggcgtccgtgttcccggccccgcgtcctcgcgtctccccgccggtgccctctgcgctgcgacggcggcctctcccggccccatcttccgagcggtggtctcccgaccccgggccccgtcccgcccgcgcacaccggcccccggcccactccctgcgccgccgcccgctgcccccatcccaggtcgtcccctgccgtacgccaaggcccgggccgttctcaggcctcagcttctcttgcctgccgcggagccccggcgcctgtataacccgcgggacccgctcccctccacggccggctcagccctggcgccctgctggctgctggggagggggcgcggcccacctggggcggtttccgcgggtgggcagggaagcgctctgctgtgctggggggagtctgggacccggtcgcccagagaaagccacgggtgcggtcgcccagtgcctttccgggagcacaggcttgagggactgcgagtgggggtcctgggggaggagcccgcaggcctggatttggtgaaacttggcgctgacaggagccgtctgagaagttccagatccagccacatcggcagctgcaagtgcccaccccctctaaccctgggcctgtggcattgcctcgcccggttcccccaaaccgggagagcccccgaggcctgggggaggggcttgctcaaggccacagggcaaatgggccacagaacccgggctcgcccccgccccacccctctttcactttcattgttgttctccgcgggaagcgggaagccggagggatcggccccgcccccggccccgacgagcgcggccgccgggcagaggtcaggaaccgggcaggccctgggaccaaccaccaaacgggagccggggccccaggaaggtgctgtcgacagcgtccagtcccccaccccgaggacaaccccgcagcccccgctgcttgttagacctcccccgcaaaagaagaaaagcagaaaagaaaaaaaaatccactttactgagtcacacccagctgtaaacatgtcaccgtgagagtcccgccccccacccccaggccgcacagtccgcgatgaaatgacaggggagcggggagggtcgccggagcgggtgccaagcaaggcagggcaggcaagtgcagcaggcgctgagtttccgggaggaagcccggaggaggtggggtggggcaggagcgggggctggggacccggccgaagaccagggggcccaggaagcctcttcccgaaggcctccccctctccagcccctccactcctgggagggcatctgctgcggccagggagcgccctgccccagaaccccggcaaaggcatatccaacccagccgtgtcttgttccctgtgagcctccgggtccggcggggtcctcaggggaacaggtgaggcccccccagctcctgagtccagccctaggtctgggcggctccttagggggcggcatggggctctttccctggggcctaggtccccccgtggccgtcccactggaatgtggcagtgaggtgggcaaggaaggcgctcgtcccctggccgcattgtccctcctgctgcccgtgggcggcccgctacacagccgtctcctggtcctcccgctggatcatctggtagtgctgccggttctccaggtaggcggccagctcggtgtcctgagccttctcagcccgctgccggggagtgtcgccctggaggagggcggagctgcgatcagcaggggccagaggcaggcctaacccctagcaggctgagaggcaggggctctacctccctgtggcctggtcagggagggaggcctctctgcccaccagctcctcccctgctggctcaggtttcccagggtctggactgtgtcttcccagggacagcccccagccccagctcccgcctaggaccttgggaaaggtttggttggtgccctcgtgggctccctgcctgccgtctgctcacctgctggtctgtcttcatgagcgaggccccggcctccacgatgtagtggcagatggtgcgctggcccagggccgctgcttggtgcaaacaggtctccccgctgggggagcaggggctggctgtgtaccccatcccgtcccctgatccacccatctgtctcccaagggccatcagaaagggcaggaagttcagggctctggggcaataggggtggcccaggggatgacagatgtgaccaggaagtttatgggctctgacctgacaaaatgggaggggtggggaaaagggtggtttccggggtgaccacggttctgcactgcccagatacttacttttcctccaccgcatcaaggatctctgggggggctggagaaggggaggtggtggtcagagaggcctggcagcccctcctcctcccaccttggccccaggccctgggctccactgcccggctcaccgtggtccagcaggtagcggaccacatccttgctgccagtgctg

SEQ ID NO: 914944 - DNA, 4001 bp, Homo sapiens
cccgcgacagccccacccccttctcctttcgctgacctttggcctttgctttggtcttgggggtgcagggcttggtgacgcggatggtctcctggcactgagcattgtagcgcgccttcttcagggtgccttggcggactttggtgcctgtgcccccatcacacgcaccccagttctcaaacttgtacttgcagtcggctggcgagagagcggcccaggtcagcgctgcgcggcccgcggccccgccctccgccaagggtccgcccaggcttcggcgaggctgtgccccccgtctcctgccctctgactgcgccccgcctcacctccaaactccttcttccagttgcagggcaccctgcaccggatgcgctgggtctgggccccgcaggtgccctcgcggaaacccacgccgcaatccttgctgctgggggtgcagggcccccaggcccactcagcgcactcgctccccgggccgcccttcttcaccttatctacaacgcgcgaggaacagagttcaggactggggcacggggagactccctcgggagccgccttcctggggttccaggctaggaacccaggcggcccagcccagaagtggaggggcctcgcctgcccgtccccagccctccttcgatcatcccccatcacctttctttttggcgaccgcggaggtgagcgccagcagggcgaggagggtgaggaggaggaagcctcggtgctgcatcctgaggggagagcccgagtctgaatccctggcccgtccccttccccaccgggggccgcgtgcagggccctcccacctccgcgtgctccactttccaggccccaagtcgggctgctaaggtggcggcggtgggaagacttggggcggcccctcgccgctagcccggacgcaccgctaagaggcgactccccgggggacgcctcgagcccaggacgcagctcagacccccacccccgcctccagcccccagcccctagatcggccgcggccgggcggaccaggggccgccgcgcgctcactcgctcgctgcccgcgctgcttcgctccctcccgcgccgggcccgtcccgctccggccgccgcggccccttttgtctccagaaccggtctgagccggtcacatgggcccccgccccctctccccacccccccagggaaggacccgccccgccccctcccctcaaacccgcaccgcccccgaccccggcgtccccgcccccgctccagcccgcgccccccgcgcttctactccggcgtccgtgttcccggccccgcgtcctcgcgtctccccgccggtgccctctgcgctgcgacggcggcctctcccggccccatcttccgagcggtggtctcccgaccccgggccccgtcccgcccgcgcacaccggcccccggcccactccctgcgccgccgcccgctgcccccatcccaggtcgtcccctgccgtacgccaaggcccgggccgttctcaggcctcagcttctcttgcctgccgcggagccccggcgcctgtataacccgcgggacccgctcccctccacggccggctcagccctggcgccctgctggctgctggggagggggcgcggcccacctggggcggtttccgcgggtgggcagggaagcgctctgctgtgctggggggagtctgggacccggtcgcccagagaaagccacgggtgcggtcgcccagtgcctttccgggagcacaggcttgagggactgcgagtgggggtcctgggggaggagcccgcaggcctggatttggtgaaacttggcgctgacaggagccgtctgagaagttccagatccagccacatcggcagctgcaagtgcccaccccctctaaccctgggcctgtggcattgcctcgcccggttcccccaaaccgggagagcccccgaggcctgggggaggggcttgctcaaggccacagggcaaatgggccacagaacccgggctcgcccccgccccacccctctttcactttcattgttgttctccgcgggaagcgggaagccggagggatcggccccgcccccggccccgacgagcgcggccgccgggcagaggtcaggaaccgggcaggccctgggaccaaccaccaaacgggagccggggccccaggaaggtgctgtcgacagcgtccagtcccccaccccgaggacaaccccgcagcccccgctgcttgttagacctcccccgcaaaagaagaaaagcagaaaagaaaaaaaaatccactttactgagtcacacccagctgtaaacatgtcaccgtgagagtcccgccccccacccccaggccgcacagtccgcgatgaaatgacaggggagcggggagggtcgccggagcgggtgccaagcaaggcagggcaggcaagtgcagcaggcgctgagtttccgggaggaagcccggaggaggtggggtggggcaggagcgggggctggggacccggccgaagaccagggggcccaggaagcctcttcccgaaggcctccccctctccagcccctccactcctgggagggcatctgctgcggccagggagcgccctgccccagaaccccggcaaaggcatatccaacccagccgtgtcttgttccctgtgagcctccgggtccggcggggtcctcaggggaacaggtgaggcccccccagctcctgagtccagccctaggtctgggcggctccttagggggcggcatggggctctttccctggggcctaggtccccccgtggccgtcccactggaatgtggcagtgaggtgggcaaggaaggcgctcgtcccctggccgcattgtccctcctgctgcccgtgggcggcccgctacacagccgtctcctggtcctcccgctggatcatctggtagtgctgccggttctccaggtaggcggccagctcggtgtcctgagccttctcagcccgctgccggggagtgtcgccctggaggagggcggagctgcgatcagcaggggccagaggcaggcctaacccctagcaggctgagaggcaggggctctacctccctgtggcctggtcagggagggaggcctctctgcccaccagctcctcccctgctggctcaggtttcccagggtctggactgtgtcttcccagggacagcccccagccccagctcccgcctaggaccttgggaaaggtttggttggtgccctcgtgggctccctgcctgccgtctgctcacctgctggtctgtcttcatgagcgaggccccggcctccacgatgtagtggcagatggtgcgctggcccagggccgctgcttggtgcaaacaggtctccccgctgggggagcaggggctggctgtgtaccccatcccgtcccctgatccacccatctgtctcccaagggccatcagaaagggcaggaagttcagggctctggggcaataggggtggcccaggggatgacagatgtgaccaggaagtttatgggctctgacctgacaaaatgggaggggtggggaaaagggtggtttccggggtgaccacggttctgcactgcccagatacttacttttcctccaccgcatcaaggatctctgggggggctggagaaggggaggtggtggtcagagaggcctggcagcccctcctcctcccaccttggccccaggccctgggctccactgcccggctcaccgtggtccagcaggtagcggaccacatccttgctgccagtgctgactgcgtggtgcaggagcgtgcgactctgctcgtctcggtgcatgaggtcgcccccagctcggtgcagctcctggagctgagggcaggaggcatggcagggctggacctcctggggccacccctccttccctgagctcacacgctggcccacagccgggtacaccagcacaggcctgaaacgagtgcgctcacacatcttactcctgagttgcctctgtgggtctctctggagcacaccggaggaggggcctctcaccccacagcctgtgggctctctggcagc

SEQ ID NO: 914945 - DNA, 4001 bp, Homo sapiens
gggtggggctggggagtgagagggacaaggcagggcatgattgattaaagctaacgagcagacagaaggcactggtgggtcacatctcgggcctgggagagggagggcgtgggccaggccccatgtgacaccaggggctccttggcatccaggcttggcgtctagtcctttcccttccctttcttggctgtaaaacaagaaagaaatattaataccatatcagcagttaggctgacccattgcagaccgccggctccacaaacacccgggcatcagggaaggagaagattctgccccctagtggtttccaatcagctgactcggaagcaggggatggggcagccattgtgatgtggacatgggacatccccagcttcctatttccacttgggatcagaaaaccttcaagtttccagtcctagtcctggtcacagcagccctgggcatcctcagcctcctcacctgagaagcgggcagattcacccctgccctgctggcctcgctgggctgagtcacgagtgagctgagaggcccagggtgggccttgacctcctcccaacactagaaagggcagagctgaccaaatgctgcccgtggctggagagctgacaaaggcaagccgttccaggacactctccctgggtcctaagccagatgctccaatggagtagtttgagttggtccctatttgggccagggaggatttatgtccccagcatcacctgcggcctctcttgtagtgcccatcttcagacttttccaggcagggaagccaagtgaggcgatgtcaggaagccactggccaggactcaaaacttaaggtttaacttggaattgtcccctcacaggcgggggggggggggggcagccccccgcgacagccccacccccttctcctttcgctgacctttggcctttgctttggtcttgggggtgcagggcttggtgacgcggatggtctcctggcactgagcattgtagcgcgccttcttcagggtgccttggcggactttggtgcctgtgcccccatcacacgcaccccagttctcaaacttgtacttgcagtcggctggcgagagagcggcccaggtcagcgctgcgcggcccgcggccccgccctccgccaagggtccgcccaggcttcggcgaggctgtgccccccgtctcctgccctctgactgcgccccgcctcacctccaaactccttcttccagttgcagggcaccctgcaccggatgcgctgggtctgggccccgcaggtgccctcgcggaaacccacgccgcaatccttgctgctgggggtgcagggcccccaggcccactcagcgcactcgctccccgggccgcccttcttcaccttatctacaacgcgcgaggaacagagttcaggactggggcacggggagactccctcgggagccgccttcctggggttccaggctaggaacccaggcggcccagcccagaagtggaggggcctcgcctgcccgtccccagccctccttcgatcatcccccatcacctttctttttggcgaccgcggaggtgagcgccagcagggcgaggagggtgaggaggaggaagcctcggtgctgcatcctgaggggagagcccgagtctgaatccctggcccgtccccttccccaccgggggccgcgtgcagggccctcccacctccgcgtgctccactttccaggccccaagtcgggctgctaaggtggcggcggtgggaagacttggggcggcccctcgccgctagcccggacgcaccgctaagaggcgactccccgggggacgcctcgagcccaggacgcagctcagacccccacccccgcctccagcccccagcccctagatcggccgcggccgggcggaccaggggccgccgcgcgctcactcgctcgctgcccgcgctgcttcgctccctcccgcgccgggcccgtcccgctccggccgccgcggccccttttgtctccagaaccggtctgagccggtcacatgggcccccgccccctctccccacccccccagggaaggacccgccccgccccctcccctcaaacccgcaccgcccccgaccccggcgtccccgcccccgctccagcccgcgccccccgcgcttctactccggcgtccgtgttcccggccccgcgtcctcgcgtctccccgccggtgccctctgcgctgcgacggcggcctctcccggccccatcttccgagcggtggtctcccgaccccgggccccgtcccgcccgcgcacaccggcccccggcccactccctgcgccgccgcccgctgcccccatcccaggtcgtcccctgccgtacgccaaggcccgggccgttctcaggcctcagcttctcttgcctgccgcggagccccggcgcctgtataacccgcgggacccgctcccctccacggccggctcagccctggcgccctgctggctgctggggagggggcgcggcccacctggggcggtttccgcgggtgggcagggaagcgctctgctgtgctggggggagtctgggacccggtcgcccagagaaagccacgggtgcggtcgcccagtgcctttccgggagcacaggcttgagggactgcgagtgggggtcctgggggaggagcccgcaggcctggatttggtgaaacttggcgctgacaggagccgtctgagaagttccagatccagccacatcggcagctgcaagtgcccaccccctctaaccctgggcctgtggcattgcctcgcccggttcccccaaaccgggagagcccccgaggcctgggggaggggcttgctcaaggccacagggcaaatgggccacagaacccgggctcgcccccgccccacccctctttcactttcattgttgttctccgcgggaagcgggaagccggagggatcggccccgcccccggccccgacgagcgcggccgccgggcagaggtcaggaaccgggcaggccctgggaccaaccaccaaacgggagccggggccccaggaaggtgctgtcgacagcgtccagtcccccaccccgaggacaaccccgcagcccccgctgcttgttagacctcccccgcaaaagaagaaaagcagaaaagaaaaaaaaatccactttactgagtcacacccagctgtaaacatgtcaccgtgagagtcccgccccccacccccaggccgcacagtccgcgatgaaatgacaggggagcggggagggtcgccggagcgggtgccaagcaaggcagggcaggcaagtgcagcaggcgctgagtttccgggaggaagcccggaggaggtggggtggggcaggagcgggggctggggacccggccgaagaccagggggcccaggaagcctcttcccgaaggcctccccctctccagcccctccactcctgggagggcatctgctgcggccagggagcgccctgccccagaaccccggcaaaggcatatccaacccagccgtgtcttgttccctgtgagcctccgggtccggcggggtcctcaggggaacaggtgaggcccccccagctcctgagtccagccctaggtctgggcggctccttagggggcggcatggggctctttccctggggcctaggtccccccgtggccgtcccactggaatgtggcagtgaggtgggcaaggaaggcgctcgtcccctggccgcattgtccctcctgctgcccgtgggcggcccgctacacagccgtctcctggtcctcccgctggatcatctggtagtgctgccggttctccaggtaggcggccagctcggtgtcctgagccttctcagcccgctgccggggagtgtcgccctggaggagggcggagctgcgatcagcaggggccagaggcaggcctaacccctagcaggctgagaggcaggggctctacctccctgtggcctggtcagggagggaggcctctctgcccaccagctcctcccctgctggctcaggtttcccagggtctggactgtgtcttcccaggg

SEQ ID NO: 914946 - DNA, 4001 bp, Homo sapiens
ttttctcttccccaagagctaccagaataaaagtatctttctattcctggatgatgtggtgtgagaacaggagatggaggactgtggcaataacgaagtgagagacttcactgaatagagcttgaggatgaaactgaccttgcagagaggcagagtagagagccagagagaatctgcatcttgagcaatgccatctgggcttgtggttcaagccgtgcctgcaacccttcctctagattctttagataaaggagcctttgtgtgcttaagccagtttgtattttctaacgcttactagcaaagtaattcaaggtgataacaaacaccttgaacactttggaaagtggtagcgtccaaacaatttaaggtttcttttggaaagagcaggactccaatgtgatagaggttgattttgatttttttttccttagccgcttctattagttctgtaggaaacagtcacaatacttcacattatatagttgttcctacttctcaaaaacatcttttccatacagactgcctcacctgaatttcacaatccagagtcagagcaattatgaaaaaaaaatttattttgcagtaattgttattcagcactttatacagtttaaaatatgatttcaagttcagtgattcattttattgtcacaataaccaaatgagatagaaatggtgggtctatcataatatctattttaggctggagaaagttgggcctcagataagttaaatgagatatgtgagttaatttgaggaggtagggggagacaggactaaatctgtccttgcttctatttctctcacccaatcctctgaaccaaagatactaaactctattcccaaaaacaaatacaaaagagctagcggtgggttgaactcgaccaaagcattggagatctggattccagtggcagagccagaactaactagctggtgaccttgggcaagtttcctttgtcttgttttttgtaaaagaagaggtttaaactaggatctctaatgctcctgcaagctcgaaaatttctataagtctagacttttccatccttgctctcaaattaatctttttctcagaataataatcataaccttatttattctcccactgggtaccaggcactgttctaacgtacccccattttctacccgcattttctctttagatctcacgacattcctaagacaattatatctcttttacagataaggaaacctaggctcatgtaggttaaatgaactgcccaagaccaataaaattagtaagcatcaaggggagagctgaccgcaggtcagactgaccgcgaggatctaaacctggtctgtgttgttactgcagaagaaattaggctccctgcattactggtcgcctctctccacgcataaaagggagaggagggacaagaaagccaaaccaagtcacaacaagcccctgcaaggcaaaaacagaaaaaccgctggaagggcgcccgggaggatcctttctgggtccagggggcggggcgcaattttccggcagccacgggatcgcaacgcgggccgtcctgccctctggcccattaccttgttgagatgagggttcctggtgacatcgtatccgcgcttcttcaggggcacagggcgcgccgggccaggcttggagtggcagccttgggcgggcgcggtgggtgtccagcgcgggagggcgccgcaggcccggcccggccagggagccagccgcgtgcctgtccccagcgcggcacccatggtccttggcagacctggcacgggagagaaagcaaggtcagggcctccttccagccagccaggacccacgcgcgctgcggggcaccgggcctgatccggggacgcgccctctgggagagggcaggtgctcccaaagggttaaatgttccagcccccgccactcctcggctgccacctgctcggctccgcgcggggcgccaggcctagccaagagccaggcaaagcgaaaccaagccctggaagcagatccggtgcgggtgacagccggcgccacccctgcccccatccctgtgaaaaagaggcgactgcgcggcgaggggtccccgtacccctaatcccgcgtggtggcttgcctcggtcctctccttccctggcccacctgcgctgctcggggagctgaggtctacgcggtcccgctgcggagcaggcggggtgaggagctgcggtctgtgagtcctctcccgccaatgggtggaccgcgctggcggccgcgagctcgcggagctggtgagttcctcaaagagcggtcccacaacctttgttctcagtgcctggcttcccctgaggacgcgcgtggggcgcctcagcactgcgtgcacgtggttttccccagtgacaagaagcagctcagaatgcccgcctgagactctccatcttggcaagactaaatgcacagagggggatttgcgtttgggggtcagcatatcctcgcactctcccaacattcggggaagggcgtgccttcaggatttggagtagaaatcctcaggcattcggtgctcagtgttgccttgtgctgtccaatataatagccattcgccacgtgtggctatataaacgtaaataaattagtctatatagaataaaatttaacatccagttctgcagtcacgctagccacatttccagttcaagagccacttgtatgcagatacagaacatttctgtttttgcggatacttctattaagcatcattgacataggagccacagttactaagaggacttctgaggaccccatggagtttgccatgggttattggggccagacagggatcttggggtccatctagccccaaacttaattttatactttctccacacagtagtcaggagattccttttaaagcaaacactttgttgtgtgtggaataaaatccaaactttcagggcctacaagatttcccataaactggctcttgccagcctcttcagacttatcctactctactctttccttctcactgatctctggccatacttgatccttcctgtgtcttcaccccacttggttccctcccactgcagggcctttgcacttgctattgcctctccttggaaggctcatactccagccttgcaaaccactacttcattcccacctctcagttctccactaagttgtcaactcgaaggcctttcctctatcccattcaatgtcagcctgcactaggaactatagagtgaaggggtttttctctttagagaacttaacacagtcagtagcgcgcttgtttttctgattgtttactgactatctcctgtctagaatgtaagcttcatgaagagaggctctttgcctgtgaacctgtgtgtcctcactgcctagctcactgcctggtatgtagttgcacaataaatagttgttaggtgaagggaagtggcagccactttcataaggatcgtgaacccttagacttactgacagacagttggcacggtcctctgctgacaccccttcaaagctcccggtgccagcattagccccgttgtaagtaccaagcagacatcatggcccataatgtgctaaggggtgctcctgcctgagttcaggattccctcatcccttcaggaataatcgtctcctcctgcagtctctctcctccctgtgtaatatctaattttcaacttgaatgatctacgtaaaatagttatttccaaaacagaattacaattacctggtaggaaataaggatggggcaaaaatacagctttccaggccccatccatgaagattctcatccagtagggtttacatccctgaagtcaggtttactcttggactgcatatttacataagcttataaatgatctttttttctgccttaaaccagtttgtgtcagatgtgtgattgtgtgcaaccaatagtattaactaaatcctttcaacactatttttatattggcacttcttcccaccagtcaacatctttggggggcagagatcatgtgtgtttccatctttggtatctagt

SEQ ID NO: 914947 - DNA, 4001 bp, Homo sapiens
tattagttctgtaggaaacagtcacaatacttcacattatatagttgttcctacttctcaaaaacatcttttccatacagactgcctcacctgaatttcacaatccagagtcagagcaattatgaaaaaaaaatttattttgcagtaattgttattcagcactttatacagtttaaaatatgatttcaagttcagtgattcattttattgtcacaataaccaaatgagatagaaatggtgggtctatcataatatctattttaggctggagaaagttgggcctcagataagttaaatgagatatgtgagttaatttgaggaggtagggggagacaggactaaatctgtccttgcttctatttctctcacccaatcctctgaaccaaagatactaaactctattcccaaaaacaaatacaaaagagctagcggtgggttgaactcgaccaaagcattggagatctggattccagtggcagagccagaactaactagctggtgaccttgggcaagtttcctttgtcttgttttttgtaaaagaagaggtttaaactaggatctctaatgctcctgcaagctcgaaaatttctataagtctagacttttccatccttgctctcaaattaatctttttctcagaataataatcataaccttatttattctcccactgggtaccaggcactgttctaacgtacccccattttctacccgcattttctctttagatctcacgacattcctaagacaattatatctcttttacagataaggaaacctaggctcatgtaggttaaatgaactgcccaagaccaataaaattagtaagcatcaaggggagagctgaccgcaggtcagactgaccgcgaggatctaaacctggtctgtgttgttactgcagaagaaattaggctccctgcattactggtcgcctctctccacgcataaaagggagaggagggacaagaaagccaaaccaagtcacaacaagcccctgcaaggcaaaaacagaaaaaccgctggaagggcgcccgggaggatcctttctgggtccagggggcggggcgcaattttccggcagccacgggatcgcaacgcgggccgtcctgccctctggcccattaccttgttgagatgagggttcctggtgacatcgtatccgcgcttcttcaggggcacagggcgcgccgggccaggcttggagtggcagccttgggcgggcgcggtgggtgtccagcgcgggagggcgccgcaggcccggcccggccagggagccagccgcgtgcctgtccccagcgcggcacccatggtccttggcagacctggcacgggagagaaagcaaggtcagggcctccttccagccagccaggacccacgcgcgctgcggggcaccgggcctgatccggggacgcgccctctgggagagggcaggtgctcccaaagggttaaatgttccagcccccgccactcctcggctgccacctgctcggctccgcgcggggcgccaggcctagccaagagccaggcaaagcgaaaccaagccctggaagcagatccggtgcgggtgacagccggcgccacccctgcccccatccctgtgaaaaagaggcgactgcgcggcgaggggtccccgtacccctaatcccgcgtggtggcttgcctcggtcctctccttccctggcccacctgcgctgctcggggagctgaggtctacgcggtcccgctgcggagcaggcggggtgaggagctgcggtctgtgagtcctctcccgccaatgggtggaccgcgctggcggccgcgagctcgcggagctggtgagttcctcaaagagcggtcccacaacctttgttctcagtgcctggcttcccctgaggacgcgcgtggggcgcctcagcactgcgtgcacgtggttttccccagtgacaagaagcagctcagaatgcccgcctgagactctccatcttggcaagactaaatgcacagagggggatttgcgtttgggggtcagcatatcctcgcactctcccaacattcggggaagggcgtgccttcaggatttggagtagaaatcctcaggcattcggtgctcagtgttgccttgtgctgtccaatataatagccattcgccacgtgtggctatataaacgtaaataaattagtctatatagaataaaatttaacatccagttctgcagtcacgctagccacatttccagttcaagagccacttgtatgcagatacagaacatttctgtttttgcggatacttctattaagcatcattgacataggagccacagttactaagaggacttctgaggaccccatggagtttgccatgggttattggggccagacagggatcttggggtccatctagccccaaacttaattttatactttctccacacagtagtcaggagattccttttaaagcaaacactttgttgtgtgtggaataaaatccaaactttcagggcctacaagatttcccataaactggctcttgccagcctcttcagacttatcctactctactctttccttctcactgatctctggccatacttgatccttcctgtgtcttcaccccacttggttccctcccactgcagggcctttgcacttgctattgcctctccttggaaggctcatactccagccttgcaaaccactacttcattcccacctctcagttctccactaagttgtcaactcgaaggcctttcctctatcccattcaatgtcagcctgcactaggaactatagagtgaaggggtttttctctttagagaacttaacacagtcagtagcgcgcttgtttttctgattgtttactgactatctcctgtctagaatgtaagcttcatgaagagaggctctttgcctgtgaacctgtgtgtcctcactgcctagctcactgcctggtatgtagttgcacaataaatagttgttaggtgaagggaagtggcagccactttcataaggatcgtgaacccttagacttactgacagacagttggcacggtcctctgctgacaccccttcaaagctcccggtgccagcattagccccgttgtaagtaccaagcagacatcatggcccataatgtgctaaggggtgctcctgcctgagttcaggattccctcatcccttcaggaataatcgtctcctcctgcagtctctctcctccctgtgtaatatctaattttcaacttgaatgatctacgtaaaatagttatttccaaaacagaattacaattacctggtaggaaataaggatggggcaaaaatacagctttccaggccccatccatgaagattctcatccagtagggtttacatccctgaagtcaggtttactcttggactgcatatttacataagcttataaatgatctttttttctgccttaaaccagtttgtgtcagatgtgtgattgtgtgcaaccaatagtattaactaaatcctttcaacactatttttatattggcacttcttcccaccagtcaacatctttggggggcagagatcatgtgtgtttccatctttggtatctagtgcatgcaaatatttggaaattgattgttgaaccagtttgcccttgctgaatacaatgacctttccctcccctggaggatatctaataggtaactttagtcatttgaaaccaggatgtaaacaacaaaggtttccaaacaagcgaacataatttttatagcatcaattcactaaagcttgtacagtttacatataaaagtctcttacatgtcctcacctgtggcctatattctcttaacccaggcataattctacaatgttgttttgtgtgtgtgtttgttctttggtgacaggaaagaaaaggttaaaggcaggtccaccaggagcagtgacagaaggcagtagcaagaggaggtggtggcttctcagttccatacagttgtccagggacccaggttttctcttttgctgccaggctcttctgtagctgttgcccgcc

SEQ ID NO: 914948 - DNA, 4001 bp, Homo sapiens
atgccatctgggcttgtggttcaagccgtgcctgcaacccttcctctagattctttagataaaggagcctttgtgtgcttaagccagtttgtattttctaacgcttactagcaaagtaattcaaggtgataacaaacaccttgaacactttggaaagtggtagcgtccaaacaatttaaggtttcttttggaaagagcaggactccaatgtgatagaggttgattttgatttttttttccttagccgcttctattagttctgtaggaaacagtcacaatacttcacattatatagttgttcctacttctcaaaaacatcttttccatacagactgcctcacctgaatttcacaatccagagtcagagcaattatgaaaaaaaaatttattttgcagtaattgttattcagcactttatacagtttaaaatatgatttcaagttcagtgattcattttattgtcacaataaccaaatgagatagaaatggtgggtctatcataatatctattttaggctggagaaagttgggcctcagataagttaaatgagatatgtgagttaatttgaggaggtagggggagacaggactaaatctgtccttgcttctatttctctcacccaatcctctgaaccaaagatactaaactctattcccaaaaacaaatacaaaagagctagcggtgggttgaactcgaccaaagcattggagatctggattccagtggcagagccagaactaactagctggtgaccttgggcaagtttcctttgtcttgttttttgtaaaagaagaggtttaaactaggatctctaatgctcctgcaagctcgaaaatttctataagtctagacttttccatccttgctctcaaattaatctttttctcagaataataatcataaccttatttattctcccactgggtaccaggcactgttctaacgtacccccattttctacccgcattttctctttagatctcacgacattcctaagacaattatatctcttttacagataaggaaacctaggctcatgtaggttaaatgaactgcccaagaccaataaaattagtaagcatcaaggggagagctgaccgcaggtcagactgaccgcgaggatctaaacctggtctgtgttgttactgcagaagaaattaggctccctgcattactggtcgcctctctccacgcataaaagggagaggagggacaagaaagccaaaccaagtcacaacaagcccctgcaaggcaaaaacagaaaaaccgctggaagggcgcccgggaggatcctttctgggtccagggggcggggcgcaattttccggcagccacgggatcgcaacgcgggccgtcctgccctctggcccattaccttgttgagatgagggttcctggtgacatcgtatccgcgcttcttcaggggcacagggcgcgccgggccaggcttggagtggcagccttgggcgggcgcggtgggtgtccagcgcgggagggcgccgcaggcccggcccggccagggagccagccgcgtgcctgtccccagcgcggcacccatggtccttggcagacctggcacgggagagaaagcaaggtcagggcctccttccagccagccaggacccacgcgcgctgcggggcaccgggcctgatccggggacgcgccctctgggagagggcaggtgctcccaaagggttaaatgttccagcccccgccactcctcggctgccacctgctcggctccgcgcggggcgccaggcctagccaagagccaggcaaagcgaaaccaagccctggaagcagatccggtgcgggtgacagccggcgccacccctgcccccatccctgtgaaaaagaggcgactgcgcggcgaggggtccccgtacccctaatcccgcgtggtggcttgcctcggtcctctccttccctggcccacctgcgctgctcggggagctgaggtctacgcggtcccgctgcggagcaggcggggtgaggagctgcggtctgtgagtcctctcccgccaatgggtggaccgcgctggcggccgcgagctcgcggagctggtgagttcctcaaagagcggtcccacaacctttgttctcagtgcctggcttcccctgaggacgcgcgtggggcgcctcagcactgcgtgcacgtggttttccccagtgacaagaagcagctcagaatgcccgcctgagactctccatcttggcaagactaaatgcacagagggggatttgcgtttgggggtcagcatatcctcgcactctcccaacattcggggaagggcgtgccttcaggatttggagtagaaatcctcaggcattcggtgctcagtgttgccttgtgctgtccaatataatagccattcgccacgtgtggctatataaacgtaaataaattagtctatatagaataaaatttaacatccagttctgcagtcacgctagccacatttccagttcaagagccacttgtatgcagatacagaacatttctgtttttgcggatacttctattaagcatcattgacataggagccacagttactaagaggacttctgaggaccccatggagtttgccatgggttattggggccagacagggatcttggggtccatctagccccaaacttaattttatactttctccacacagtagtcaggagattccttttaaagcaaacactttgttgtgtgtggaataaaatccaaactttcagggcctacaagatttcccataaactggctcttgccagcctcttcagacttatcctactctactctttccttctcactgatctctggccatacttgatccttcctgtgtcttcaccccacttggttccctcccactgcagggcctttgcacttgctattgcctctccttggaaggctcatactccagccttgcaaaccactacttcattcccacctctcagttctccactaagttgtcaactcgaaggcctttcctctatcccattcaatgtcagcctgcactaggaactatagagtgaaggggtttttctctttagagaacttaacacagtcagtagcgcgcttgtttttctgattgtttactgactatctcctgtctagaatgtaagcttcatgaagagaggctctttgcctgtgaacctgtgtgtcctcactgcctagctcactgcctggtatgtagttgcacaataaatagttgttaggtgaagggaagtggcagccactttcataaggatcgtgaacccttagacttactgacagacagttggcacggtcctctgctgacaccccttcaaagctcccggtgccagcattagccccgttgtaagtaccaagcagacatcatggcccataatgtgctaaggggtgctcctgcctgagttcaggattccctcatcccttcaggaataatcgtctcctcctgcagtctctctcctccctgtgtaatatctaattttcaacttgaatgatctacgtaaaatagttatttccaaaacagaattacaattacctggtaggaaataaggatggggcaaaaatacagctttccaggccccatccatgaagattctcatccagtagggtttacatccctgaagtcaggtttactcttggactgcatatttacataagcttataaatgatctttttttctgccttaaaccagtttgtgtcagatgtgtgattgtgtgcaaccaatagtattaactaaatcctttcaacactatttttatattggcacttcttcccaccagtcaacatctttggggggcagagatcatgtgtgtttccatctttggtatctagtgcatgcaaatatttggaaattgattgttgaaccagtttgcccttgctgaatacaatgacctttccctcccctggaggatatctaataggtaactttagtcatttgaaaccaggatgtaaacaacaaaggtttccaaacaagcgaacataatttttatagcatcaattcactaaagcttgtacagttt

SEQ ID NO: 914949 - DNA, 4001 bp, Homo sapiens
ccttcagatacctttggcctatttttccaaagtgtcattattttcttttcagtctgaagggactttttgaatagagaagatatcaactaaatttgtgttatatgtgtagaacttctcccagtctgtcatttatctttttactttgcttatggcatcttttcccattatttttaaattttatgtaagtaatatatctatactttgtaaggtaggtaggtgtgtggttgtgtgtgtggatgttagagtcttgttctgttacccaggctggagtgcggtggcacaatcatagctcactgcagccttgatctcactggctgaatccatcctcctccctcagcctccccagtagctgggaccacagacgtgcaccaccacgcccagctaatttttttaatttgtagaggcaggagctccctatgttgctcaggctggtcttgaagtctgggctcaagtgatccttccaccttggcctccaaaaatgttggaactacaggtgtgagccaccatgcctgtcctgttatttccgaaattaagaagatctatccgactcccagaataatacaactattctttcattatttcttctaacactttgttttactttcttcatttggcacttcaatcctcaaaaattactgtggaaataatttttgtgtgaggtataaagtagtatttacctttttttgcaaatagacccctaataatcctaacagcactgccctgaaatgacatctttaaattcccatttacactgggtgtgctgcataactaaattaagaattttgatttttttttcaaaaatccttgacaataatgagaatctgaaacccactcattatttcttcacttccctcctagtctcctcccttccagttttgctttccctataattcatttattagaaagcatctagagtaaactttaacaaaaccatctctacttatcctgcaaaagctttcagtggtcttaacactagtcaaacgcttatcccggcctactgggttctacatgatctggacccgcctacctcttggacctcgtcacacatttcagtcaaaacagacctcttttctgcaggtgctactatcatcattcacaccgcacaaggatgcaaagtaactcgcccaaggtcacacagccggcaaggggcagagccccgatctagggctcttttagccactaagtgtgctacattaaaggccctctacagagaagcattcatttaaacatttcacggtttgacagtgtctctaaacgctgccattcaaggagacccgcaggagtattacgtaaagtcgtgtcctaccttgtccggcagcaacaaaaagatgacgaccaagtatccttacgcttccgctagagggacactcaaaagttctcgcacgcacaagatcacccccatcgcgggagaggcggaggcccgcgcgggtgctgggacccagaccgggggactcgggcagcggatgcaggccttaccttcctcgtcgtcctggtctgcgctggacccggcgcccggccactcctgcgcgtcgccctcggtccccgccgcctcctcctcctcggagcccgaaccctggctgaagtctatccgctgggccagacgcgccagattctgcgacatggacagcgggggcaggtacgtctcggtgccatccaggcccacctcatggacctgcttctcgcaggccgattcgatgctgatccgcactgcgcgcaccccggacatgctggctgcgtcggccagcggtgggaggaccccccacgagccaaaaaacgaggtacgaagaggaggcttccctgcggagagccgggaactcagaagcccgcagccgcggtgcctcagaagaccctcgggaaaccgaacgcaacgctcagactggaaacaaaggagctggcccagcaactttcccagaacgcaccgcaagctccctcctcggtaagtctttcggagcaaaactgggcaggcgcggaagctccagggttccctagagcgcttccggtgaatcacggtgcagggtggggtaaacttccgggcctataagaggcgtggccggcagagggagggaaagagcggtttgggagccgagagtgtggcgggtatattccttgctttttaagcctgcgtttgtttaaaaagtggatgaggaaagaaagctgcagaggctagaagagttaaggaaaaggaaattaatggatccttggatcttagcaatgagagtcctgttgagagaactgagatctggtggcgcgcgcctgtggtccagctacgcgggtggctgaggcgggagaatggcttgagccctggagatggaggctgcagtgagccgagatctcaccgctgcattccagcctaagcaacagagtgggatcctgcctcaaaacaaaagttattttaaattagcaagaaattttttaaagaaacactatctgaagagttagaaattaagggcatggcttgggggaaacaatcgtgcttatcaccacttaaaattatactacgtaattatttggtttcctgttagttataactctatgacagccaatatctgcagcagacataatagactctggcatgtagtaagtgcttaatatttattttatgcccgagtaacagaataaataatgttgatctcgcttttttattagtgatggggtcccactatgttgcccaggctgagtgcagaggttattcacaagtgctgtcagcacgctacagcctggagctcctgggctccaacgatgctcctgccttagcctcctgaggagctgggactataggagcgtgtcaccatgcctggcctgcaaataatatttaaaagattaagaagaagtggtataacttcagtctttgggtctccaagaacgtatttcattagtaggaattccacagacaaagatggattattttatattacaaacctctatatttcgtttaaggaattatatataccgtttatcatgagtgtttgccaggttttgttctgaccaagatatatctaggttttgaactactttcctaaggtatttaggaaaatacggttgccctggtgtcagtccctgctgaagaagaaagtagatggccgtgtgtggagggggttgaattttcatgagagaaacctatttctggcaagctgtacagtctgtcgcccaatcatgttcgagaaccactgtacttgcttttcgtgtaaatttgtttaaaaattttttttaactttattttaaaatctgattaatagccaggcgcagtggcagtctaatagtgcagacaaaaacaagacaacaacaaatgattatgattcctagaataagcaaagcttttgccaccaagtcttcaagatcaaaactagctgcttagccagttgtttaaagatgtgttggatctgaaaggttagttgttaaggttttcatattatccattaacgtagtgatattatctgattcatctgggatacagacataacacacagtttttatgataatgcaagttcctccctgggcttcggtgagtatgtcaaaagccatacggttttgtaataatggccttttccataagaataactattgtttaataatggaatacttatgtagctatcttttgggtataattggttaggacctctatatgccaaataacatcttcaacactcagttgtggtatgaagatggaagctaagtgatcataccaatgaaacacaggatgaacccaatgagatcataaataaggaaaatttgcaggttttggcaaagtacaaactactcaaatatatgattaagcataacctgaaaaacatcatcctaactatcctggaagtaaccatggtcataggttagtgccacatagccaaaatgttccatttggagctaatcaataaatacattaaatggcatgccagtcagtactttgtaatataatggtgtgaatacacagttctttgggtatccatgccatatctccagtgcttttgggccagatatctttggtatgatttctttgttcccaa

SEQ ID NO: 914950 - DNA, 4001 bp, Homo sapiens
aaaattttaagttagccaactgtggtggtgcatgcctgtagtcctagctacttggaaggctgaggtgggacgacagcatgagcctaggaactggaggttacagtgagctatgattataccactgcagtccagcctgggtgacacagtgagaccttgtgtctataaaaaaattttttaaatggcttccttttgtatttacaatctaaatgcctttactgctttataaaagcctctgcctaactctcccagcttcatctctctccctaacactctttccttttgttcacttcactggagtccaactgattttctgtccctcagatattctaagctttttctcacatcagggtttctgacctcatttcttgtatctacaattgtctctccctcctgtccatacatggctggccctttgtctatgcttacattttagttcaaatgttagctatgtgaagagagcatctctggccactctagctaaagtagttctgcccctcaattttttttttttaagagacagggtctcatctgttgcccaggctggagtgcagtggcacaatcttggttcactgcagcctcgacctcctgtgttcaagcgattctcctcccttagcctcctgagtagctggggctacaggcatgcattaccacgcccggttaatcttgtatattttgtagagactgggtctcgccatgttgcccatgctggtctcaaactcctgggctcaagggattctgcctcggcctcccaaagcgctgggattacaggcgtgagcaacgcgcctggccaccttcaatttttatcatgttttcttttcctagcattaaccactttctgacattatcttgtttacaatgcctcctccactgaaatgtacatcccaaaaaaggcaagcatcttgtcagtcttgttcacaactgtctccagcatttagaaaagtgcttggtacataggtactcaacaaaataattttttgaatgaagagtttggttcgattcttatcccttttttgatcagaccaggaaatgccggaaccttagaaggaagaatggcaacttgccccaaaccaatagcaagtctgtgggagacctgtaactaaaactttgggtccccaaagatattaaatcaggcctctcgagttccaaactcaaaccctggattttgtttgttttgagacggagtctcgttcgcccaggctggagtgcagtggagcaatgtcggctctctgcaacctccgcctcccggggttcaaacgattctcccgcctcagcctcccgagtagctggaattaaaggtatacgccaccacgcccaggtaatttttgtgttttttgtggagacagggtttcatcatgttggccaggccggtctcgaactcctgaccttaggtgattcgcccgcctccgcctcccagagtgttgggattacaggcgtgagccaccgcgcccagccctaggtcattttttagagagacataaaccagtgtcagggacacagcctggacatggtgcaaaagacagtaacggagatgcactacgcccctgcccgccattcatccctttggttgaattcaactcatcctggttgaattcaagtcatccctctgcttgtgaatcctaacagcgcttccgacttagggctccacagtccgggtatgcgttgcctaggttacctcgcacctccgctagccggctgagagccacgcccatcacctcctctctaagatttgattggctggctttggcaaggccgagtactcacctggcagttccctcatgaggtaaaaagggccacagccagctcctgacttgtccgcgccaggaggagccgtggccgcggtgggaggcggggccgtgccgggtcccccgcccgcaggaggcggtggcgggggtggaggctttcctggtccgaagccgagtgcggttgggggcggtggtgggtcagcctgagccccaaacagtgccgtgaaattctccatcgtaccctccgccccggcgctgtctccgtgtctgccgttggtaattttcattggacaatgctttcaaggagtacccccccgccctttctcaaggagccgcttgtcattggatgcctcaggcaccgcctaccttttttcaacaactacttccgtcgccttatgagaacgttcaggaagtgctatttaaccttattagagtcttctgctagctctgcttgctacagtccaataaaatgacttaggcggataaagcgacaactagactaaccaataaaatattaagttcttttttgggttctgacctaccacagcgttcagagaactacatccgggtttagaggccgtacgtttgcgatatagcccaatagcagtcgttatggtgggggaggcggggcgagacctacgacgccggcgagcagtggccgttacggccgaaaagatggcggtcttggcacctctaattgctctcgtgtattcggtgccgcgactttcacgatggctcgcccaaccttactaccttctgtcggccctgctctctgctgccttcctactcgtgaggaaactgccgccgctctgccacggtctgcccacccaacgcgaagacggtaacccgtgtgactttgactgggtgagcctcccgcgtgttagtaccccgcgaccttgactgtccctgcccttgcaggtgtatctgggaaccctggggtttacctctctgaggacacctgaggttccgagcctgtagcggacttagagactattaagtgcagggtccgaaccatcatcgagtctaaactttgtgtttaagatgggaaaacggaacatgttagtcgtagcccatgcacaacggcccaacagcttttgactgttgagtccaggtttctttctgtttcaccattgagactaattaacagccctatcaaaactgtacatacacgtgtataacgttttacagtgccgctcattatgtaaagcctcctgaggagccagtaaggtagacaaggcaagtagtaatattcctgtttcattggtgaagaaatggatctcggtatatttaggtgacttgccccaggtcatacaactaatgagtgcctgggacttgaaactactcttctggccacactacctgcacaacactgtcagccgcttcttaattcaataaacatttctagagtgtacactctaggcactctgcttgatcctgaagatgcgaaagtggataaaatttgggggctactgtaaaggaattgtaaaaaatacgttgtaaagaaatctttgggatttctttgggaagtgtcccaagctccttgctgtgcttccttggtatgggtggagggactgctcggaacataaacttaaagcactttcccttctgccatatagcatgtaggggccaaggaaaagcttcccctttgctctctgagggtttgttgaaaaatcaaccgacaaagggcacattaataggagaaaggcatagaaattttattttaacgtgcatagcatgagggaattgcaggagaatgacccagtggggtacagatgcttatataccctctttcataggaatatgggagatgggaaaatgtgggtgattttaaggtggatcgtaaatgatttttagggtgattcagtggcctggagaacatacagtggcctgggacaatgactgttgggcctgcagagcagacaatggtttctgacaaaaatctgtccaggtgtgttgacaggcttccatctttcttcttgtactgaagtaagttaatgaaaactcagggaagagaccagaagtaattgttgtcttctttgacaggtctggactttaggcagataaggtagttatcagagtaaagctgcttccagtatctgctggtttccagggacctttaatttaaaatgattagcatacaggatgccatattttggggtgtgagtccctggtcttctttatttcctttgtctgaaacttccttagaagtttcactataagctgagttggtgtctgtggagagagaaatcgggctagtaa

SEQ ID NO: 914951 - DNA, 4001 bp, Homo sapiens
gggcggatcacgaggtcaggagatcgagaccatcctggctaacatggtgaaacctcgtctctactaaaaatccaaaaaaaaattagccaggcatggtggcaggctcctgtagtcccagctactcaggaggctgaggcaggaggcaggagaatggcatgaaagcaggaggcagagcttgcagtgagccgagattgcaccactgcactccagcctgggcgacagagtgagacgccgtctgaaaaaaaaaaaaaaattttcataggccaccagttgcggtggctcacacctgtaatcccagcatttgggagactgaggcgggcagatcacttgagcccaagagttcaagaccagtctgggccacatagtgagacaccatctctacaaaaaaaatacaaaaaattaaccagcaccacggtgcatgcctgtactctcagctactcaggaggctgaggttggaggatctctgagcccagggagactgaggctgcagtgagccatgatcacaccactgcactccagcctgggggacagagtgagaccctgtctcaaaaaaaaaaaaaaaaaaaatcttcatagccattattttgtttaactgcctcaaatgcagcccaatttcatcttcttgccccctaaatctgctgccgccctctgtgtctcatgcttagaactcctgtagctgttcagtggcaagggtgggggtgctgagggggcagaggtgaggttgatgatttggagccaagtgatcaggcttcacttccagccctgccatgccgtgtgtgactttggcatatcatttcccctctctgggcttcagtttcccaactgcaaagaggaaaataacacctgccgaacctcacaaggcttacagttcttaaaagggttctgtaaaccatggagggttttgaagaagtgggtcatggataagattcccacctactgggctccaacctgtgatgaagctgaagagggactggatgtgggcccgatccttgaagtaggagcggctgaggctgttccatatgacatcggagaccttcttcaccagctcacggctggagacacccccttctcgaggatagagggacaggtcgacggcgcctcggatctgggcggtgaagcgggcatagagggcggcgatgatagacaggtcggccacgggaaagtaggtgaggccgccaggcgggtcgggggcggggctgggctggaaggtgagctcgggaacgttggtagggatgacgcggttgacagccagaaaatgctccacgaagcccagcaccaaggaaaggagcaccaggtccggctcctctcggcccagctcggcagcaaacaggcgcaccacgtcgtcgatggagcgcagcgggaacagcgtcttctgggcggccttcagccccatggcggcgggcggtgggcggcggcctgcaaggcaagccgggggagggagggtcgggcaggttcggccggggagcctcctcccagggtccgctaaggttccacccgccccgacacacgcacagctcccctgcttccccaccctcttcagcctctgctcaccggcttcccctcttttgtcggtgagacccctcagccgagactgcagagcctttttgtcccccacaattccgggacgcccggtacccgatggggtgcgccccaagcaccccaatgaggagccccaatggccgccccgccccctctctacgactgtgcccccggggctgtaaagtctgtccagaaagcgcacccaggtcaagcccccaaaccccaaggagagtcctggcctcggtccccctcgcccacctccgcgcttacatcccacactaggcaccgcggcgcacgccgcccggagcctgctgggacatgaagtcccgcccctagggtcgcactacccgccgggaagtggagtctgggcccacccctgccccgctgagcctggaaatagtggcgggccgggccgctgcgctgtggcttctgggatctctaggtccgcggctccggacacctccttcccgagatactcagggattggcccttcccttcaggccgaccaggcaggaagcgtgcccgcagtgccttctggaaaatgtagtccgggggcactacctgcagactcggggtgggaggtcgccgagcttctgccggttttgctgtcacgggtcggtcggcaagttatgaggaaaaagatcaggttgcttgatccagaaaaaattaaaataaaacaatatgagaaaaacagatacttttaaacactgccagagagtaaatgtgttcagccgctttagctgggtatcagtgtctgttaacatataaagatgcctactctgtgtgcagcactcgtttcccacttccgcccgcgagatactctaacacgtgctaagagtagcttttgtttgtttgttttgagacacggtctttctctttcgcccaggctggaatgcagtggctcgatctgggctcactgcagcctcgacttcacgggctcaagcgattctcgtgcctcagcctcccgagtagctgtgatcacaggcgtgcgccaccactcccgcctaattttgtgtgtatgtgcatatacataaatatatatacatataacacacacacacacacacacacacacacatatatatatatatatatatatatttttttttttttttttttttttttttttttttgcagagacagggattcccagctacttgggaggctgaggcgcggggaatcccttgaacctgggaggcggaggcttcagtgagccagaatcttgccactgcactccagcctgggcaacagagtgagattccgtcttaaaaaaaagtcccaagtagctgggattataggcgtccgccaccacacccagaaaactttttgtattttaagtagagatggggtttcaccatgttggccagactggtctcgaacccctaacctcaagtgatctgcccgcctcagcctcccaaagtgctaaaattacaggcgtgaaccaccttacccggccaaagagtagttatttgtttatttgttttgagacagagtctcgctctgtcactcaggctggagtgcagtggggtgatctcggctcactgcaacctctgcctcccaggttcaagtgattcttctgcctcagcttcccaagtagccgggattacaggtgcctgccaccacacttggctaatttttgtattttacttagtagagacaggggtgtcaccatgttggtcaggctggtctcgaactcctgacctcaagtgatcctcctacctcggcctccaaaagtgctgggattacaggtgtgagccactgtgcctggcctgtatcaacaacgctttgaaactttgaaataatactaaatttccacggtcactcatttatttgcttattcattcaaaaaaaacagatttttggtacttaccatgggccaagttccagacactcggtatatagcagtaaataaaacagattaaatttctgccctacttcacctcttcacctctctggattttcctcaaaatttataactctcctctaatcatgagaaaacatctggcaaaacagagttgagggacattccacaaaatacctgaccagtatatctcaatagtgtcaagttcatgccaggctcatgcctgtaattacaacactttgggaagctgaagcaggaggattgcttgaggccaggagttcaagaccagcccgggcaacatagggagacccggactctacaaaaacaaaaaattgaccaggtgtggtggtgctcacctgtagtcccagctactcagaaggctgaggcaggaggattatgtgagcccaggaggtcaagactgcagtgagctgtcacgccagtgcactccagcgtgggcaacacagtgagaccccgcctcagaaacaaaaaacaaaagaaatcaaaagagccaaggtcatgaaagataaggaaagacccacaaatcattgcagatgagagaccaaggagacagaacaactaaatgcaatgtggtgttctggat

SEQ ID NO: 914952 - DNA, 4001 bp, Homo sapiens
gatgggattgccagtcaaccgggcttggtgcaaagctctttgcaagccctgactcttaagccttttgaggtcaagccccttctctgtctcaaacatttttgaccaggtgcggtggctcacgcctgtaatcccagcactttgggaggccaaggcgggcggatcacgaggtcaggagatcgagaccatcctggctaacatggtgaaacctcgtctctactaaaaatccaaaaaaaaattagccaggcatggtggcaggctcctgtagtcccagctactcaggaggctgaggcaggaggcaggagaatggcatgaaagcaggaggcagagcttgcagtgagccgagattgcaccactgcactccagcctgggcgacagagtgagacgccgtctgaaaaaaaaaaaaaaattttcataggccaccagttgcggtggctcacacctgtaatcccagcatttgggagactgaggcgggcagatcacttgagcccaagagttcaagaccagtctgggccacatagtgagacaccatctctacaaaaaaaatacaaaaaattaaccagcaccacggtgcatgcctgtactctcagctactcaggaggctgaggttggaggatctctgagcccagggagactgaggctgcagtgagccatgatcacaccactgcactccagcctgggggacagagtgagaccctgtctcaaaaaaaaaaaaaaaaaaaatcttcatagccattattttgtttaactgcctcaaatgcagcccaatttcatcttcttgccccctaaatctgctgccgccctctgtgtctcatgcttagaactcctgtagctgttcagtggcaagggtgggggtgctgagggggcagaggtgaggttgatgatttggagccaagtgatcaggcttcacttccagccctgccatgccgtgtgtgactttggcatatcatttcccctctctgggcttcagtttcccaactgcaaagaggaaaataacacctgccgaacctcacaaggcttacagttcttaaaagggttctgtaaaccatggagggttttgaagaagtgggtcatggataagattcccacctactgggctccaacctgtgatgaagctgaagagggactggatgtgggcccgatccttgaagtaggagcggctgaggctgttccatatgacatcggagaccttcttcaccagctcacggctggagacacccccttctcgaggatagagggacaggtcgacggcgcctcggatctgggcggtgaagcgggcatagagggcggcgatgatagacaggtcggccacgggaaagtaggtgaggccgccaggcgggtcgggggcggggctgggctggaaggtgagctcgggaacgttggtagggatgacgcggttgacagccagaaaatgctccacgaagcccagcaccaaggaaaggagcaccaggtccggctcctctcggcccagctcggcagcaaacaggcgcaccacgtcgtcgatggagcgcagcgggaacagcgtcttctgggcggccttcagccccatggcggcgggcggtgggcggcggcctgcaaggcaagccgggggagggagggtcgggcaggttcggccggggagcctcctcccagggtccgctaaggttccacccgccccgacacacgcacagctcccctgcttccccaccctcttcagcctctgctcaccggcttcccctcttttgtcggtgagacccctcagccgagactgcagagcctttttgtcccccacaattccgggacgcccggtacccgatggggtgcgccccaagcaccccaatgaggagccccaatggccgccccgccccctctctacgactgtgcccccggggctgtaaagtctgtccagaaagcgcacccaggtcaagcccccaaaccccaaggagagtcctggcctcggtccccctcgcccacctccgcgcttacatcccacactaggcaccgcggcgcacgccgcccggagcctgctgggacatgaagtcccgcccctagggtcgcactacccgccgggaagtggagtctgggcccacccctgccccgctgagcctggaaatagtggcgggccgggccgctgcgctgtggcttctgggatctctaggtccgcggctccggacacctccttcccgagatactcagggattggcccttcccttcaggccgaccaggcaggaagcgtgcccgcagtgccttctggaaaatgtagtccgggggcactacctgcagactcggggtgggaggtcgccgagcttctgccggttttgctgtcacgggtcggtcggcaagttatgaggaaaaagatcaggttgcttgatccagaaaaaattaaaataaaacaatatgagaaaaacagatacttttaaacactgccagagagtaaatgtgttcagccgctttagctgggtatcagtgtctgttaacatataaagatgcctactctgtgtgcagcactcgtttcccacttccgcccgcgagatactctaacacgtgctaagagtagcttttgtttgtttgttttgagacacggtctttctctttcgcccaggctggaatgcagtggctcgatctgggctcactgcagcctcgacttcacgggctcaagcgattctcgtgcctcagcctcccgagtagctgtgatcacaggcgtgcgccaccactcccgcctaattttgtgtgtatgtgcatatacataaatatatatacatataacacacacacacacacacacacacacacatatatatatatatatatatatatttttttttttttttttttttttttttttttttgcagagacagggattcccagctacttgggaggctgaggcgcggggaatcccttgaacctgggaggcggaggcttcagtgagccagaatcttgccactgcactccagcctgggcaacagagtgagattccgtcttaaaaaaaagtcccaagtagctgggattataggcgtccgccaccacacccagaaaactttttgtattttaagtagagatggggtttcaccatgttggccagactggtctcgaacccctaacctcaagtgatctgcccgcctcagcctcccaaagtgctaaaattacaggcgtgaaccaccttacccggccaaagagtagttatttgtttatttgttttgagacagagtctcgctctgtcactcaggctggagtgcagtggggtgatctcggctcactgcaacctctgcctcccaggttcaagtgattcttctgcctcagcttcccaagtagccgggattacaggtgcctgccaccacacttggctaatttttgtattttacttagtagagacaggggtgtcaccatgttggtcaggctggtctcgaactcctgacctcaagtgatcctcctacctcggcctccaaaagtgctgggattacaggtgtgagccactgtgcctggcctgtatcaacaacgctttgaaactttgaaataatactaaatttccacggtcactcatttatttgcttattcattcaaaaaaaacagatttttggtacttaccatgggccaagttccagacactcggtatatagcagtaaataaaacagattaaatttctgccctacttcacctcttcacctctctggattttcctcaaaatttataactctcctctaatcatgagaaaacatctggcaaaacagagttgagggacattccacaaaatacctgaccagtatatctcaatagtgtcaagttcatgccaggctcatgcctgtaattacaacactttgggaagctgaagcaggaggattgcttgaggccaggagttcaagaccagcccgggcaacatagggagacccggactctacaaaaacaaaaaattgaccaggtgtggtggtgctcacctgtagtcccagctactcagaaggctgaggcaggaggattatgtgagcccaggaggtcaagactgcagtgagctgtcacgccagtgcactcc

SEQ ID NO: 914953 - DNA, 4001 bp, Homo sapiens
gagaccatcctggctaacatggtgaaacctcgtctctactaaaaatccaaaaaaaaattagccaggcatggtggcaggctcctgtagtcccagctactcaggaggctgaggcaggaggcaggagaatggcatgaaagcaggaggcagagcttgcagtgagccgagattgcaccactgcactccagcctgggcgacagagtgagacgccgtctgaaaaaaaaaaaaaaattttcataggccaccagttgcggtggctcacacctgtaatcccagcatttgggagactgaggcgggcagatcacttgagcccaagagttcaagaccagtctgggccacatagtgagacaccatctctacaaaaaaaatacaaaaaattaaccagcaccacggtgcatgcctgtactctcagctactcaggaggctgaggttggaggatctctgagcccagggagactgaggctgcagtgagccatgatcacaccactgcactccagcctgggggacagagtgagaccctgtctcaaaaaaaaaaaaaaaaaaaatcttcatagccattattttgtttaactgcctcaaatgcagcccaatttcatcttcttgccccctaaatctgctgccgccctctgtgtctcatgcttagaactcctgtagctgttcagtggcaagggtgggggtgctgagggggcagaggtgaggttgatgatttggagccaagtgatcaggcttcacttccagccctgccatgccgtgtgtgactttggcatatcatttcccctctctgggcttcagtttcccaactgcaaagaggaaaataacacctgccgaacctcacaaggcttacagttcttaaaagggttctgtaaaccatggagggttttgaagaagtgggtcatggataagattcccacctactgggctccaacctgtgatgaagctgaagagggactggatgtgggcccgatccttgaagtaggagcggctgaggctgttccatatgacatcggagaccttcttcaccagctcacggctggagacacccccttctcgaggatagagggacaggtcgacggcgcctcggatctgggcggtgaagcgggcatagagggcggcgatgatagacaggtcggccacgggaaagtaggtgaggccgccaggcgggtcgggggcggggctgggctggaaggtgagctcgggaacgttggtagggatgacgcggttgacagccagaaaatgctccacgaagcccagcaccaaggaaaggagcaccaggtccggctcctctcggcccagctcggcagcaaacaggcgcaccacgtcgtcgatggagcgcagcgggaacagcgtcttctgggcggccttcagccccatggcggcgggcggtgggcggcggcctgcaaggcaagccgggggagggagggtcgggcaggttcggccggggagcctcctcccagggtccgctaaggttccacccgccccgacacacgcacagctcccctgcttccccaccctcttcagcctctgctcaccggcttcccctcttttgtcggtgagacccctcagccgagactgcagagcctttttgtcccccacaattccgggacgcccggtacccgatggggtgcgccccaagcaccccaatgaggagccccaatggccgccccgccccctctctacgactgtgcccccggggctgtaaagtctgtccagaaagcgcacccaggtcaagcccccaaaccccaaggagagtcctggcctcggtccccctcgcccacctccgcgcttacatcccacactaggcaccgcggcgcacgccgcccggagcctgctgggacatgaagtcccgcccctagggtcgcactacccgccgggaagtggagtctgggcccacccctgccccgctgagcctggaaatagtggcgggccgggccgctgcgctgtggcttctgggatctctaggtccgcggctccggacacctccttcccgagatactcagggattggcccttcccttcaggccgaccaggcaggaagcgtgcccgcagtgccttctggaaaatgtagtccgggggcactacctgcagactcggggtgggaggtcgccgagcttctgccggttttgctgtcacgggtcggtcggcaagttatgaggaaaaagatcaggttgcttgatccagaaaaaattaaaataaaacaatatgagaaaaacagatacttttaaacactgccagagagtaaatgtgttcagccgctttagctgggtatcagtgtctgttaacatataaagatgcctactctgtgtgcagcactcgtttcccacttccgcccgcgagatactctaacacgtgctaagagtagcttttgtttgtttgttttgagacacggtctttctctttcgcccaggctggaatgcagtggctcgatctgggctcactgcagcctcgacttcacgggctcaagcgattctcgtgcctcagcctcccgagtagctgtgatcacaggcgtgcgccaccactcccgcctaattttgtgtgtatgtgcatatacataaatatatatacatataacacacacacacacacacacacacacacatatatatatatatatatatatatttttttttttttttttttttttttttttttttgcagagacagggattcccagctacttgggaggctgaggcgcggggaatcccttgaacctgggaggcggaggcttcagtgagccagaatcttgccactgcactccagcctgggcaacagagtgagattccgtcttaaaaaaaagtcccaagtagctgggattataggcgtccgccaccacacccagaaaactttttgtattttaagtagagatggggtttcaccatgttggccagactggtctcgaacccctaacctcaagtgatctgcccgcctcagcctcccaaagtgctaaaattacaggcgtgaaccaccttacccggccaaagagtagttatttgtttatttgttttgagacagagtctcgctctgtcactcaggctggagtgcagtggggtgatctcggctcactgcaacctctgcctcccaggttcaagtgattcttctgcctcagcttcccaagtagccgggattacaggtgcctgccaccacacttggctaatttttgtattttacttagtagagacaggggtgtcaccatgttggtcaggctggtctcgaactcctgacctcaagtgatcctcctacctcggcctccaaaagtgctgggattacaggtgtgagccactgtgcctggcctgtatcaacaacgctttgaaactttgaaataatactaaatttccacggtcactcatttatttgcttattcattcaaaaaaaacagatttttggtacttaccatgggccaagttccagacactcggtatatagcagtaaataaaacagattaaatttctgccctacttcacctcttcacctctctggattttcctcaaaatttataactctcctctaatcatgagaaaacatctggcaaaacagagttgagggacattccacaaaatacctgaccagtatatctcaatagtgtcaagttcatgccaggctcatgcctgtaattacaacactttgggaagctgaagcaggaggattgcttgaggccaggagttcaagaccagcccgggcaacatagggagacccggactctacaaaaacaaaaaattgaccaggtgtggtggtgctcacctgtagtcccagctactcagaaggctgaggcaggaggattatgtgagcccaggaggtcaagactgcagtgagctgtcacgccagtgcactccagcgtgggcaacacagtgagaccccgcctcagaaacaaaaaacaaaagaaatcaaaagagccaaggtcatgaaagataaggaaagacccacaaatcattgcagatgagagaccaaggagacagaacaactaaatgcaatgtggtgttctggatcaaatcctggaacagaaaaaggaca

SEQ ID NO: 914954 - DNA, 4001 bp, Homo sapiens
attattttgtttaactgcctcaaatgcagcccaatttcatcttcttgccccctaaatctgctgccgccctctgtgtctcatgcttagaactcctgtagctgttcagtggcaagggtgggggtgctgagggggcagaggtgaggttgatgatttggagccaagtgatcaggcttcacttccagccctgccatgccgtgtgtgactttggcatatcatttcccctctctgggcttcagtttcccaactgcaaagaggaaaataacacctgccgaacctcacaaggcttacagttcttaaaagggttctgtaaaccatggagggttttgaagaagtgggtcatggataagattcccacctactgggctccaacctgtgatgaagctgaagagggactggatgtgggcccgatccttgaagtaggagcggctgaggctgttccatatgacatcggagaccttcttcaccagctcacggctggagacacccccttctcgaggatagagggacaggtcgacggcgcctcggatctgggcggtgaagcgggcatagagggcggcgatgatagacaggtcggccacgggaaagtaggtgaggccgccaggcgggtcgggggcggggctgggctggaaggtgagctcgggaacgttggtagggatgacgcggttgacagccagaaaatgctccacgaagcccagcaccaaggaaaggagcaccaggtccggctcctctcggcccagctcggcagcaaacaggcgcaccacgtcgtcgatggagcgcagcgggaacagcgtcttctgggcggccttcagccccatggcggcgggcggtgggcggcggcctgcaaggcaagccgggggagggagggtcgggcaggttcggccggggagcctcctcccagggtccgctaaggttccacccgccccgacacacgcacagctcccctgcttccccaccctcttcagcctctgctcaccggcttcccctcttttgtcggtgagacccctcagccgagactgcagagcctttttgtcccccacaattccgggacgcccggtacccgatggggtgcgccccaagcaccccaatgaggagccccaatggccgccccgccccctctctacgactgtgcccccggggctgtaaagtctgtccagaaagcgcacccaggtcaagcccccaaaccccaaggagagtcctggcctcggtccccctcgcccacctccgcgcttacatcccacactaggcaccgcggcgcacgccgcccggagcctgctgggacatgaagtcccgcccctagggtcgcactacccgccgggaagtggagtctgggcccacccctgccccgctgagcctggaaatagtggcgggccgggccgctgcgctgtggcttctgggatctctaggtccgcggctccggacacctccttcccgagatactcagggattggcccttcccttcaggccgaccaggcaggaagcgtgcccgcagtgccttctggaaaatgtagtccgggggcactacctgcagactcggggtgggaggtcgccgagcttctgccggttttgctgtcacgggtcggtcggcaagttatgaggaaaaagatcaggttgcttgatccagaaaaaattaaaataaaacaatatgagaaaaacagatacttttaaacactgccagagagtaaatgtgttcagccgctttagctgggtatcagtgtctgttaacatataaagatgcctactctgtgtgcagcactcgtttcccacttccgcccgcgagatactctaacacgtgctaagagtagcttttgtttgtttgttttgagacacggtctttctctttcgcccaggctggaatgcagtggctcgatctgggctcactgcagcctcgacttcacgggctcaagcgattctcgtgcctcagcctcccgagtagctgtgatcacaggcgtgcgccaccactcccgcctaattttgtgtgtatgtgcatatacataaatatatatacatataacacacacacacacacacacacacacacatatatatatatatatatatatatttttttttttttttttttttttttttttttttgcagagacagggattcccagctacttgggaggctgaggcgcggggaatcccttgaacctgggaggcggaggcttcagtgagccagaatcttgccactgcactccagcctgggcaacagagtgagattccgtcttaaaaaaaagtcccaagtagctgggattataggcgtccgccaccacacccagaaaactttttgtattttaagtagagatggggtttcaccatgttggccagactggtctcgaacccctaacctcaagtgatctgcccgcctcagcctcccaaagtgctaaaattacaggcgtgaaccaccttacccggccaaagagtagttatttgtttatttgttttgagacagagtctcgctctgtcactcaggctggagtgcagtggggtgatctcggctcactgcaacctctgcctcccaggttcaagtgattcttctgcctcagcttcccaagtagccgggattacaggtgcctgccaccacacttggctaatttttgtattttacttagtagagacaggggtgtcaccatgttggtcaggctggtctcgaactcctgacctcaagtgatcctcctacctcggcctccaaaagtgctgggattacaggtgtgagccactgtgcctggcctgtatcaacaacgctttgaaactttgaaataatactaaatttccacggtcactcatttatttgcttattcattcaaaaaaaacagatttttggtacttaccatgggccaagttccagacactcggtatatagcagtaaataaaacagattaaatttctgccctacttcacctcttcacctctctggattttcctcaaaatttataactctcctctaatcatgagaaaacatctggcaaaacagagttgagggacattccacaaaatacctgaccagtatatctcaatagtgtcaagttcatgccaggctcatgcctgtaattacaacactttgggaagctgaagcaggaggattgcttgaggccaggagttcaagaccagcccgggcaacatagggagacccggactctacaaaaacaaaaaattgaccaggtgtggtggtgctcacctgtagtcccagctactcagaaggctgaggcaggaggattatgtgagcccaggaggtcaagactgcagtgagctgtcacgccagtgcactccagcgtgggcaacacagtgagaccccgcctcagaaacaaaaaacaaaagaaatcaaaagagccaaggtcatgaaagataaggaaagacccacaaatcattgcagatgagagaccaaggagacagaacaactaaatgcaatgtggtgttctggatcaaatcctggaacagaaaaaggacatcagtagaaaaactagtaaacagggtaaccagccttccaagctggcccagaactgaggcaactcgggagtatgcgactttgagtttaatttaatttaattaattaattaatttatttatttatttatttatttttgagacagagtcgctctgtcgcccaggctggagagcaatggcacgatcttggctcactgcaacctctgcctcccaggtttaagtgattctcttgtctcagcctcccgagtagctgggattacaggcacccgccaccacacacggctagtttttgtatttttagtagagatggggtttcaccatgttggccaggctggtcttgaacacctggccttaggtgatctacctacctcagccttccagaagtggtggcattacaggctttagccactttgtgtttcaaaaacagtcaaagctaagctcagtggctcacacctgtaatcccagggctttgacatgccaaggcaggaagactgcttgaggccaaaagttccagaccagcctgagcaacaaagcaagaccctgcctctacaaaaaaa

SEQ ID NO: 914955 - DNA, 4001 bp, Homo sapiens
taccttctcttttcagcattcattttgtgctaaatattgcgcacatcattgtatgtaatctccgtaactccaagttattctcactctgcagatgagtaaactggggaacagaaacattcagcaatatggcacccagctagtaaatgtggaagccaggactcaaattctcactttgcagccagatagcttgcaaagacagttcttcagccctctccttgcccacagaaatactagggtcaggactactaaaatgtctttaatgagagccttgaatcaagtaagcaaagtaggtgatgcccctgaacgggcctagctcctgcacagtcacagtccagccataggacccttgttccaggcagggcagtcgcacatcagggtcctcatctgagaactgaatcagggtcccctgagggtttagaaccctcaagcattctgatagaagctggtaagccctaggcagacctccccgggcaacagcatcccatgtgcctttgtccagcagtagttggaaagagcctgaagaagccacagcccccaggttctgagcatcggcgtgcatgaagtggaggcttgaggcagggtgtccagggcatagaggtgtttggcctgggccaccctccaggaggctattcatgtgggccacagccacaggagaaaagtccacccccagcacatccactgggtgtggagatttggtgtagaggcctgtacataggctggaagtcccacagcccacatccagcactcgcagaggactggcagcctgtgcctcctgcagcaatggcagtaggagcccctggacttcgtcgtatccaaagaaccagtcgaaggtggggacagtgcccaaacgaggctgggcatgcagccgatcccagagacagcggtccgccaggcaactatcagccagtgagcctgtgggcacggttggagggtgtcacttggtctatgtcgccactgcaaaaacgtcgtatatacacactggcgtcttttttttttttgagacagggtctcactctgtgacccagggttgagtacagtagcacaatgatggctcactgaagcctccacctcagcctcctgagtagctaggactataggcgccatcgtgcccggttaattttttttgtagacagggtctcgctatgttgccctaggttggtctcgaactcctgggccaagcgatctgcccgcctcggcctggcaaagtgttagcattacagccgtgagccaccacgcacggcccaccgtagggtttgagaatcacaatttcagggactacactcctgactcacgaggaacccaccttaccctccccactctgcccccaccttgccctctccactctgcccccacctccctacccgcaaaggggcggcacgtccccatcatcaggctcggcaagtggagcattcgacgcagcgcggccatctggagattcgggtaagttcgaccagagaagcttatgtgaagcgtccaccctactccagccggagaggcctgaggtccaggggaagatctgcaaattccgcgtagcgaaaggcggcgtacagcttccccgaactctgcagtcccggaaaaaagaacgcggacacagactatggtaggaacggcctttattggctgcagcgggaagtggaggagggtatacagcgtccgcagacctgaaatcaaatgagaaagtgtgagcaccccgatggaggagccagctggatctcggttgtccttctccgagattcccggtgtcccggcgtttgaggatagaaccagcggatgggaagccgccagcaccgaagacatgacgccgagggggccagagccctttccctcttcctccgtacattacggggagcggcaccacaagcccgatccccgccaagaaaaggagggtcctgagaccccgcccagagccttccacccggcacccccaccactcccggccgcccaatctggctactacagctaaaaccacacttactagctcaccaccctccgaaaggcctcccgcaccgcggagctcctttatatagcccgaggacccgcccccgagttgcgattggcccgcggaaggccggggcggagccccgcggatccggcgctgagcggaagtacggaccgtgaactggagtggaatcgcgactatgggagctccggggggaaagatcaaccggccccgaacggtgactgtgtgggggccgcgactttgtttcctcaagcgttcctgagcccttttatctcgcacgagatgggatcagtgaggggccggggctgcctggtggaggggccccgggtcgcggcgagcccactccatctgattcgcatctttctccccggcaggagctgaagaagaagctgttcaaacgccggcgggtgttgaatcgggagcggcgtctgaggcaccgggtggtcggggctgtgatagaccaagggctgatcacgcggcaccacctcaagaagcgggcgtaagtactagaccctcttcctgttggtcgtccccaccgagtcttccttcctccctgcagagctccggagcagcttcacctctcagctcaccttgtgcactgacgcttatgcggggaatgtctgtcggctgttagttcctaagctctgatagcctctcacaatacctgtagcagacaacctttctttgggttttggattctgttaagaatctcaggaaagccggggatggtggctcatacctgtaatcccagcactttggggggctgaggtgggcggatcacctgaggtcgggagttcgagaccagcctgaccaacatggtgaaaccccgtttttgctaaaaatacaaaaattagccaggcgttgtggccggcacctgtagtcccagctacacgggaggctgaggcaggagaattgcttgaacctgggaggcggaggttgcagtgagccgagatcacgccactgcactccagcctgggccacagagtgagactccgtctcaaaaaaaaaaaaaaaaaaaaaagaatatcaggaaatctgttggctctccattctccaagtaatgttatacattcacacagatttttataagtaaacttatttttacatacagaaaagtgcacacataggcgcataaaactcgaagaattttcccaaaggcactcataggatttcacttgtaagtttcaaggcctcctgtgtcttgaggaagagttcccatcccattaattactttctgtgtcctttttttttttttttttttttttcctcttttttgagacagagtctccctctgttgcccaggctggagtgaagtggcatgatctcggctcactgcaacccctgcctcctgggtttaagctattctcttgcctcagcctcccgagtagctgggattacaggtgctccccactgcacccggctaatttttgtatttttagtagagacggggtttcaccatgttggccaggctggtcttgaactcctgacctcaggtgatccgcccacctcagcctcccaaagtgttgggattacaggcataagccaccgcccccgatctatgtcctttcattagcttcttcaatgtaaatatttagggtttctattactatttatattatatttatttaatacttttccttttttttttttttttgagacggagtctcgctttgtcgcccaggctggagtgcagtggcgcgatctcggctcactgcaagctccgccttctgggttcacgccattctcctgccgcagcctcccgagtagctgggactacaggcgcccgccactgcgcccagctaatgttttgtatttttagtagagacagggtttcaccgtggtctcgatctcctgacctcgtgatccagccgcctcggcctcccaaagtgctgggattacaggcgtgagccactgcgcccagcctatttaatactttttctatagccagaactatttgtgtgacctcagttggttcaggttaacctagctctctttatttccacttacccatcaggtccagtgcacgtgccaacattacact

SEQ ID NO: 914956 - DNA, 4001 bp, Homo sapiens
actgaggaccgtctgcctttggttccgctgtttccagcctcagctgccaaagggtcctgttggcctggggtttccaaacgactttcctgggggaaataaataagacctcactattgccatgtttaaattcacttttactttttccatttttattttttggtctgaaacaactttaaatctaacttttcatttatccttatctctgctctttggtttacaatgaaagtatattaaacttgtattctgataacacagcagttatactccaatttttaactaaaagtgggaatttctgtctcattagctctatgtttagaaactacaaggagcaaggtggcacagtagtgggattgattgtaatgtcaaaatctctctgctttaaccaaatgtacaattcctttaaaatatggacctcatcatctgaacactgttaaatggcaagtgtaacactgaatttgaaatctaaagtacttggattaggtgtgaaaacatctgtggcactgataaaccttatacaatgtgggtgtcaaaaaagacaaactttaaaacacttctattcttcaccaatgatccatgcaattttacaagcaactggcaaaatatgcatattttcagactggattaagatattctcttaatgtcacttaatccagaaagtatttcagagacaaatgactcaattctgaattgccttgcctgtatagttcaagacaaaattttgtgttaggaattttctgaaaacttcagttttctctcagaaaaatgaaaataatattacctacgtctcatgggctgttttgagaattaactgagagaccatatgtaaagggactaataaaatacctgggaagtcaaaacgtaaagtactatacaatgagttcttactggaaataaagacatctcgattttattaccaagaccagcagcacacaaataaccatttcattagctaagatacacgtaatacagccaaaaataagtagtagctttattgatcctctgtctagtgatcagaaacaataatataacatgcatcacatacagtacacaatactcccgattttcctcaacaggaaataaatgtccataatacagaggtttccatatattgttgcatttataatactctgcatgggtatgagtcatcctatttataaagtgatattgaatccacaaaatataagctccaagagggaagagtttgattccattgcatactattgtgtctaaaatctaaataattgctaaatggatacaataacagtaatatatagaacaatgaaattcagatactgttattaaaaacaccctgccaaataaagttattttagcaaacgtatttccgatttgttccaggtattttctctctttttaaagtgtctatgctgaaataatatctataacctgggacttaaaaaaaatcacttcacctaataataaaccaagccaaaatctttaaatttattttgttatgccatcattagacagagaatgtaaaaagtaaccaaacagaaaatagtttcacggtcagtactaatgggagtaggcctggaagtcctgagaaatgaagcctgaggcctcaacccaaaagatctccaattaattcaggtgaagagaccccacattttggcccatattaatgtgtctggaagaaacaggtccctacaacttcttggaggcctcactactcagagaaaagaaaataaacacccagaacccattaatccacacccaaactccacctctccccctagcagagggcataggccaacccctgcccgcagcagtctcactcacacccttaactctgggaccgggccctgcacccgccggtctacaggaggcctggtgatctcaagtggctgcctcccaccagcagctccggcctagccccgcccactttggccaccgcctccggaaacggccgcgcgcgttgccacggtgacgagcaagcaaagagcttcccctgcgcagccaggctgagcttcttggcgccaagctgccgcgagccgtgacagcgtccgacgtgatgacatcacgcgagcggcagccaatgaaacgaagcgctgaggaaagtggcttgggtttgaatattgtggttgagtctgaagcgctgggaggcggacattaaagtgaagtggttgcggtaacctggcctgggcctgaagtgagtgagaggcacatgaaggtaaaactggactctgggacgctccttttggtgacttgtattattgggaacggagggtcctgccgcttcaggtctagaagaccaggtgggcttcttgacaaacacagaagcgttgaggggtgggggatcagggtacctggggagaaagtgaaaggaaaaagggattcgagaacctgctaagagcacagctctgcttgaccgtaatcctcgactgctcagctggaagggcagggatctccttaagtcctgagaggaagtcttaagttttaaagggcatcttggcccctttcccagactggcagagaactttaactgcccagcaccttgtagtgtcagcttttttccggactccaaattgggagtgttttgtttcagactcacatataagcgtacccaggggcttacctatcaaacgaggagcttttgttcatcactgcataaaatttttgtctgaagagctttaactgttagtcttgcactggtcaatcgggaacccctcctgagccccagttgtaggtagcatcgagataaaagccgctctgactgcctaacgggattgccgaggatcagatgaggtacggaagagatactgtttggcaaatgctctgcagatgaaattaaactgtaaacatttagaatcagtcctatagtctgttcttggtttccgcaggacttttttttttttttaggagctcattagtcactcagttacagagaagccaagactgactgctgtttattatatgagaagagagtatttgaccagaatgaactgattttgtggtataatatatagtttagattatggataattaggtagaaatttaggcactctacagattttaatttttagtgtcattccaccacgtctagcctcctgtttcgtttttgtaaggtttttataaactttgatgctagagaatgtgatatccaatgactagatagtgcttcttattaagttcatagtttgtaagaactatttcaataaacaaagattatctacaaagcacaatcacaaagaaaaaaacttaaaagattatctgcctttaatagtagtaattaatctccttttctattatttattcatttatttgagacagagtctcgctctgtggtccaagctggagtgcagtgacgtgatcgctgctcactgcaacctccacctcccaggttcaagcaattctcgtgcctcagcctcccgagtagctgggattacaggcgtttgccaccacactcggctaatttttgtatctttggtagagacggggattcactgtgttggccaggctggtctcgaactcctgacctcaagccatctgcccgcctcggcctcctaaagtgcaggaattacaggtgtgaggcagggcacccagcccttcctcttctactattgaaaagtatttacaaatacataatatttttatattgaaagtgcatcttgtcccatcatagaaataccccaaatcaattaagagacacgataaaaatgattttttttttttttttttttttgctgacaactgtgaaaactaagaggaaaaaaaatagctcagctgtcagtgccggccttccctccagttgaaccttttattcttccctgatggttgtaagttggtgggagtagtgcccccaagactgatattccaaaaagagctttaagatggactgtagatgatagtgttgagtatcgttttcagtcctatacagtgtttgttgaatctgaatctaattcaggtttgagtttgtatttaatatatcataactgtcactctacttctgtatcattgtttggaagcattctcttctgattcca

SEQ ID NO: 914957 - DNA, 4001 bp, Homo sapiens; identical to SEQ ID NO: 914429

SEQ ID NO: 914958 - DNA, 4001 bp, Homo sapiens
ctacaccccaacacctgcccccccacccccaaaagccccacgaaactagaatcagtcctaaggtagaggttatttcagctaacacagtcctcctagactataccagaagccagcttctcagaggtgaggccaggtcaatggtagaagcaggcttccttccaaaatagcacccaatccctccccatagcaatctggccaacactatccactactcttgactagggggaggataaggggtttgcaggttgaacaacttggctaacctgggtcacttcaactgttttgccaaagaagcatcccctgaaatcctggtggagagcatcttttcagaggctggaaggctctagtcagcacgctgtggggccatggtcctgcacacagcacaccacttcccacagccatgaaacaagagcactggactcacactgacagggccaggacctggctcagacacttgttgtgtgaccttgggcacctaccatacctgagcctctttccccatctctaaaatggggagggcaaaactctcagcgtttttggaataaccatgaaattggctgcaaaagtgccacaagacaggacctgttgcccagtaggcacttaataagtccgtcttctctctgcatgaagaaagtgagttcttacggtattagagtctccagggcattgcacaggactaccctggagaccggaggcccacttgttgggtcgactgccactggggagggggagcaggacagagtaagtgcaggtgtcagggaacctggcacaaacactggagggccaattcgcctctggcttttctcccgtgggaccagcccacaaggggcctggctggtgacttcatccttcaccaaaatcattgtagactgtagttaacaggcgacaatcacagcaagagagccggcacactgctgtaggcctggcggggccctacaggcttccaaataaaagctctttccgctttaagaacccaggcctcagaataaacaatgtggaaggaggcacactactctggtttccacatcccctcatccccatccagtaaaggccgttcccagctctgccagtgaggctggcggtgaatacaatttaccccacctgccccgtctggcccggcagcggcttagacgctgtgggcaagatcccacctctccccggggccagccaggcacctacagggtgggtgccgcggacaccctgcgggggtgctcctgggcctggagcgagagcgggctactggggatgcgggagacgcgatgcagagcggacagtgccgcggcccctcggaccactgccacgaccccatcccgactgggctccagcccgcggccagccaggccactgacatttggcccaacttaacttcctgttactaaagagggaggggacaggggagggggaaaagggcgcccagtgaagagctggaacggggcgtgcaaggctcggagccccaatcctgggaagtttggggatggtcttctgccaggtgacaggcagcactgcaggcgcgtcactcccaccccgttttggcgcttgcgattttctaggcttggaactgcagggtttgggtgttgcggagcggagtaagaggtagttcggcgtgccggtgggaggcttttattgcgttctaattggttcagaggccggccagggccgccccgggcttcgtcgcagcgccacctgctcactgtgcgccccgccgggtgggtttgaggcgggggatgctgcggccgcacctgaccctcccgggcgttggacacggcgcagagtccagccgaggctggcacggtccccacccgcgcccgcccgccctccccaccctgaggccagcgccgcccccgccttaccgaaagtcgcgcgggctgcccggccccgggtcaggcctgcctcggccctggccgcgggcgcagcgatcgggccccgcgggccactgacagagctgggagcgagcgaggcggcccggcgcaggcttagccagccgagcgcctgcggttctgcgccgcgcggtggaccgggctggggaacgcccccgacagcggcgcggccaatgacaggacagcacggagcccgccccgcccccgtggggccggctgtcaccgccgctgccgccggcgcacgtgggctgtagcccggcccagaacgcagggagtggccgggcgctcccaccctgacccgcacagggcggagaccaggggagggctgctgggagtggggcgtggtggcgctgcgagatgaaacccccggtgttggtaagcgggtatcaagggagcggcgagggcctgggcctcacgcttcttggtctaggcggctggaaagcaagacacggcatccccttttggacatgggggagcagcatggcacttctagtaccgactgtgtacgtcctgtggacctccctctttgctcggctccttgaccaccctgagcttccgcaaacctccttgctagctaataggatcttcccctcacctggccttgcttggctaaagctagtgggaagggggcggtggtgcagactacctgtgttaccttggtcagatcacctaaacaccctctacctttggctgtcatatccctatcttaatctctgctctgcccaccttcccgggttacccttaccccccacagctccagagagcaacattcacagacaacacagtgtgaatggagtggggcctagtgagcaatcagaagcactctgtagactataactactgtaaaacaccttgtgtttaaacggctcttgtagcagttatcatgaaatggggatctccatgggcaggaaccatgtctgactcacctctggaacccagggcccatcacagggcttggcccggtgtaagcatcaataagtgttcttggaactgagctacctaggcagaggaaaacaggcaggcttgagcagtgagaaacagtattgtggctccaggctgctggaatttccccagcacaagaccacctccaggagacaccatgttcccttgccagacaagtgcaaacagaacagtttgcctccccaaacctgcagattattattattttttctctactctacttcttgccatgtgatcctactctcagccctttggtgtttaccaggtattgtcctacctggcagctctcttagctctctcttcagaattcaatcaacttcctgtagatgaactttccagcaaaagctgttcctacccagtttgcaaggcccagtcagcttgtactctcagagggccagcactccactctgatggaaatctgcctgtgatgccagcctggggagtgcccttcacacgtgatctcatctaagcctggcttgacaggtatgtattgtatcatcatcccatttcacagatgtggaaactgagaccagtgaggtaaagcaactggtcaacatcacatggttagtaagtatcagagtccggatttgagccagatctggttccagaatctacatgcctaaacactatgtgctggggcctctacagcactgcccatgcctctagggtacttgacaggtcaagtctaaccctgaaagagctgctctaggcctgacccactcccagtccatccaaacagtctgtcaagctcaggccagggcactgtaagggagaggagactccactggcctggccctaccttatttagaagagtgatacaggaaacccaaggcagtgaggagcttcaggaagcagtgttacatctgtccccaccttaactacactggacataaagcctcttgctattggcctggacctgagacacccatgtggtggatagagatggagacagagtcattcattcatttaacaaaccctactccgaaccaaatgtggttcctgcactcatgtaacttataatgcaacagatgaataatcagaagtacacaatgctgtccagacatggtggctcaggcctgtaatcccagcacttgggaggctgaggtgggcagatcacctgaggtcaggagttcaagaccagcctggccaatatggtgaaacccc

SEQ ID NO: 914959 - DNA, 4001 bp, Homo sapiens
ataaacagtaggactgggccatgtcccagctcagcccttagacagctgcattgccttgggcaggctaccgcctgcctaaggcaaatttctcatctgtaaaatgggagaagtccacctgcttgatcatgaagatgaaatgacctttataaaacataaagtgcaaagaaatatgaagtgtaaataataatgatacaacatgatacacttcccctgccctagagaagtatataatttgggaatgctttggaaaataatccaaggtacctatttggcaagcatcacattctctgtaatttggggaaattttatgtttcaccctgccaatggagatgaaactggcagtcagtcccagtcctcaagtccaggaagttgcaagaaaaggtagaataaacacagaagagtagccaggacccacctggccctgggtcaagcctggattgaatggatgagccaggagggacccaagattccaaagggaagagagaagaacagcacgtgtgttcaacagaaacagaacaaaacaaaaattcatttgagggcaataggattgagccagccagaattgctcacactcccctccctacacatttcagacaacattggaattcactgttcattgcctgaccctcctctgtggacaaactctgtattctgtttctccagagaggggacagtttctcaggctgtggcagactggccaatcagctctttgcctgggtctttccccagatactaagaatgagaattcctggagcagctttccctgaggtccagtcaaccccttgtcatcctgccattcaggactcccgtggactcctcaccccacgtgatccctcagcgcccaccaggccagctgccaaatgccctgacatgcacgccggctgcccctccgccggagcctccgcccatgccccagcatcttggattgggccctgatgctctcccctcaccctcaccttcatcctccctcctcccacaactaaactgagcctcttcaacgccctgccaaggctcacatgtccaggaaagctcccggagagaagggagggttttattcatccctatgttccctctgactcatggctttctgtaagttcttcaccctcctgtaaacacagatatatggtcccaaaatgttctctgattgctgaatacaggagcagggcagaggaggagggaggaggggtgccaaaacgccagacaggaagtccagggcctgcgtttccattctccattggacaccagtgagccctgtcaccttgagaaagaatcttcaggccaggcctcagtctccctgtttggcaatgaggggtttactctaaacaacctttctaattataaggttacagaaaccaggctagcctgggacacagaaaacgtgagtcctgggcacttattagcctaccaccacctgtggcaggctatctgactcctcagaccccagcctccatgtctataaaataaacaaggataatgtgaccaccccacccagggcacaaaggttcccataggacactgtttgtgatgaagctttgtggaccataaaagccctgatcaaacctcagggatgagactccttgagtccacaaacagctgttggtcacctgtgatgtgccttgtactgtgcctgccgggaattgctgcctggctcagacaggaaggcgggagtctggttccttgcccttgaggctcccacagccggtaggtgggacaagcaggtgaacaaaccctaactcagtggtgtatctgaggcaagaacacagcgctaggggagtgcagaggaggtggtgctgactcagagggaacagcgcgccctgggcacagcaagctgccccaggatggtgggaacatcccacactttcctaagcctaggaccagcccccaggagctactccacggtaaacaagatccaccactgtgacttactcactggattctcaggcatcacagtggttaaagtcttctctttctgggatgagacacacacgggttgccatgttcctttaaaaacaagagcccaacaattaatgtcagtgacatcatcgtagcttatgcctcctttctagtctcctccaagaggtcacgcatgcttgtgcactctgccttgtgggacacttcacccagcaagaggaaatggacagagaatctctccctggcctccaacaagttttgcacgtgaagaaaggaatagcaagatggctaaacaaattctattgttggctgcagtcagggcaccctaagggcttatcagatctctacacaaagactttgctgaggagtaggagggatccggaaaacaatgctttattcgctgctttagtaaaaacagaaagtgtcagaatttttaagtgtgagacacaatgaaagtaaatcaagcaggtgtaaaactggataacaagtccccagtgtgaaacgggtcccattttctaacactgagtaaactagggagttatgaaagtgcaccagctgatcatggctgagtttcctaaactaatttttctcttggcttccagtgacgacccacattatttcatgacatcctattgcttctgcagaaaatgcctctacacctgtttggaaaacgaagcccagagttacaaaatatttctaatgatttacttccacattaaaaaataaatcaaaatatttaagaggtaacctcaaagggacaaaaactaacacaggtgtgaaatttgacatctataagaggcaatattcatactccagggaggtatacgcacactttgttcaacagagtggtgccccccacacacacactcacacacacacacactctctctctctagcacacaaagagcacacattgttagagtgctgggagatgggactcactgttcagaattctcagcccgttaatgggagacagcctatgaagtgctgtgtactgtcatgggtggagactagacctgcttgatctcagtggctcctcacagacagcaaacagaggcttacagaacagatggcacttgccaagcccctacagcaaggcaggattggagcccaggactggctgcccctgtgctcatggtctttcccaccaagctgagggaaaggtgtactggacatcaactctgatttagtcctggtgggcccacacaccgggcgagcctggcgagctccaagggcggccacctgggcagaagcggcagccctgcccgcccgtcatcatcattaccaagcccacacccctcggggcttgtgccagctgacaaacaggctggcctgcctgggccacattctatcagcctgtgctgcaggctcggtgctgctgcttccagccagaagtcaaagcggctagaggccttgacttgtctgccccctgcttctcaagggaagcttctgggatctgtgggtggggagctggacatcctggtacagaattccatcattggtccaaccagagtttcagaagccagggaccccgccatgctctctagatctcaggaacagaagtccctacccaccctagggcattacggagaccagcagcagggacacggggctctttaaggttcagcttaggctgtcttcatggtgggttggaggcaggtatgactggaccaggctacaagggctgaccactggtcagatgctcacagaggcctgggcacactgtgtccagccactcaaaggaccaactcgtaccctttgtctgaccaacaagccaaatacacttgagctccctgtaacaccaacaaattagaaggtcctagagcccaataccttctggcctttgagggtcagggcctctgttccctcatccataaaatgaggagcttgatacaattggtgatttcctcacctaggaccccattcagctgcccccctccaggtaccctgacttttagagacaccgacaaaactacttagttgttataagagggagggattaacctgtgtacaggtattgccttgggtagttaacactgctacctcagctaatcctcccagcaaccctgtaagacaggtagtacggtatc

SEQ ID NO: 914960 - DNA, 4001 bp, Homo sapiens
cagccctccgttccatccctctgctggctgactccctgtgacaatctgtcttcagatcaccaagagggtccctcagcagccacaacatgttgggtgtatggggcaatagcattccctaataaaaaccagagctctgaaaaccctctgtgagagaacacagtgcaactgggccacctgacttttatgggacctttaaaaaaaagaagccaccatatacaattactaagagggatgacactttggaagctaaaagcttcccctcctttaactctgaagagccaccccgtgaactctgaaccatgaagtcacaacaacgaggaagggaggcactgggcaggagtggcacccaggacattggtctcaccttctcctcccccttccttttccctacctcccccatctcctctgcctagctggagcatggtaggttataaacaggcactgcctggatagctagtctgctctgggctgaggcgactggtctgtttcaacctgatggaatgcttttcctacgtcccgcagtgtcagtgtgccccaggctcacaggagcttggcagctgtctccccaggggcagtggaaagcagcatatcccatggtggactcgacagcttctcaccaccaaaacaaaaacacaacagtcccgactgccatggagagttcaatcctcttgtcccgggattggcaccggctggaattcctagggttctagctgagctacctcctgtgaggtctaaatacagcacattcgattttaacctaaacacacagcctgcaccagtgctcagggctggtagtccccaacggccaccagggaagtcagctgagacgcctggactcccacctgcccatctggtgctgggcatttcagaaatgtcagagaaaggttgcgatagtgagcctatgttcgccgatgctgtctatggccaaatgatgggggatgcaaccagttcgtgtaggcttaactatgagtgtggtcctaggtagagaaatgcatcctgaggaagggagtgggcaggtggagaatgcaggggtatcaggaggaagagaaagagacagggaggaagaggcagtaaggacctagacctatttcttagccaattaatccaaaaccaggggatctttctaaaatgtccacacccaggcgaacacaactctgtaactatgcctctccctgagatttaggtcttaggccctagaatcagatggactaaggttgccctctagttgtgtgaccttgggcacaactgacttctcaatttccccatctctaaaatggcctgaaggactgctgtagctgttcattgaaatcatggacataaagtaccttgtacctagaagctgctcaacaaatagcagctactagaagtagtagtagtggcagcagggataatagaagtgggggtaatatcaagcatgggcttctctccctcaactttgcctctggcttccctcccttggagagggcacgagtggagggaacctcccagccaggaaaagctgatgcttagagacaaaggaaacctttaccggaggaaaacaatgcaacattcacacccacacctaagaaccgtagagtgccaaaatggcaacagcttcctaacctcccaaatgtcaacccacacgccctgcaaaggtaagactaggagggtttccccttaccttggtgttcgtgcacgacttccctcgcttatactctttgtgggaaccacgcttatccaatttgtaccacagggctttggctttccaggtggtcaccttggacttgagcttggaataaaagtttctgtggtccagagggtctaggtccaggtgtcgtgtgagaatgttgaaggcctggagggtacctttgcacgtggatgcctggacaaagttctcaaaaacctgccccgcctgggcctgcttctcatcctcgttttcccccatggttcaggagtcgtgtgcggcagtggtgcggcgaggacacaggtgaacagcatgaagtatctggagaaacgtcacacctgtgaaagtagggggaggcagaggtcagctttggacgatgaggttagggtgggggatgggtgctgagaagtaaaaatgcaatttctttaagacattcaaatattaaccacactatttagtgttcaatactaaacataaatatttataacagatacagaattgtgccttttggcctgtcgatgtggcattgcaggtaatctcttcccctatgctctgctcctcttgctggctgaaaagtaccacagattgcacagggctatgccctggctaatgccaacagtacctagtcaatcttgctctaagccaagtggttctgcaaatagtgactaggaaaagggaaaacaacccagaaaagtacactatatatagcaccattgaaagtctatcattctcggtgctgcaaattggttggctgatgtgaatataacccagccacattacactaaggcacagacagaaaaaactccagagaacatctctctagatttcatgactgcccacctctccgtagacacccagctttaaagcctttcttcattcgttaccagagagcagggctttccactatccacatgacaaacagtctcttctcaaaacttctgctcctggtatcagctggaagcacaccatctacctcagtcagactcacagacagacagacagagacacgtggacctcctccgcctgtgcaaagggggcctgtgctttgtaattccaggctgtgagctatttggaacaagtgctccggctcatggaagggaaaaatgcgatgggtgctcattcacatcccaaaaatagcttgcctgggctttggccatggtcctttctgcaccattctaacctcagacatttcttaggaaagtcatttaagtttcaaaggaacaaaaataaagtagagctgattttccaaagcactagctgtttttccagaatccaaagctggcacaagaaaacaaatgtggaggagctggggctgacccagctgtcaggagggctggaggggtctctgagcaagagggcacagcagaccgagctccaccgatgaggcctggtaagaggaggtcagcagcacacagagcgcaggcctcacggcagctctgtgctccccagaggggcagtgttcatcgtggacaagttggaattgtgggacggttttataatactaaaagcagagaatggtgtttatcttcctccttaatctcttacttattcactcagcaacaattactggtgcattagcaagagtcgggcaccactcaaggggccgggaatacgtaggctcaggccccgcccacaggggcagatggattacaagaccacaggcaagtgcttgtggaatatgaaccaagggcatggaagcccagagcaggcggtgtccaacagagcctcgaggagtccagaggggccacaagagagaaatctcaagaaagcttcaattttaggaatgagatttattttactagaagactgggcagtggacattccaggccatggaaatacccacacagggatgtgagtgtggaaagagcgggacagtggtggaatgacagcaagttcaaggttcaggattcgtgaggaggtgcggtggggatgtccagcgcacgtggtggcaggtgtcccctccaggccaaggagggggactggcctctccagtgggtggtgaggagcagaagacagaggagcaggaagagacaagtctttgggaagatgatagggcagcagtggactggaggaggaggctggaggcaaggaggcagctaaggggctgtccaggcagcaatgagaggagccggaagagaagggggaagaacagcacatgcaaaggagcataggagcccactgggcaccacctgccaggaggagcctgctggggctggcgaggtctcagacactggatgcccagacttgggggtgacaggatccctgcaactttgtagggccctacccgaccttccctctttcccggagagcttccgaggtgcctggcactatgcttggc

SEQ ID NO: 914961 - DNA, 4001 bp, Homo sapiens
aaagatggctctcgtggctttcagctctggggattttcgggagactgggactccatggtgcagcttcccagaacttggaggttttgcaaggctcaaatccccctcaaagtcttggagcgccctctaggggcggcagcctgagcaggcctgaatccatgtcctccctttgtacgcagtccagccagctcgctccttggttccttacttcattcattgattcagcaaacaaggattgggttcctcctccgggccagaccatgctagacactaggctgattgaaatgatcaaaactcaagccctgccctcaaagcagcttttgtatactctcgagaaacgctgtgcaatactccttgataactaaaggctgagtttcccaggcccatcccagacaccatggggctgctcagcagtcctcttgctcctgcacctcccccagcgacccagccctattgggagggtctcccaccagcctccctgctctcaccccaggctgggagcttcctgaggagggactgatcccccacactggtggcacacagtagagtgggctggaagccttgggatggaccctacactcatatagtccgggcctgggcagcaggcttccagggacttggggagggccagagcagggcagtaaaggcgatgacccatgtgtggcaatgctagctcctctgccctctgctgtcgccgctgggggctgtcagaggattcaggagtgactctaggctgtcctcagatgaagtggcctgcccaagagtgcagccctgggtcctgctcccaaggtgcccctgtcccagcctgacctggtgtgacggtggtgcgtctggggatggtgggggaatgactcactggctgggagccttgactcagaaggaaggaagaccagggctcagttccaactgcaacaacgtttcttggtagaaacccctgtctaagccaaggcctttctgggtcctcctctcctagggtgaggctggagagggagtgggtgtggggggaggtggaaggcagcgatgagcctggaactggatgaagagtctctgcccctcgctcagggcctgaggaggtaactctgctcagtgagtgctgcagtccctggatccccggcctgcctagatgctgtgagactgtgcgtgttcactgcgccccctggcagggcctgccgcctcagcacctgccacagccctgctcttccccaggacactgggaccaagggtgactcagaaaaaggagcaggtgtgtatgtgtgtgtatgtgtaggggtgtgagtgtgtgtgcgtgtgcatgtgtgtgtgtgtggatgtgtgggtgtctgtgtgtagcatcctgttttgtgtgaggccgttaatctgatggcccagtctcactccagtgtacagaatcaaatcatagagttcctgaacctcagtttactcatctgtatttcaaaaagcttagaggcaatgatggctaaggccctgtctgggtgaaactgtagaatcctaaggctccataattcctgagccaggggtggggtggagggggatgggaagatcttgagtcccttggaaaaggctccctctagtcagcagtggaaataaagtcaagcttatattttatttcttgcctctgacaaccaggaggccatgccagagagataccatgtaaggaatgagaacggctgcccctgagaattaaccagagatcttctgcccagccccagcctcccacccccagagagctagtgactcactccaccagaattctctcctccagttctggtatttgcttggggttggagactggaagctattggcccgttgcagagctgctgtggaaaaagaaagggacagggaagatggggtgggaggaagagtccattaaatgtgtagagtaagtaggaatttatctcctatagctcaattaccacaagtcaatagactaatgattataatagactgaactctctccttccctcacaccatactgctgtccccacaacacactctaccaaacttttcatttgttcacacatcaaatatttttgtgtttttgtttgcttgtcaccaggctggagtgcagtggtggggtcatggctcactgccccctcgacctctcgggctcaaatgatactcccacctcaggctcccgagtagctgggactataggcatgcaccacgacacgcagataattttttaatttttattttttatagagacagggtcccactgtgttgcccaggttggtctcaaactcctgggctcaagtgatcctcccacctcggcctcccaaagtgctggggttacaggcatgagccaccacacctggcatcaaatatttgagaccctgctatgggacaggtaccaccctcagagaatgcctcaaattatgaaccatcattactaagatcatcagtgagcatctacatgcatctatgcgtatatgcatatgtgtagacatatttatacatgcatgtgtacatacgtacatgcacatattcattcatgtcagaacagttatttaaagctaaggtcatcacgggccatcaatgttccatatatgtaatacattaaaaactggagctgctctgattgaagccaggaagctgcaggaagttctactctctgcctcccctttccccacagagccccccaaaccctttggaaaccaggtttaattgaggctgtggaccatcattgctgtggccctcccttggcctggttccaagggaaacatatttgcgggacactgtacttcctgtggaagacccctctgccagctgggccttgaggattagctgagcaaaatgaacatcacatgcagaagaaaaacaggtcttggtcacttagggtgtgagagtgggcagtggggtccacgtgttccctgttcccaggcaaggcctgcagatgcattcccaggcttcaggcccctgcgcctccatcactgctggagagaaaggatggggacggtgaacatctgaatgtgcacacaggcagggccaggaagcatgaacggaaaggaagcccaagggcatgatgtgggtgtgggagatggacgcagggagggtctgaatccaggaccctaaatccaaggcccagctagcccagccctctgtctttctttctgtctagaaacagtcctagatattccactccctgccaggtctcacagtggaactctttcttagcagccaggctgtggagcacaggtgacaattactacctgggggctttccttcctcaagaccagctccttcagctcctctctttcccttactccatttgtgaaaatgcctttgcaaaaattataactgagaaaattatgacagtgacagagatctgacttaaccaatccctcttgcttctaacctccaccctgtctttgttcattcctgggcgtaggctgaactaactttgggaggaacttagtttatagtttagtttggaaacaaagacgataacagccctttccccagacaaacccccttcctgcctggggacaagactgcctttgcaggactaacaaattagccgcaagattagaaattgtggtttaagagtcatgcagctggaagttgcaagattccgaaccttcccaaattgcatcttgaggctaacatcactattgtaaagcctaagatcagtgcttgggatattttgcagactctgcgctcagaggttcaactggcaccacctagattgataaactggctcatctggtcttttagcccccactcaggaactgactcagtgcaagaggacagctttgactccctatgagttcatctctgacctgaccaatcagcactccccattttccgaaccccttctcaacaaattatctttaaaaatcctgatccccgagttttcagggagactgatttaagtaataataaaattctggtctcctgtacagccagctctgtgtaaattaaactctttttctatcgcaattcccctgtcttgagaaatcagctcagtctaggcagcaggcaaggagaacccttcgggtggttac

SEQ ID NO: 914962 - DNA, 4001 bp, Homo sapiens
actgcgcccagcctaatatttaatatttttcttatttacaaaactgataaatgttgactgctggaaattttggaaaacacaaaaagccttccttttctttaatttccacataagtttatgaccgctgttaaatttcactgttttcttctaatgaaaaagtttcaatgttgatgcccacaattaaaacatcaaagttttcaacaattttcttaataaaaattttagagtggcctagttgtcactgctaagatgttgttagctagcagaaaagaccgctctttcacttttctaagtgtatcactaattttctgagtggtaatagaaaaatatatacttctatgaatgcattctttcaactaaatcaaccaatattacaatgaaacatgaaggggtgggagaattgagagaggcaaatttgattggcttacctctgaaattgttggtccacctttcatcttcatcaaaatgagcatcccctccaatacctgggcctggttgaaaagcatgagcaagatttcctccaggtccatcaaaaggagagttgtcccgatgatctgaaagaaacaattcaacaaagattccttgtggttcttatgtaagctaagccagaagggcaagcattagctttgttaagaggccaacagacttccatcaactgtgatgcagtttccctcttcgagcccataaaatcaacattcatcttaaacaatcaattccagttgcaaagctacgagatctaggggcaaggtgaggttaaggtgctataagaagaacttacctcccctgacaaaagatatcatgatgtctgcttgaccctcagagaccttggtgaatgtcagaggtgtgacattactccagagttggaaggctttctcaatggcatggtccacatctgctcttggcaaatctggcgtgtaattttcaatccttagaatgaaacaaaatagagacacattggacatgacttcttaccactgtcatgggaaatagctctctcactctggccctcagtctgcctacctgtaggtcagatgtgtttgctcccagcgagggttcccctcagtgaggacaaactgagccacatcaggcactccacatctgggctgcttcatcaccttcagggtttcagcatctggtttcccagtcactttcagcccaaagaattcctgcatttgcttcaatttttcaaccactgggccactatttctccgcttttcaacttgcctcccatcattcttcaggttgtagtatttttccaggtatttctgacaaaagaaaattatcgaaacactgcatgggaaatctttctcattattctaaaaattgatggcattaagttttagccaaaacagagaactgcttttaaaccttgtgtttagatttcgcagttgcttttatccttatttttggtgagaaatgaaatttcagagtagaaatgtccctactattagttattgtgaagtaagaacttcatagtagagcaatttttgtagagcaagatttgcatactgttacaagtctacaatttgtggagacaagtttggatgttgttcctttagttcactctcacctccaactggaaaaagagagcgtatgcatggctagatacattttgggtggagggtgctgtttctagcaaaaaaaaaaaaaatctctttataagaaacctatccttaaaaaactctattacattactgcagaaaaatacaaactaaaaatttacattattgtcacatgcaatgcagcatttacctggactaagtccacatcttgctcttgtgtttctagagtcgctgggaagctgtgagacaccacaccccagaacagcagcagcagcagtggaggaaagctgtgcatactggcctttgtcttctttctcagtgcaaggtaagtgatggcttcccagcctcttgctgctccaatatcccagctaggaagctccctctgtatatatagagtccttgcccttccagaaagccagaggctgtctgactcatgctttataacatcctcttgattagctatgaatagactaggcaatcattagaaatggtgactcctagcagattatttggaatcacttggtgttgcaatgtcatgattaacttcaaacaagatgtgtgcgaaggagacacactctgccatgtaaacagtggttttctccaattcatttctttcctatttgagaaaggttcttgttatatacacaggtcaaagagtactccatggtctttttgaaaaagactggttctgatggtcataaagtgctacaggtttctccacacaccttgctcccagggcagagggtggaattactaacactgcgcacctgatggctgttcggcacctgtactgactgaagttcagctcccccagcactcactttacggtggctcttcggggttctctgaggttcccttctgcctttgttaagctgcctggtaccctattgcgatagcaccatggcttcccttaatctttactcagagccaggcatggtggctcaagcctataatcccagaatttcaggaggccgaggcaggggaatcacttgagcccaggagttcaagatcagcctgggcaacatggtgagaccccatctctgtaaaaaacaaacaaacaaacaaacattttttaaagttagccaagcatggagtcatgcacctgtagtcctagtcactgaagaggctgaggtgggaggatcacttgggcctgggaggttgaggctgcattgagctgtgattgtgccgctgcactccagcctaggcaacagagagggaccctgtctaaaataaaatttgaaaaaatttactcaggcctaggatttaagagccttacctgagaagacccctcatccacaggcggagtatgagataactccccaccccttgcccatcattatcatgggacaaataggatccttccctgaaacttgtctgaatgtaccggatgatgaaaaggctggaaagagactgagcgtgactctggggtcttatttttaatcatacttgtttcccttgatatgagtctatcttcgctccttggtgctaggcagcatttatttattctttcatgtatgcattcattcatatatttatgcattcctccattcaaaagatcttatttagcatctcctgcccattaaaataaatacatggctctgtaatgaaagatgtgtattcctgtacttatgttccacattaaattgtcttgggtactggtgaccggtgtcaccagtgctatctgtagcattcctggtaagaaaagttggtttatctctgtagctcccctactcatgccccactctccttccttggaagcatttattgaaaacatacagtggagaaacactggcctgttttatcacttcagcaccttatggtgtctcccacctttcccactgtatcaggtttgcttttcaacactttcctccccttatggattcctgttttctttctgcgtcaagactgatatcttactcataaacaatacttcagtatatcttggattgatttgagataagtcatatcctttctaattatttaactacaatttcctcatctaagtggcataacatgtgagttcaagagggtaagaagaatgggaagacattctcacgaaaaggaaatcctcttctcagaggcatcagagggagggtgcggcagagaccaaagaacacttgccactgaagtgactccagcacagacaaagaaaatagtgaaaggggctcttcatattagagggtgaacatagactatgttttaaaagtcaaggagtggcagatatactcgactgtgagggaatctagtcactgtgaagacgtgacaagcctagctccactgaggcctgggaaacaagggtgagttaataggttaactcaggaaagcagcatgtgaccatctgtgattggacaggaaattgcctaagacgtcaccctggaagagtctcatacactgtcccatctggcaagagcctgcacatcctgcaatgtagaagttttc

SEQ ID NO: 914963 - DNA, 4001 bp, Homo sapiens
gcatcttctgtccatttttcatcatcatcaaagtgaatatctccataaagcccaggtccaggtgggtaggcatgagccaaactgtgtcctgggccatcaaaagagtaaaagtctccatgttctgatagggaacaaattaatggaaatataagtgttcagaatttctttttaccctgttccaattaaacaacagtagattctatagtctgaatgttggtgtctgctgcaaattcatatgttgaaactcaatgcccaatgaaatatagtattaagaggttaggtctttaggaagtgattatgtcgtaagtgctctgccctcatgaatgagattagtgcttttatgaaagaagcttgagggaacctcctggccctttctatcgtgtgaggacacagaaggtaccatctatgaggaataggctctcatcagacactaaatctgctggcaccttaatcttggacttcccagcctccagaattgtgagcaataaatttctgttgtttataaattacccagtctaaggtaacttgctatagcagtctgaacagatgaatacaccagataaatggatgctttatttgattacctttaactgcaaaagagatcattatatcagcctctccttcatacagcctggagaatgtgagtggagtcacctcttcccagactttcagagctttctcaatggcagaatcaacagcatctcttggcaaatctggtgtataattcacaatcctggaggagaaaaattgaagaggatgttattttctcctgcctttatgaaaaattgttaaagaaaactttatgttacttatccaaatatgacgagtaacttataaggtttcaatattatgtgaaaactaatctgaaccattacctgtatgtaaggtgggttttcctccacttcggcatgccaggaaaggagctgaagtgaccaacgtcaggaactccacacctgggcttgcgcatcacctccagagtgtcagtgtctagcttccctgtcacctccaacccaaggaacttctgcattccttggatttttttaacaatgagattactgtcctttcttctaaactgtttcacatccttttcgaggttgtagtacttttctaggtattgctaatggaaaatagaatttttagggcatttttgtgattttccatcatttatccaacttttataatccatcgtaattttcctctagtttcttaaaacaaaagaggctatcacatttaatttgatttttcattaagactccccatttcatacaaatttttaaattttattgcaatgttagtttgctagtcaagtaaggaattggggattgaaaattcaagtctagcattatttttgttagtttttaaagaaaccctcttttaacatagttttgtgaaaagttagaatactaaccttttctacttacattgttattatagacctggtttaagactgaagtgtggtaaactcttttgtccaaatatgacaagtaaaaatatgaaaactattacctgatatgatttaaagatcaaacttagcatgctcccctccccaataattttaactaaataaattctaaagccagaggagtttcatatattctccatatgttcttttcacttagccacaaatatactgctactattttattgtaaccttgagcagttatattccctttctgaacctttcttttcttctctgttaacataaaaataatttccacctccagcctgttaattattctctgatgctacagttttctaacaaagtgatctctagtctaatcattctgctttgtattggaagaccaagtagacacaattgagctggccagtagctgcaatagatgccaccgttaattacctgggcaagatccttgttggagtcctcctcttttgctgccccactcagaggataggcagagcagactggcagacacaacagcacaaggaatgcaagatgcatcattctcactgcccttaccttctttgtctactgggcttctagctctaccccctagtggcctttcttttatacagagacaatgctgagatcaccaacagtatgattcatgcatgtgttttttaagtctgaatgttcacaaacatttaatgtaatggtgatacagcctacatcagtattttccttcaactttctaaacttgaaagaatgattaatccccaggaaatgatttctgtgtttgtaaagacgaaaaagaattggctagataattcacgtctctgtatttacttaaagagagctgacaagcttggtaaaatgccaaatgttttgacattttaaaatcagtgcaattttcttttaagaagattatgttttaaacttaaatataagcaggtaagaattaagtaggtcaacggaaataaattccaaatatagtcgtggtctaaatgtgggagttgttatttacaaagatattaaaacaaatatttcacttcttgagtccttgtttacaatagctattattgattttcagatggatttactggccgtggagtaggggtattgtgagaaggacatggagcatgtagagaaaagaatccaaagagagaagctttggtgttcactcattctccatttcccagtgtataattatgttcaaagtaactgctccataaaacttgttaaatggaaaaaattaaattgcatgttagactgaaatggtcctcctaccctcttcctcttctttgcttttaaaaattcttttccccctttctttctcctcttaaggtacaaaggaggagatggattgagatctgtaatgggaaatgatttcaaatcctccctttctttcacatgtctaacgatccacccctgcccacaaatagtattttctttcttgttttctcagccaaataaagtgctttttacgcagtaacacagtaagtctgcaataactgttttgtcaaattaacctgttaatataaagaaccctgaaattcttatagtaaagaactatatttttctctcactaaagataaattaactctaccatgtctgaagtacataattgcaaagtgatgagagattaaaataataagtgtgtaggaatgatcttttcagtatcgcccaccatccccaccctacttaaggtagcctggacaggtgagacttccaggaaccaagaggctctgagacttccaagccagagttggagagaaactgggatatacactgagccagccaagtcaacttgtgacttactgttgccaaagagtttgctctacagtgtggtgacatcagcttgaatatcagagggagaaggactgacaactagactcaaataaagtcagctggacattgagcaagtacagtcaggcactgtataatgtttcagtcaacaatggaccacatatatgatggtggtcccatatgattataatggagcttgatatggtttggatctgtgtccctgcccaaatctcatgtcgaactgtcattcccagtgttggaggtgaagcctggtgggaggtgattggatcacgggggcggatttctcatgcccatttagcaccatcccatcggtgatgttcttgtcatagtgagtgagtgagttatcatgagatctggatgtttaaaagtgtgtagcacctagcccctctctttcttctcctgctctggccatgtaaagtgcaggctcctcttttgccttccgccatgattgtaagtttcctgaggcctccccagaagaaggtgccaccatggttctcatatagcctgcagaaccgtgaaccaattaaatctcttttctttataagttacccagtctcaggtatttttgatagcaatgcaagaacaaactaatacagagctgataagcacccatcagctattgtcattgtagccaacataatgtcatagtacaatacattacccatgtgtttgtgatgatgctggtgtaagcaaacctactgtgctgccatacgaaagtctagcacatgcaattgtgtacagtacataattcttgataatagtgataaatgactgt

SEQ ID NO: 914964 - DNA, 4001 bp, Homo sapiens
cattaagtttccactatatttcatttttgtcactggaagtttgtttatctcaaggccataaaatttttctaagtatctctggaaaaaaaaatacattcagcaatgtgtaagtacacacagaaaatttctgttgggagctccacatatatgactcaattgcacactgatgcttttggaccaggaattttgcacatcttactcacaggttagattattgttttttggacaattaattataatcaggaaaaaaaaccttaattttttgtgctatcaaagacatgtcagccaggagcagtagctcaggcctgtaatcccagcatttcgggaggctgaggcaggaggatttcttgagcccaggagttcaagactagcctggacaacatggcgaaacctcctctgtacaaaaaacacaaaaattatcccagagcgttggtgcatgcctgtagtcccagctactcaggaggctgaggtgagaggatcacttgagcttgggaggtagaagctgcagtgagccgtgattgtaccactgcactccagcctggatgacagacacagaccctgtctcaaaaaaaagaaaaacaaaaacaaacaaaaaaacaaagacatgtcataaactattagctagatttattcccggaatcccagtggaagtatcttttttaaaacgtcatttattcatttttaagacagaggagtttctcttggtcacccaggctggccacagtggtgcataccggtaatcccagcactttgagaggccagggtggaaggattgcttgagccccagagtttgagaccagcctgggcaacagggtgaaaccctgtctctactaaaaatacaaaaattagccaggagtggtggcacatgcctgtagtcccagctacttgggaagatgagtcagtaggatcacctgaacccaggagacggaggttgcagtgagctaagatggtgccactgcactgtagcctgggtgtcagagtaaaaccctgtctcaaaaaaaaaaaaaaaaagaaaaagaaaagaaaacaaaaggatacatgaattattaatgttattaatataagttgggacacaaatttcttgcttaaaaactcaaagctaaacaaaatggataactatgataaattcaatgttaaaatcatcttagaaaatagggagaccaaactcttttaattaaggaaaagaatttaagaattgaaaaaaatccataaagaatgctataaagatggggcctggcatggtggctcccgcctgtaatcctatcactttgggaggctgaggcgggggattgcttgagcccagaagttacagacgagcctgggcaacatagtggaaccccatctccataaaaaagaaaaagaaaagctgtaaagatataactgagatgactgagggtaaagggaatatgcttaaattatcatggcagcctgaagtggttatattaatcctgccattgttcagatctcagattattaactggcatttaatgattagtgtaaaataccataacagaagtgaactccaattatattgaatggaaatttcttggccaaaggtttttagaagaagaaacaagttcacttgccaatttcataacagtccttcaaaaccaatacctcttttttatattcctctttgacaaagtaaaacttaatactgaaagcagacagcctcctagaccaattttcagctgatacgtaaaagcaaacaaacaaacaaacaaacaaacaaactggttaatgcaattaaatcttaaagacaaacatcaagctcgataaatactgtagtgtccatacttacttcaccaaatagcacattatttttttccaggcttgtagagctgttcaggggaagagctccagaagcagtggcctgcaggagcagtattagaagaaacttcattgtaaacttctaaacggatcaattcagtttactgtgttcctttctagcctaagttcctgaactgttcctctttatatagcccttagtccgggttctgtgaatatgaatcctatgagtgactcatagttgatatcatcccttgatctatctcaaaaacatgcaaacaaaagcatgactttattcagacgacaatggatcaattagcatctagtccatcactcaagcaattcagagtatgtaccttcaaaatgataaataagcctctacgtccacctatcctacaaaataagcccttgtaaaagaaatatcaagcaactaaaagagaaggagaacttaaaatatattttcttaaagcctgatattcttgattttcattataatactttccttatattcattatagataaaaaaaagtttttaaagtaaatgttgaaagattaaataaaatccttttcctggagtaaatgagtgctttctaaacggaatccagctccctagagaaatgtgatacagagattttacatgtagcaaaaaaaaatttgtaacatcgacttcattgtttattccacgtgttgtaccggctcagatcctgattctataacttaacatcttcagacatctaagctgaagctcagtcccaactgggtacctggatagattccagagacaaactttccctacatcctagattgtctagcgttggtaggatgtgggttaactcttttcaactttagcagatgggaaaagtttgcctctggaatctatctgcctatcacctcagcttctttccctcttgacctaattgtcccattgcacagaatctgtctcttactcaatagagaatatttaagcactaaaaacttttacaagtcagggaataaaattccaaaggtagaattgcaagcagtggtgctgcggtgtgaggatagattctactcaacaccccttcaaatcacaccataagttcgctgcctcctgattgtatggggacggtctggatggtgcggtagggtgcacgtaagagtgtgttaagatttagccattgctcttacccacctcagtggcctgggaaacagtctgctggctgcttgagtgaggcttaaagaaaaggagaaaaatatagaaaaaaataattttccaatttaaaaattatcttgcctcactcttgcagagaactatgcagattcttgctgatctgttctcctctctctagccattgatttgttttctctgtgtctatctaacctacaaatacagctggttattctgctgtgagaatgtcactttttaatgacacaaagtttaacagacttgccttctgtgatctaaatagtatctctaaatccagatcacttggctttataaatgttttccagaaaattgttatcaatcctctggtgagatgccacatcagaccaggtgacactggtgtcatgggtcacttactgatcttgtggtgtagattacaggctactccattaagatgtcctttctcaatgggggcgatatcacccccaactgggtgaaaaattggtcatcaaaggcaaaaatatatatttttgtgtataaaagacagatatgcatacagcacatgagcagatatacaatttatgtctgctattaaatttgtatggggggaaatctttaaagtgtctacaaagcctctttatcaggaatagtaataaatgttgagaaaccctgatctatgtattataaaggaaacagaactaaaatttatggagaggctttaacagctgccagcagtttcatgcaccatcttatttaatcctcacagtagtcatttatggatgaggaaactgaacttaacttatccaaagccacacaactagtaggtggcatagctgaggtttgaggccaagtctgtttccaaagcctttctgcttccattaaaccaggctgcaaagtcaaagtcagttcaaagatgcttgagtcattctctctgtccccagatatttaccttgttgttggagagtaagaacaggaaaataatcaaatcactaacagcacatatgtatatgtcatcacattgtctctaccttatgatgtacacgtaggactagataatttttctatgtga

SEQ ID NO: 914965 - DNA, 4001 bp, Homo sapiens
tttctaccaagcaaaaaactatttcaattcacatctaattcatgtatgacccatagatccagccctggtagtttttagttagatatttctaataaactgtacttcctcaacatgccaaaaggtaatttgcagtaataacatgttggctgacagacataaacattttggtcctacttcaaagttcattagtatccctcaagccacagtgacagattaagtagattttgttcattttttaatgttgatatcaatttgtagaaatgtcacttgtagagacactaatacatctaagataaactttatttaagaaaatatagtcaaataccaaatatatttaacttttatgtgttttaacttcatactagtgtgttcactgtctaatctaataacacataaatgatatctttataagaaacattacctttggaactacttgtccaggtttcatcatcatcaaaatgggcatctcctccataatttggcccaggaggaaaagcatgagccagcaggccagagggcccatcaaatgggtagaagtcgccatgctctacacacaaaagcaagggttaggagtcttatcacatccaggagtacttagcacaggtgtttggtaaattagtgttgaattctttaaaaagtaatgaatgactgaaataaataattttaaaatggaaccaagaattagaatataaaaatgtttgtaaaataaatgtgcatcattacccttaattccaaaagagatcatgatgtcagcaatgccatcgtgaagtctggtaaaattcagaggagttacatcggaccaaactttgaaggcttttttgaatgccttttcgacttcagaatgagtcatatcaggggtgtaattcacaattctatttaacagagaaagtttcaatgaactttttggaaagtgacagctattttagaatacattttcttggtatattgcttttcaattcaaaatgcaataatttctttgaaagttctactagaggtttattgtttcaaataatgtattaattatgatgccatacaagaataaaaagtcaaaaattcagccacatttgagtatctccaaatatctgaccatgtggcatcttaaatttaaaatattccaatgtttaatataatttattttgcatgctaaaagtttagattacattgataaagctcaaataaatgaaatagctctgtaaagtttctagaaagagtggaactcttcatcttgagcactgttgtaataaatacacctaatgtactatgtttgcaaattttctttaacctacttttatttctcttttgatttcatctctaaaagaaatactttgagatgcccactaaaaaataatgctgagttaatgtaacaataatagatgttatgaggtattctcggcaaccatattaaagctattctggaatttaactgccaattaaataataaggcctacttaatattagacatttaatactacaagaaaaggctaacaaatatgaaagaaagatagcctatgatttacctgtaggttaaattcattttggaccatttaagagttcgagggaaaacattgtattcacccacatcaggaaccccgcatcttggctttttcatgacatctaaggtgttatcgtcaagtttgccagtcacctctaagccgaagaaagactgcatttctcggagcctctcagtcatggagcttgctgcattctccttcaggattcccgcgagatttgtaggatggtagtatgatctcaggtagcgctagaaaagacaccaaaatgaactgcgtttaaaagagaaggacatttctgagatgtaccaaccgcatcatcaggattggcaagatactctacctctgcaaactggaggtcttcctcagacaaatcatcttcatcaccaccactgggaaggggcagggcccgacaatgagtccagctcaagaagaggaaggcagccaggacccctggatgcatcttgaatggtgatgcctggggactgttgtctttccgcagagattacctttacttttataggcctgcaatggtgagtcatcacttatggataggtttccacttcccagtcacttgaaggtaaacatgcttacgtggcgactttttcttttccctcccgagtgtggtttgtggtagaatttgagggaaatataaatgagagcatctcttgtttcagcagggtctcaaaacccatctggcaaaataaacggcctcagcatatttatggatactgtgggaagaagcagagagtagtacattttttacttcacttagcaaaatttttttttttttgccttctgtaagaacgtatctacttttgcttcttcgaataataagtgtatcaagatggcatgtttacttccataaagagaaacttagtactgattctagaatgtttactactgcctggtaaattataaactgcattttctctagaataactacagagagatgtcttgtgtctacctgaagttcacgatattggaccaaaaccaagcttgatgacttggaggtgctacggcacaaccgcaggattgagccccatggttggaatttaaacacactggcatgacctctcgacaaatatggagtcctgcataaattccctacagattcagacagaggtagaagaattacattggaacggaacaactgtaatggctagcacaaacagggattactgcattctaggtttaaaaggcattatctcatttaatccttacaacagccacataggtgctgtcagaaagcttgttttccattttacatatgaataatctgatacactgagaagttaaatacttgtatacggtcatatagtttataaatgataccaggatttgaacctaggccaataactcaaaactcaatgttcttgaccaccgtccctgtctaattatgacctccaccctttccattctcagatattttcttaaaagctgagctgtttggttcctacacctcagggagtgcccaagaaaactagggctgcagtaggccaatttcaagtttctcaatttttaagtttgaataatagaagtaatcttggtccaaccatcaggaaaatagtcctaggggcctctaccctattattcctttcagaacatcacacattcagtaccgtgaaatcaaagtgccatctttggtcccctgcagaagtaaatgggtagagcaatataggccatgatctttggatttattggacttctttaaataaatgattggaaatgcaggttaatttgagtgactaagagtcagaaagaaaatgctgctcaggtcaggaacatagtaagacaaagagaaggagcatgaatacagctttagggtgagtacgaaatgggtatcctaacatatgagtaaaatcctataatctagagtagccagtgccttagagaaaaatcagaaaagcctacaacatgtatgtgatcatttgagggaaatttactatatgcctttatccaaacaaaatacagccaaatataccctttcaaatagattgtttccagtgagttcaagattagattggtgctcaatcaggaatgcaaagcaataatttattttaagttgcttccatgtatcataatatttaattttgagattaagtgaaaaattatccaaaaaagtttgattcatcgactaagcttataaaagttagtttattagaaagcatttgtttttacaaataaattttcataatatattaaaatctcattagataagaagtgcttaagaagctggaaaacaaataacattttattaaacatttgaaagtggagaaaaagaatcaaataggctaactgttcttatagattttcacatatttgtagaaatgttactacttcaaactagaagaaaagaagcttttttatctatcaatttaatgaatatattaattgagcatcaaccatataggataccatgctagtgtctatggaaatgaaatgaaggctaaaatgagggcctttttctgaggatcattacaatattacctc

SEQ ID NO: 914966 - DNA, 4001 bp, Homo sapiens
gagtggcgggccagcattacttcctgagctctgcctcctgtcagatcagcagagtcatcagattcgcataggagcagaaccctattgtgaactgcatgtgtgagggacctaggttgcatgctcttttgagaatcttatgcctgatgatctgaggtggaacagtttcgtcccaaaaccatcacccctccagcctcctacttcccacgtccatgaaaaactgtcttctatgaaactggtgcttggctggtctagccttattccttaatagactggtcaggggtgactaattttttctgcaaaggaccaataattaatattctttgcttctaggctaacctctgccattgtggcacaaaagcaatcatagacaatctgtaaactaaggggcagggccaactgtagttttcctgaactgtggattagaaggggggtctcccaacacctcagatccattctggcctcagcatggctctccttctggaggtcacaaaacctctttagtttcagaatcacagtggcatgaggcagggtagggaaaattacatttgggaagaaggcacctaaagctaggtggcatggacaaaatacaattgaataaggatcccagtatcctgagttattttgaatttagttcatctaaaagtgggctaaagtcaaaagaagttcagttcaacatggttgtgctgggcatcagctgtgctgttcatctgcggggctgatatttaagtgtttaatgactggtatggccggggaactgaccagttaataaggatgagtggcagaaacaatcggtagggacatgccattgcacatgggtgcaaatcagctctacgatgcagacagccaagcggtacacaggtgcagcctggcagtcaggaaagcagccctgaggcggagctggtgatcacagatgtgctgtaatgttggcagactcttgaaagggaggcctgtgtgcaaaagcatttcctctatatatctttcactaatgttggaaattccatccgtagacatccatttctttaggttaaggatgccacccttcttttaaaaacaaaacacgcttggaagcatatatatatatatatatatatatatatatatatatatatatatatgtagaaatcattttgagtcaagcagtctttgtgaaatatttgaatatggatcatttctatcagaccctttccagcagtcatagaggagagatctcaaaagaggaaaatacacaaagtttaagtacataaacgttgtactttgtacttactacataaactttgttatgtactttgtacataaacttttacttcattggggaatatgctttagggagaaaaggccttcaaatgagaagtgggttggcacccaggaagaacttagtccactttaaattttgatcagggttaccttgaatataagagccatttaaaaagtggaaacacaggaaatctccttgttgtgaccgctaaagcttagcactaaattcacaacctgcctctagcgtgtggattatgcctcggtttttatttttctgcttctatttttcctcctacatcattcccgggaagtacttgtttgctccttttatattgcatggttttcacaagccacctggaattctttatgaagcaagatagctaggtagatatatcctcatgtatttattcagtcatgtaacatggtacacctaatatgcaccagacaccaatctaggtggacagaagatagcatcagttagacttcaatggacttatataaaatgattttaaaagaacaatagaatttttttcttattttctcactatgcccttttaggttttctagggcagaggagcaagaaggaattgggcaaaaattcacaaacctgtgcgaggcggtagttgttcctccaggtcctgggggaggctgcaactagggagggggctgcagtggaaaacttcaaagccatgatgaggaagacagcaaggccagatgcagggagcaccttcatcccctcacagtagcttggtaattatatcagcctgggggatggcagacagtgcacgtttgcacttcgaccttgagctccttttatagagtcaaacaggtctggaccctccgagcaaggatgattcatgtctcaaacagtaattatacagctcatttctctccctgatgatggggtaacacaactgtacacaggaatcagggaaagcttcatattttttttgttatttaccaagtggcaaaaggagaaaaacagtcacttttaatgaagttggtcagctagttacaaaaattgaagtaaacttgattgatttgaacccaactcaactgaaacatttgattagtcttcatttgggggcctttttccattctgattacagaaaagttagatgattacagtataattgaatttgtcctccaagtaatcccaaactccccatgcattcaacccaatcgcctgtatctcctgcattcacttcaaaatttcttagtagcaactgctgttcataatgatggctctgagacacataagatcctgaatcatcaaggcaagattacattatactgtgctgacttagggtggaaagtgaactggtaactgttagaaagcttttggatgaattaaggcaagagttacgtcttcgttaaccaaaacaatagccagaactccccaatctctgtgtactctggttaattggagtcatattgtttttcctgggtctgattaagatggatttggatccagagatgatacggtgaaatggtgtcatatggtgggaaaagcacttagagtcagacaaagcaagactaaatatttaaaaagatatttcctagctgtgtgatgttgggtatgtcatttaatctctgaatatcaagttttttttaatctacaaaagactgacaatactactactatgtataaacttttcagtgttatggagtaacacatatagcatgacatctgcaagcaccacttggcatccactagatgtggattcaaatcctaattttgattttagactaaattcaaggttattcctatagtgaatacagtgaattcctatagtctttctcactctgttgcattttgatatgctttctttgcatggaagagaagatggtggagttacagccaatgtttggtatctagtgtacaaccccaggcactgaacaagagtttgtcacacattaatatggtttggctctgtgtccctaaccaaatctcatctcgaattgtaatccccatgtgttgagggagggaggggattggatcatgggggtggttccgtcatgctgttctcatgacaatgagtgagttctcacaagatatgatggttttataggtgtttgaaagttcctccattgatcttctctctcctgctgccttgtcaagaaggtgcctgcttcccctttgccttgcaccatgattctaagtttcctgaggcctccccagccatgtaaaactgtgagtcaactaagcctctttcctttataaattacccagtctcgggtattcctttatagcagtgtgagaatggactaatacacacaggcaaacagaatttctggcatgtactgtgagatagacaaaacatgtgtctcagaagaagaaaaaagaaaaccacagattagattcattcaactaaattgtaagctgtttgaagactgtattctaaaaaatgttacttaatcaagtttgttaaaaaaaaagaatgaatgaatgtacaaacatatactaatcattgctttttggtttcaggaaaggaataggatattgcaataatttttcaaaatttgcatttatatggtctcctgtcttctagagccttatcttcaacagctgctaaaattgaagaacaaaaagaatctttgaaacttcccttcaactggtcatcctcttccctttttctctcctttaaacactgttccaattcattatgatggccccaaagcaaagacagacatggaagtgaacattggagtggaaggaatgacggtaagaaattctgggaccaata

SEQ ID NO: 914967 - DNA, 4001 bp, Homo sapiens
tccccaacagaaagagtaacctaggcagaaattaagttttcaaaattgtaccttagaaccatccacacactcacgcattaaaattaaaaagaaaagatttaacaaagggaaaggatagtggttatgctctctactttctaaagagatggttagaggaagctagaaaaggatctggtagtattaccttctctgagggagattttgggctttgagcgggctgccaatgaaagcagaagagagtagaggtacctccaggagagacctggtagaaagccctttgaggtcatcaccccacacattatcctctaggccttagtaacaagcacctgtaagttagagtgtgcttattccacttgcatcttcctggcgagatggaggtgtcggacccatcaggcaccccacagtggggctggtgtagcagagcatgcatctgcatgtcaagtaggtctgtcccattccgatggaattgttgcaggagctgtgtttgtgtctcctgggtaaggagtggcgactccttcttggtcaggaaaaattgatggaaatagccctgaatcagatcaagaaggatgagtactaagagtcaatagggaagacccatatatcagttaccctgggcatagccttctttgagggtctcagaaggacggtacttagtctggccttcctaagtctcctgttctcagtcagatgatggcagccatccctgattctttatgccacagtgaaatgatatgaatgagaagtgacagaataaaaataacatggataaactataacatttttttaaaagaaaaagcttccaagttttaggatggagaaacccaagtataaacgacaggaagatattacctgggaattccccggggaagatggcctctggtctttctgactgatggaggttttcttaatcaggatacaatcaatcactccaggacataaaatttggctggttctgcattccccatttcatttgcatttacttccatttcattaagttacttttaaagagcccgttgtttacctattccttgtctccactgatttttctgccagtctagtgtattaaatgtaaacttctaaatacaaaaaaagcacattgtattgtaattaggctttctctgtctgtatttgaatgctagctggactcaaaatactttaagggcaatgctcatgtctgatacagcttgatctattattccacagttcttatgagtacttgacgtaaacctattgactgttttttttaaattatatgactgcatttttatgcctttgttttattatcagctgagctgggcactaagaggcaaatgacttattgtattgttctggactaaacattagcaggaaatttgactaggttcctatacaattacaaaatacatgactgcaaccagttataacattttttaggtattttggatgcttaaaagtttggagcaaattcataatttttttagaaattgaaagtgtgtggtagaccgactgggagattactcagtcaatgtgaaggtcccattaatttatttgaatgatttcccttgatctctcactccagtatatagatcagagacctatatactggagtgttcactctatgccatatagaagactaagaaagtgagagatgagcaatggggctgaattaggcacagaaggcacagtgcctagggcccaaaaacacttttaggggctacaaaaaattaatttttttcttaaaattagaagagaaaaatgaacacatagatagaataaaatgttttcatgtgtaatattaatgtgtgtatttatcattataccatgcagtcacacatacacacacacacgaaataagagcccacaatggtcaccatgtaataatgtggtcctgagtcgttcacctacctcaacaaagtcccatcctttatggtctgcagcagggggcactggaacggcgaaacaccagggcaagaagatagtaactcttaagatgacgagctgcatgccaaaccctcatttgtcccactgcttgaattcaggtacacaacttgggccactggatctttatagctgtgccagcaacatccaatgactcactctgccagtttgccctttctttgaatctgtgagtggcgtcatcatccatacctgctgagggcagagtgaccagcatgcaagggtgacaaaagcagccatggaatttatttttaagctcagttcacacctgatggtcctcagcatcccgggccacaggcctggttaaggaaatacaggtcagtctcagaatatagggggcatcattttttaaaataggggggaaaacaagaaacaggaggtgtgtcgaaactcattacagctttatctatagaataattaccagtcagagacattcaatcttgctccagaagctaaaaagagaaaaaagaataaaatcaagggaaataaataatgtctgctgtaataaagatccagatcagagtatgaaaatctccaagacctggcctggcacgatggctcacgcctgtaatcccagcactttgggaggccgaggagggcagatcacaagtcaggagatcgagaccatcctggctaacacggtgaaaccccgtctctactaaaaacacacaaaattagccgggtgtggtggtgggcgcctgtagtcccagctactcgggaggctgaggcaggagaatggcgtgaacccgggaggcggagcttgcagtgagccgagatcgcgccactgcactccagcctgggcgacagagggagactccgtctcaaaaacaaaaaacaaaaaacaaaaaaaaaccacaaaaaacaaaacaaaaaaaatctccaagacctatgtaaaagagatctagaaaaacacagaaagaggtagttaatagctatatgttgaagaaaacaaagcattgataataagttgacacgcacacgtctatagatgtacatgtttatgtatatgtatagatacatatacatatatatctcacagcaaaatatttcagctattaccttagaaatcacacgactcggctgggtgcagtggctcacacctgtaatcccagcactttgggaggctgaggaggatggatcacctgaggtcaggagtttgagaccagcctgaccaacgtggtgaaactccatgtctactaaaaatacaaaaaagtagccgagcatgtggcacgtgcactccagcctgggcaacaagagcgaaactccatctaagaaagaaagaaagagagagagagagagggagagagagagagagagagagagagagggagagagagagagagagagagagagaaaggaaggaaggaaggaagtcacagaactctggaaatgagtcctaactctgctacttaaaagctgttcaactaggccaggcgcagtggctcactcctgtaatccctgcactttgggaggctgaggtgggcggatcacctgaggtcaggagttcaagaccagcccggccaacatagtgaaaccccgtctctactaaaaatacaaaaaaattagcccagcatggtgacaggcccctgtaatcccagctacttgggaggctgaggcaggagaatcacttgaacccagaaggcggaggttgcagtgagccgagatcatgccactgcactccagcctgggaaacagagtgagattctgtctcaaaaaaaaaaaaaaaaaaaaaaaaaaaaaaaaaaaaatcgactgggcatggtggtgctcacttgtcccagctactcaggaggctgaggtgggaggatcatttgagcctgggaggtcttggctgtagtgatccatgatcatgccactgcattctagccttgacaacagagtgagatcctatctccaagaaaaaataaaaaaataaaaataaaagaattaaaatggaagataatgaaagaatttgttaaaaatacacaattattgagggcttattataaggcaattctgtgttttaaacctttggtatagattaaaatatagtataaaaattttataggttaaaaaaaatgagactc

SEQ ID NO: 914968 - DNA, 4001 bp, Homo sapiens
ggtctcaaactcctgaactcaggtgatccgtctgcctcagcctcccaaagtgctgggattacaggcatgagccaccacacccagtccatatattaagaatcttacatgagaaccacaagaattgctcaggaaaagatttttctcgtttatgttgcctatcttgctaaattcatttttatctcaagtcctagcactcagtaagatgaaagaagaactatcagaaaggctgtagagtgatggtcaaggtgactgtctctgtctcagatcaaaggcatacctcatcctcttcctgccaatgagtcagcctgcccccttttccttgagatgtctgagggaaacaccctactttgctctgaggggctcatctgagatttggcaactctctctctcacacacacatgtctctgacataaactggttgtgttccagggtctccccattttctcttgggcacccttcattcatgctgtcaagtatctgcagtcagatgacagtatttgttgggagcttatatgatggtggcagaggctagagatgagagcatgtctgctggagccagtaagagctgtgtaacctcagccacggtaaataaacttttgtttcagtttctctgtatttaagatggtggtagcagcagagcctacagcacaggtttgttgggaagataccgtaaatggagcctaagatgtgctgtgcacacaggaagtgctcagtcaattgaatgaatattattctgttccttggaaattatctttatgttcctttggattaggcggaaataagctggcagaagcattacctgtaggtgaggttgtattttctccacccagggagggtgtagccatactggcccacatcaggcaccccacacctgggtgtcttcatgatctcaagggtgtttgagtccagttttccagtcactgtcaatccaaaaaatgcttgcatttcccgaattttgtcatctatgagactcctattcttgctttgaacaagatgattcccttctatttcaagagagtagaactggttgagatatgcctgaccaaaaagataagaaaaaaaaaaaagaggcacagactacaggagagcaaatctccatctcaggataaagcaaaattgcctaaaattccttctggcaataggaaaggggaaaaaaaagaagtaatgagagaaagtgaggagtgaaggaggaaagaagaaaggaaggacacaaagaggaaaataacgagtcaccctgctctttcaatttccaagacttggttgacttatgagtgaccagaattagccaaagcacgcagctcttaaacctccacagaagagaatgaagcttcgtctgtctgttgaatgatgacctatcttacatatttttgctgttactttcattttggtgtttctttgaaacaagttctaggataaataagtgattatccattttgcacatgtatttgctttaaccaaaaataaaaagttaactgaactgatttttagagggaatctgtaaagcaatgtattttttttcatacatatagggattagggctccaaattgtagattgggtcctcctggttgtcttgaaatgcttttatagtgatctccataccttgcagggctctctcctttctcctcgcactaaacatcccttcatttgtgaccattgctaaaagttatagcagatcctttccccctccctgtgccagccctcctccccaacacaatttcctgatatcgtcagagatagacaaatgaaaagcagttccttctcacaaaaaagttcaggactcttttgcaggaatgtgttttctttttaggtcccaagagaatcaataaaataagctttttatcaatagtcatcgatatcatttattaagacagtacctgagccagttgcatattttcttcattttccgtcatccggactaagggaaatgcagaagaaaatgttataaagaacaaaaacagaagcagaaggcgcttcattcctctctttcttcagctgaagccggttctgttagcacagaatttagaaaataatagtgagacgtggcatgaattggcttgtatcatcatttaattaataacagaaagggacacttgccataaagtgtgtcatgatttgcttttttttttttttttttttgactgagctgattttgtaatcttggcctgcaattgtttagtaaacacagttagtgcttattactgaattgaatatactgggaagtgagcctccaagttatttttttttccttgcaaagttttcttttgaaggcaatctcagaatatcttggtaggatgttatcataaaaagacaaatgaatcaggagtcagattacccttattaactaagataaacttcaaatgtttattgaattcctactgtttgcctgcccctgtgaatgcaatcttgttggagaattcagacacatacagaaattaatgtaggacaaaaaggaggcaagtgggcaaatacacagtgcagattgtaaagactaagaagggccaaaggcagatcattgcttatgagtgtggccttgaggttttatgcaagttaaatacagcctgcactggggcttgcactagggcttgctctgggttttggagaatgtgtagaatttggatttacagaggaaggaagaagaagtatgagtgcaaagaggccatgggaaggaggtaacacagcagaaataagctgcaggaaatctggcctgactggaacaaaatacatatgtagacagctatggaagatgggatggagggtctcatggacaagacagctgactgggaagatgaagagtcatagaggtcatggatgatgaaggccaaaattaacatcagaagtgagaatatagttagtgagagccttttggattaatttcaatatattcttctttacttgggctacttttagatgaaggaacagtcttagttacagcaatgtcctccctcacttgtcctccccttttcttctaccaattattaaaattttcttccctttcttcccaaatgttaactcctcaatcgatacacctttctaaatcttccttgtccatatcctaaacaaaatttatatggcatagctgaggaacttataggatctaagtagatacatacttcctttgcatttaaagctcatcccagttataaatcttgtttcagaaatattattatttactgttttaatatatgtatatagtttaaattgtttaattggcctctggagcaatgggatgaaggggagaaggcagacatgatcaggatttgtgttataatggtattaagtacaagtatgctaagtacaagtatgctcattgtattgttcttttgtgttttttaaactctaaaatatttcagaacaaaatttaaaaaaaaatagagttaccagaaaaagggaagtcaaatggtgctatcttgttgtaacgaaaaagcatctctctgccctaacctttcgctccttcaagtcctgctccccaaaggtaacttctttaaattatttttatagctttttatctttatgtttaactccacatttgtaaataacgtgcttatgctactatttctcgagttttcaaagttaaatgttattattaacatcttcctatggaaaagaaggacttaacactccttctgctttcctaatttggttataggaatgtttaagcccgtaatcagcgttcatacaattatgaccatgaaaatattattcacaagagaatcacgtagtatactatgattacatatccttttcttttttttccctttttttttgagacggactctcgctctgtcacccaggctggagtgcattggcacaatctcggctcactgcgacatttgcctcccgggttcaagcaattctcctgcctcagcctcccatgtagctgagactacaggcatgcaccaccatgcctggctaatttttgtatttttagtagagatggggtttcaccatgttgaccaggctggtcttgaactcctgacctcaggtgatccacccccctcag

SEQ ID NO: 914969 - DNA, 4001 bp, Homo sapiens
taaacagtttgaacgttgtatttgggagttagtcttttccttcagaacaagcccataaaaattcttttaacctaaaagtactaaaataatgcctcagccagaaaaaaaaaaaaaagagaatctcagtttctgaaatttaattcttatttctggtttgaagagtaaagaagtaaatggaggaaattacataagtaacatccagagcacattttaatgtagattcagtgcaatatactatcccttgaatgtttgtattttgatatgagaaatttttcttaataatggttacccctagatcacaaagatccagtcattaaagaaatacttaatgatatttcctatattgtgcttaccaatataggaaaactgttaaagcatctgaaaatattttcaataataattaaaacaaaaatatattctgctgatctctgatccactggaaaatccagaacatctcatttcttgagcattcttggttattaacagatttctacatataaaaaaattaatgccaaaatcattctgagagatgtgtaactaacctgttgtatcctttgtccattgttcatcatcatcaaagtgggcatctccattaatccctggcccaggggcataggcatgggccaaaacatttccaggtccatcaaaagggtaaaagtctccatgttctagtaggaaaaaaatttattggaaagatatgtaacaaggatcccttttgagccttttccagtacaacaacaccagatagatgaatggatacatttcatgtgttttttgttttgttttgttttgcttttttttttttttttttttttttacctctaactgcaaaagagatcattatatcagcctctccttcatacagcctggagaatgtgagtggagtcacctcttcccagactttcagagctttctcaacagcagaatcaacagcatcttttggcaaatctggtgtataattcacaatcctgtaggagaaaaattgaagcagatgctattttctcctatgatatagtttataaaattccaatcttatgtgaaaacccctctgaaccattacctgtatgtaaggtgggttttcctccacttcgggatgccaggaaaggttctgaagtgaccaacatcaggaactccacacctgggcttgcgcatcacctccagagtgtcggagtccagcttccccgtcacctccaatccaaggaacttctgcatttctcggatttttttaacaacaggaccactgtcctttctcctaacaaactgtttcacatcttttttgaggtcgtagtagttttctagatatttctaacagaataagtatagtttttaggtcactcttacaatttttactatagctatctatttatagtaagtttttgcagttgctcacttcttaatctatttggagtatttctctagcttgctgaaataatggcaaattttataatatgatactagcaacacaaatatttagctaaaattacgttgcattaaaaaaaaaactgaagctgttccaaagcaagatatggttcatccactctccacttgttactcatgtgccttaagccccagtgctgctactgctatggtgttgtgtgatcttaagaaaacacctaatatttctggcctttgtttcttcctacataagaggagaagcccaaatggtgtgataatgagaccttttccacttccaacactctataactctctattcttgaactgttcctacacagtaagctcaagcattctatgtgggttttaagacacacagaatggtttcagcttactctggaagctccccacctggccaggtcagttagtgttaattacctgaacaaggttcatgctggtgtcctcaccccttgcagctccatccaatggataggctgagcaaactgccacgcacagcaacagtaggattggaagactcttcatttccactggctttacttagctctatgttgtctctatgccttgctgtcttgcctgcctccttgtaggtccaacctcgggagcgcagcttttaaagagtgacagtgtttgtttggatcacccgcagcttgactcatccttgctttcatccaaatggcagcaggaccatttccaaacattccaaattcaaagtaggatgatacaacctactttactaatttctctcaaccttcccaattttgcaaggcaacacagtgattaatctccaggaagtgcttcctgtcttggtagaggagaaaactggagcattttttttcttctggaaaaattgactggaattcactagacaatttatgtttgtccttttgagagaagaagtaggttgacttggtaaaaatcagaattgtgcagaacttctaaaagcagttttattttaagaaacacattataaaagcaaataaaagatgtaagtggaaagtgtacatacatagctatagtctatactatatacaattatactcaaaacataaaagataatatctagaagaaatttagaaggggtgatttatttttctgaatctgatttgtaatgcctgctattgactgtcgttggatttgctggttcttgaggaggaaaacctcatgggcagaatagaacaaagagggtctgtgaaaaagaaggaagtatattccctttgggttggttttaattctgtaaccaatttattaatgggtgatgggcccacgtagctgctccataaatagttgtagaattgaaatgaattacattgcttaccggactgaaattctctctgtccttgtcttctacacatgtcttattctctttcaaccttttcccctcctccctaaattcaaattagcagatgctttgaagttgaagaacagaatccatcctaaattttctcttcatgctcttctgttttcttcctttcctttcttttctgtttctttgtcaagtaaagtgttgctcacattattggtgtataataaatgcttgaatgcaagactctaaacatattcagaggaagacattttgtaaaacttttatagtcctcttgccacctgccaccatccatctcctcaatgcttccctgatcaccacattttgtttgttctttctttctttgctgacttgcttatttgtttgctaaagggaagaacatcttgggagtaagaactcagtagaatgatggatacaaatgtgcatttattagacctttaataagtgcccattttgcttcctctcatttataactcttttgcattttcttctttgctttattttttgtgtgtttcttaataaacattggagagattttacccaataagtttaaagggatttctctgtggcaataagatccctatgactgaagatgcccacacagttgatagccacttggcagggggctatacatcacatttaagccttcatttttagactagattatgtctaaagactttttcaaattttatttaaaaaatagagacagaggtttcactatgttgcccaggctggtttcgagctctgggctcaagtgattctcctgcctcaacctctcaaagtgctaggattacagacatgggtcacggcacctggcctaaagacattttaaaactagtattctatggttctccattcctttgatggggggaaaaaccatgtcttgtcctgattgaaatacagggaaaatatttggccacattgatatgaggacaaggagaacagagtggtggcagtgatgtgaattccaggaagaaacagtggagcccaacagataaaatattgagaggttaaaagtgtagaagctgtggcagctctaattccttctatattaaggtttatcctttgtaaattttctctggagttataacttataaaacatatttaaagtttagaggaaagcctgatagataatatgtttgcttttccaactgttaagatgtgattggcaaaatgggccatgctgttcctgaactaaatacaaaagtttgctatattttaaaacagcttcgacgacttccctgaaagatgtttcccaagtcccagg

SEQ ID NO: 914970 - DNA, 4001 bp, Homo sapiens
ttctcagtatctgaatatgaggataggaatccagcagcacaaatacaacaacaacaaaagtgaatgaactaacaacaatagcaacctcacaggaacatttttaagcacttactagagccaggcacttacatatttattttatgtaaacctcataaccactctatgaaacaagtatggcattgttatccctattttatacatgaagaaacacagctcagagaagtgaaataaattgcacaagatcaccttgtgagtaactgaaggaaccagtatttgaactcaagtgttctgacttctatacattagaaacatgtgtagggttatatgatgcctgataatattgttgttaaaatgatttaaacattggctcactaatttgcagtttatttggagtagatggtaatggttacctgtcttaggaccgcccaggaatatgcaatttatgtaagaaatcttattaatattgtgtctttttttcctgttaccaacaattgtctcattaaatacaacaaatacttattgttcatccatgacaattgataactgatcctttatttaaaaacaaataacccatttaatcccttctagagctacagactttaccaagacaccctctggaagaaatctctctgctttgttgagatgacttttcctgtttttttgttaaacctagctaacatccctccaagtgaagactaagtttctgccaaccttcactctaagtaaagaaactaaacgcagagtactctttctggagaattcattaggtggaaccatataaaactactgttttggagattttaaaagttaaatactagtaactttatgtggttcaatctaacttattataactggaactttttaaaagtctaagttaatgtgaattaaaaattgacttttcttatgcttaaggcctaaatttacaaataatagttataagtaatcatcccattagttaaccaaataataattagtagactgcttatatttattagactgcttattaagaagcatattgcaaggaacatgatttttgaaccagaagcacttgtccttgatttctatctctaccactaataagtacactaatcagtttaactttggtttcctctttttatagaactaaggattaaatgacacaatgtctatataagtactttataatctacaattgttacatacatgctagttggttttgttatcacctcatttacttactagaataccccatgaggtataaaacacataatattattttttctactggacacatgagaaaacaaagtcagatgttaatgccttgtctattgtcattgacttgttggagagttgtaatttctacccatgttttctgacttcagatatctccattacaaacagtattgtaaatacacaaacagtatatttacaggttgtatcttaagaggcaatattctgtatactatagaaaaagaatctcaagttataataaataaaaataagaacttaatttaaacaatgtttcaggtattgtgttgaatgcttcacaacaccctcatttggttgataccattcttatctccaacttccaaattggaaacctgaagcttagagaagtttgatgaccttcctgagtctatctacatagtgagtggagggttggaactcaagcccgatttgagcagattctgaaacctgcttttaatggctacttgatgaaaacatatattgcttttataatccgaagaaccaccccaaagaaaattccactgcaatgctaacatgggaagggaaataattgaaaaacacatttcttaatgcagatggcaaaagaatggaaccctaagtaagtgggctgtgacatacctgagcctgttcccactgtagctcactcatgcctcccgcctcctgaggcagcggcagggccaggctgccaggcagcaggcacacagcacacagcacggtgagtcgcatagctgccgtccagagacaattgttcttggacctatggttgatttggtgttttctgctagtgactgcagaaatttatatagcttctcagcctcgaatgtggaaataggtgactcatttgagtgttttctttctttttagagtctacagaactttgaaagtatgtgttatttttcattaactaaaacgaggaagtattacatcgttattggcaggaagcacacaatgtatttgtctttcaaaggatttttttttctgtctgctgcataaattgactccatgagaaacctcatttttttgccaaagtcaaatgactgctctcataggtatcattcaggacattatggtaccatatattcttaaagaataatatatattcttaaatatatattcttattatatggtaccatgtattcttaaatacatggtaccatatattcttaacaattaaaaggtttggaaaagtgcacaaaacatgtaaataatgaaataataattaagcaaatactgtaaccgtcaccaaagtcaagaaatagaacatcaccaaaatcctgtggttctccatacaggggaaagatggcaggaggcagatggaaatgctgctgtgtggctggattagtggccactctatatacaactgtgctgtgtcccctcaccttccacgtcccttagcagagcagtgataattcccttctttgggtctccttttaatcagtttatgtcttttcttaatggggaacactgcctctaattcttcttgaattaaacacaaaaaaataccaagccaacaaaaatctacaagcacgggtttaactcttcatctggcttacttattctgcttctcattttatagtaacagattcttccaaggctagaccttcaacttggagatccaatttttttcttccaatcactctgactctggctgctgcccagctacaggtagggctgcattggtccttagtacacaaaatggttattctacgtatagcagtaagaatccattacctacagattctagcccaatgactccattcttaccaaaaatgaaagtgaggccaagatgataatttaacttattatacttctcccagctcacacagatagtagctcagtgctttttctatcccactgcactgcctattcattttgtaataggtctgtctcttttattatattatacattacttgggagaacaccatggcttttgactctaatacatcatgggaaacactccaaatatgctggagctaaaaaatttaattaatcacatatcacttcaattacatggtaattgagcactgtgagccagcaaaggtaaaattttcagatcagttaattaaatttgctctctttacagagatgtcttgattctgtacggtcacagtttaactagagtaattggtatccttagtcagagtttgacatgtgataaggtgcaccataaatatttgtagaataatgaatatttatgaactttacttgaataagctaaaaatggaattatatcacgtttttggtaatatttgcattgaattaaaatcaaaaggcatttcctcaagtgaatgagcacacaagccacaaattgggtgaaaatgaatgcaaagacacatccatggccaggcgcggtggctcacgcctgtaatcctaggactttggaaagctgaggccagtggattgcctgaggtcaggagtttgagacaagcctgggaaacatggcaaaaccctgtttctaataaaaatacaacaattagccaaacatggtgatgcgtgcctgtagtcctagctactcaggaggctgaggcacgagaactgcttgaacctcagaggcagaggttgcagtgagctgagatcactccactgcactccagcctgggtgacagagggagactctctctctctctcaaaaaaaaaaaaaaaaaaaaaaagacatatccaataaaggactgttatccaaaatatacaagtatcttttaaaactcaacaataaaaacacaaacaatctgattttaaagatgggccaaaaaccttaacagtcatcttaccaaaa

SEQ ID NO: 914971 - DNA, 4001 bp, Homo sapiens
ctgtcttcttgtttttacaaaaaaattaggactaacattaattgacttctcttgaggtatttgttgcatcagtgcagttcctcttttttatcctcttcactactgtagaaaaggcttatttattctgctgaacaaacagaagcacagagaattaaggaattttccaagtgatgattcagattttaactcaccatgttgcctctcaaatgagaactgataatttcaaaataatttcaaatatcttttaggggaacagcaatatcattgatattagcattttattcaccaaagtaactctttggaagtgttaaatttagtcaaaatccaaagagtttagcctaaaaattacctattttaagtttggcttaaaagtttcttcatacacagtgaaatgtaacctaactagacctcatgctgcctgtgaacacctggcaccttgtcagtgtcttagtccattttctgttgctataacagaatatctgaagctgggtaacttatacataaaaggggctgattttctctcacaattctggaggctgggaagtccaagatcaggtggctgcatctggttggcttctgagatggccttgtgctgtgtcataacatggcagagaaacaaaaggggagcaagcatgtgtgaaaaggggcaaaacacaaagggcagcccctctttataatacccattctattaattactaatccagttctgcaagagccagaacccactccagcaaaaattaatccagtcacacaagagtgtcattaatctttcttaatgacctaagtacttcttaaaggacccactgtcacatgggctactaaatctttaacacataaattcaagggacacactctaaccacagcagtaggtgacactgaccagatcacacgctttggaatcagacaggcctgggttcaaatcttaactctgccatgaattaactgtgagcacttggccacattatttatctgatttaagatatttttgtctctgaaatgaaaataataatgctccaataaggttcttgtgaggattaaatgagatatttgtgaaatgtgtagcagttgccttgcatagaataagcactcaatggactttacattaacccgggggttacaattaagagataacctcttaataataataatgctttctccaaactataatgctaagaaaactgtgcatgagagatttgtgacagaattcccttgtgtttcttaaaaatttgggttcactttcagactgtgaaacaatggaaaaaaactattggttctgcttttataatgcttccaagagtttataaacagtccacaatctgatgctgggaaatatgattttactgtgtactgatttctagttcattgtaatctaccatcctcacattattttctatatctggaatttttggcggcaaagaaaatgcctgtatggaagcaccagacatatagtaacttgattgcagatatcctggaaggaaaaaccttaggtaaatgagaaagaaaatgataccattttataaataaaaccatttcttctacaaaagtttcccaactaggggtaactctacagcagtattttcccagcctttaaagaattcagcttgttttcatgtccggcttttaaaaggcctagtccttaccagcttggaaccctccaaatcactaaaaggagatgttcaatctcaaactaatcacccaaataatttctttcaggctgttttaattaacaagagaaaacaacccacactatttcctaataatcagcaaatcaaacatcacctaactgatagttcatttacctgaacagtttttgtatttttctctttagaagatacaggaaaggccttggaaatctgcacatggagtaagagcagaaatggaagcgtcttcagggagaacatgatcttctcttcaaactctacccctcctggctttctttctgtccctctgggtagggcccttccctggcgagcaccctgacgttcacagcatcatgtgtcactcacagctctcttgcagtcctctttaaagccatgtcttaaacaattgctgcatcaggaatatgaagcaacataggttaattacactctgacagttttgcaattttataatgtgatttagtacccccaaatgggggagtctttcaacagtctttcaaaactccaactttctactctttgcttttggatgttttagttatttccttttacaaaattggttgaggaaaaggaacaagggactaatcctgaagttatgtggatacattttttgactatgtaagatgttgaggttgaattaacttatgcaggggaatattttgaggtttgtggtagatatcttgggaccaaggagcccaactagagaatctctgtacttaccctccctcattgtatgtggagagaatgagtgactgtgttattacaaagcaggctttgtatggggcctagagctgcttctggaggatgtggtttggtatcaacatattagaaaatccctagtctataagttagactttccatggaaaagataaagagaacaatactgatgatgataataatgaacatttgctaaaaaattatgattgcccagacatttgtactgtgttccacatattaccccaatccatcttcacatagccttgggagggagatgctattactatctccattttacagatgaaatcaaatccagagacatttagatgacctgtttaagtcacatgtttcatttgtggaggggccaggattcaaccccagagggtatgtttagagagactgagctgggagctactataagctctgcatggtagtctcccacttgagtctctggctgggccatagtggagcagcagctctaggccttcaacagctggatactttggcttatattcacaggcagaagacaagggagagggagaatgagatgttgtacatcttcaaggagtaagacactgagagatttccagacaatatggctacataggagactgtttgtcagaggcccctgggcatgcttttcaaatcatgtaacctggtcccacttattctgagtccacatgcatgtagtttgttatcatacacagtctttgtgaatactcatttacatatatgcatacatatttggtaaaggcaggtattcttgtgtataaatgcatgtgtctacatgtatgatacatagcatgtattaatatgtaaagagtgtatttgagatgctatgataaggagttctgatctttcctgaggtcacttaggaactttgaaaatgatccaaagaaaggtgtcttgggttagaacatatctggacagcagattaatgttaatgatgtatattcctacattcattcagtaaacatttcctgtcatctactacatgccacatgctgtgatgggtgctagagtattggagataaattaatagaggtttggataaaatgctgtgggtgtttggaggaaacagcagtggtgtggagggagtgaaatcaaggaaggtttcatgagggaggtggaatttgaaccggatcatgaagaggtagaatgtagacatgcagagatgtagcaacccattctttgtattaatataaatgtgacagcttcctgccaaattgttcaaagatcacggtcatgttcatcctccttgagttcatggcttaatgtggctttctttacattaggtctttggtgaaaaaatgctttttcctccacgaaaatgccttaacattggtctaactctatgttgagttattttgatgcaatggcttgcttacaaggtttataaatgtactttcttctgaacataacagcaagtgatttagttgagaatctaaaacttcggtaaacttagtttttggtgtttgggtaaatgctatgttaaaaaattgaacggttgggtctggattcccccaacaggcccagccctggtgcagtggtggagaaggctatactgcatttgctttcagggctccagcttgtgccttctgaatcctttctccacacctgaccact

SEQ ID NO: 914972 - DNA, 4001 bp, Homo sapiens
gctgaggggtgggaaggcctccggagcccctgtccatctctcagcacagcctgcactgcccacaggcttcagccagctggaagctgtggagtgtggcttcttttcttctgagtttaattgtctgcccccccaaacaggtcagcagccccagacaaagcgagcttttaccagcctactgtgccctctgcagaggcccattgagaaggaaaaagccaagatggcacaaggaacgcccgcagacatcccagaccaaacgtccaaacaggcaggtgctgctgctgtcctagaacctcagccccacgtggccaccatgctccactgcgcctcggcccctccatgcatccagctcccagccaaggtggcttcctcatcgcttcctttgaaaccttcctgagccccagggaagggactccgcccgtcttccttagggcctggctgggctccaggcctgcctctgtgtctcctgtggagctgccttcggcatttggcctcagacacacaagcacacactggcacaggcacacacacacacacgccagtcccctcacaccactgatgtcaggcaccattcctgatttgaactcacgagtactgccaacttgcccacacatttccaaaacctcacagtttcaccttaagataggacatcctaggcagggtcaccggccggcactcttgtgtctacttgtggagccctccctgttgaatgcacaggtgatcgggagatagggaaggagcctatgaagagaaagatggagccgggtgcccagggacaggcagaggcacggagatgcacacgggtgccgcagcccccggcccttggagggcacgtccagcaggccacgctcgcctcacacccccaccaggcaaccccacccgggaggacacactcactgctgcagctggctgtgcctgccccactcccccggcccctcatgcccacacacgggtgcacactcccacacacacgggtgcacgctcccacacacttgggcgcacactcccacacacgcccctgcacacaccgagctgagtggtgtgggcagggaggcacccccgcagcaggtcagagaaagtacaggtgagaaaaatgtcaaaaatggattttccggcaacatccctatggcagccagcacaaaaataggcacccgggaaccccatgccacttctctggacaaggccacacaaggacagactccgggtcacctctgcctgggtggctgaagcccctgcccagggcacaaacagccgcacgctgggacaaagacaggcacacctgctggcggctgaggaaccacaccctgtgggttgcgggaggacaaggcaggctcctgtgccggcaaggtggggtcaaccccgaaggtcgaggacaccaagacccgctcctctcccacagagcaacaggaagtgcaggcggctaaggaaagccccactgggcagggctccagagcaaacccgccaggctggcccgggactgcacagccgcctctgccctggacagcttgcgtgtggcccagcacagctcgctgcacagccgccggccacactgggagggcagccacggacacagtccgccgcctccccaccctgacctccttcctgggggcaagaacagggcagacagatgtgctacacacccctcccccagccaggctggcaggtgttacctgagcactttgctgacagcctgaagcaccattttgcagcagagtccactttgcagggactggccgggccgggcttggtcttcagggagactgcagtggtctcccagcatgagtgggcgacgggaaggtggggaggagaagcggggcggggtgccggctggccagcactcgcaaatgcctgctgccgggccctccagcctcactccctggccaatgggacgcctggcagagacaaacagctgccccctttccagaggcaagggctggccaaggctggtgaaacgagggagcgtctgaattggccttttccaagtggcatggctgccagaagaggcggtgggggtgggaccagaagggaggggacagggccgtccttggcctgcaagaagggtccatcagaaaggtcctgggctccacctcaggctgccagaagaggcggtgggggtgggaccagaagggaggggacagggccgtccttggcctgcaagaaggatccatcagaaaggtcctgggctccacctcaggctgccagaagaggcggtgggggtgggaccagaagggaggggacagggccgtccttggcctgcaagaaggatccatcagaaaggtcctgggctccacctcaaggtcctctgctgccaagcccccaggaaaggccttctgaacacaggcagcaactctgctgacgagctccaggtcgatggcactcccctctcccttgtccggcccagcctagcccagtcagtgctcgggccagggacggacagacggacagacagatgggccgccctgccctgcagtgtgtacgcagctggaggcactcaaagtggctttcctgctggatggccctggagagagaaggggccgaccagcttctgcggtgcctggacggtgctgggctgaggctgctgccagccaggaccacagggcacccagcccaacagaaatgcccacagcagctccccatgggggcgcacagagcggcacggccccggccttccttctggctggtctgcacacaggagaccaccacatcctgaaaatgcaaacacctgagagggcaatgctctctcctcatcctgagtcagcgtggaccccactggcagtgacagccccctgacaacacggggtcatcaggagcatcccccacccgcatgggagccatacttcctgtgcttcctgccaatcaagagaccccagcatctccagccactgcccctcagaagctgtcccagcacctctgtcggtgtgaagccctgtaggagtcaggacacagcctgaggtaccagctgctgcggggagcacagagccatcaggaaagcagccagggtaggctcacccccatcaataccagcccccatgggagttgtggtgtctggactgcacgcacacacacagcctgggcgcacggggagacagcacaccaacccagcacagacacactctccaggagccacagcagaggatggccccaggccggcccccgcctccctaagcagcagcagcagcaggcccaacaggctgcagtttcattttccccactaggccagtccctaagccatgctctgagcagtgcgtaactggtctctacagaacaaacagcccggtgaggctcaggacgtccatgcgcccacaggccttcctctgccttggcaaggccatcccacagccctgtggtgccacacgcacctaggcaccgtgctcacggctgccggtctgccctcgggggctccaccaacagcagggacacaggtgctggcaggtcacccaagtggcaaagggagccacaggaagagcgggctccaggcctggggaggcccccgtgagtagcagggctgggaccaggaggtgcatgacgcagacctgcccactctcgggaggcatggcctggacagagaaggccgtgcagaggcccatgacagggagaatgagctgctgggggttggagggcagagcataaaggaagctggggatggtggaggcttcgggcacaagaagccaggcaaccaggcaaggcaatggtgagggtggcacgggggcgggggaacagtcaggacaaggtgccgggtagggtggggggagcacaccaagcgtgcctagtctggtccaggcaaggcagtggtgagggtggcacgggggcgggggaacagtcaagacaaggtgcccggtagggtgggggagcacaccaagtgtgcccagtgggtctggtcagcacacggcagctctgtggcttatgccactgtcccgagagggctgggctggcgccagaggaacgtccacattcatctgtgtttgttcactgggggacacgtgcagggagcaggtattcctatt

SEQ ID NO: 914973 - DNA, 4001 bp, Homo sapiens
gggtggcaagtggccctgaggccctctgagaagtctccatgtttctcttagtttgagtggatttctgtcccttggtttgaaaggattcctggaaaggcattacatgcaattaattcacacacatctactaccaccatgatgccagctccagatgagaaggaccaagaggcaaatctgggtggcctaggccctccaaggggacataggtctgcccaacaccacatcctacactcctccaaggaccccttttccaaaccaacccagtaccacagaacatgcaggagcagagcctctgggaagggtgccaggccccgtctgcccaggagcagaggcgctgagccagcacttggccacaggtggctccagagccacagtggacacaaggctctcgagtagctctcgggtgctgccctgccacctcaggacccatctccatgcctgatccatggaggccaccgccgtctcacattgagcttgctcccctcaaagccataagcactgtccccatcttcctgggccatgcctggctgtgacacctcattttcctggggaattaagacagtgaagccagctgttgtctgtacctgccccggtgtcacccataaccaaaccaagctgtgacccatcatggccatgagggcagggcccagcaggactgaagccaaggggacgcctgccagctgcctgtgcagaagctccccttggcttcttgaaggcagaactcagctttgtctggggaccacgtctccctgtgccagggccaggaaagccatgtctgtgggcaggatgactttcaggacgcactcacaggcacacattctgtccctgacctgtgtgcactgacaacaacgggacatcagggaaaagcttccgccctcctcagccgcacatgtcccaggctaagcccagcagacccagcctcctcctgcctgcagcctccaaggctgctttcagcaacccaggcctggcggcgctccttcccatgctacgcaagtgaggtgctcagggccactaacggacacccatttactgaggaaatcagggtgcagtgcttccaggagagagctaccagcaccaggcatgttggatggtcacggagaaggtaactgagcccccatgaaatgaatggccgagcaaggacctgtggcctgcccagcccagccctcactgtcccatccagagctgtcacgggagccagcggagaagggctctctgcaatcttagggcattccttctggaaacgtctctgtccctagaaacatagcccatcaacccccaccagctcctgcaccttctgggccccactggggacctgggtagctgggccactggcccagcctgtggcctttccacaggaaggtggatgttgtggaaggcctgtgccaagacttctcagggtctccaggtgagaacggaatctgagaggacaggagcctggggcagcgggggctcagagccccaccgagtctcccaagagaaagtgggctgtagccaggcagcactcacgtgttgcacacggccatcgtctgacacgtctctcctgtgcagaactcggagatggtgctatactgcaggttgatgtggtggaaaaacgtcgtggctggaagagaagagaaggagccagatgtgaaaaacgccagagctgagccgccccgtccacccctgcttccagcaacaggtgcaggagctcggctgggtgagctctgcccgtccacgggccacattctcccctcgcggcagggggctgctgagcaccagccgtgggggtcccccttgaggaggggcttcgaggaggagcagggaggagggagggggcccgcccccaggcccccgcgcactgttgctggccagccactcgttaaggtcaatctcgcggggcagcaccaccagctccttgaactggaagtcggtgatcctggccttggtgtgctcaggctccaggtaggccttcctctcctccgcagcgggcttcttgccattaggcttggctttggacttcctgccaagagaggagacgcggtgtggtcactacacgcccatcagacccagggtctgcccggggggtcagttgtggccagcgcaggtgtagagggagctgcccgagcccatcggggcgacactgcctccctgccaggctcaaaggacaccaacgggacaccaacggtgaggctgctccgcagaggggccagtggagctgccttgcgtggcacctcctgggaagaagggctggcgctcccacttgccacacgggcccctgcacggagggcatcctcacccctcaccaagtcctccaaccagggaggggcccagggtttagggcccccagcgcccaccttccagttttccagtgctcttggaaggaaaggagaagcaaaccctctcactcctggcttcttttgagttggccagcctgtccctgcccctgccgctggtggccccggtgaaaacataccacaggccttgtgcagggcacctgccttcctggccagcctgagagcacggggcccctggcatcaggcggcagcctggcctgcagctccagtatccctgttgtccaccaggcctggggaggccacagggtgatgaggatgggggccaaaggtctttgtggcaacctgaccctgtccttattttttttctttcttgttttgaaaagttgctaatggtttatttaagagaaagagaaaggaaaaatgctccctgaatgccagggaaatgtttccctttcagcttctcacagcagatcttcgccttaaaaggagaccagcgcaggcctctgggggcagtgctgggagtagccagagccaggcagggagcaggggcaggagcaggggcaggggcaggggcaggggcagggaggggcaggggcaggggcagggaggggcaggggcagggcccctgggccctggcactcccactctgccatctctccagagcacagggcgtggggtctgaggaagaggaagcacaggtgtggatgggccacatgcagcgtgggcacttggggtcctcacagtacaggggtgggacagacagggtgagcttccgtgtagcctgcagcccctcgccccagcacagcgaggcacccagactccacaccagcctgtgccaggccatgcccagcgtgtccaccacagggaaggctctccccatgacgctgggcctggccctgaccaccggcaggtgggcctgcacctccctgccctgtgctctcacagcacagcacaccacaccccacccgggcagctacagcctgggctcggccttcccatttggaggggtgggttgcagtggcccaggctgccaagcgggctacaagccgtctccctgctctgtgtcttaggagctgtgtcaactggcaagctccaggtggcagttacctggtggtcggtcacgcagggctgccagcaggagcagctgtcagcgcgctcactctcagggtgtgccccagggcccactcagggaggctgccctactggcagttcctgcccccttgccagccttccaggctggggctaccttccacctccggtcctcagagagggctgggcaggggcagaacctggagacctggcttccctctcccaggctctggctgtggtcaggaggtagtgagcagccgccactccggcactggcacctcagcctccctgcctcttcccgtccacacctgctctcctagaacacagaagaaaagtacgcacgaggccctccaggctgggcctccccgagctgctcccccagtctcaccctgtccccagcacccagggctggccgggccccggagcttagtgcactgtgagacaagcctcctgcaagcctaccttctttggaccgggtcactcattcccatggggcaggtggacgggcactggcccaaaggtagtaggaccaaggggacgcgcaggacatggcctctgctccaggaacggctgtgcgggcaccaacagagggacttccatgggaaagccccgaacgcctggcagcacccacgtctccct

SEQ ID NO: 914974 - DNA, 4001 bp, Homo sapiens
gtcctgtccaatcctcgggcccaggaggaagacagcagcttccggggcattcaaagaggagacaaagtccctgagagggactacggccagcccagtgtcactgggagcacgcgttgagcctaggtaggcctaactccaaagctcactttctcccactgcaccaggccgcctaattcactccatcccctgcctgtcctccttctccccaggagagttgtttgtactcattaagtgctcaatcaatggggacaactggttggataaactgttctagtttccatcttttgggatctcagagcaaagggagaccctttcctgctctctttctgttcatcctctgccccattttcccagagataaatccagccaggtgcctccccttattcaagcccttcatgacttccccataactttgggcacagtccaagtagctcagcctggcctccaggagccccagagctggccctgtccctcccgctcctgcctcttgtctgtggccactctgaactacacagtgttcccaaacctgctgagctctgattcctttgccttcagtgaccagtgacgtttgttgttgaaaggagggagggaggaagaggccagcccctggccgccccataatcaggggtgcatcagggctaagaccaggcctagtgtggaattcccctctgactgatggtttctcagcccttactggaggcaaatccttgattgtttggctcatctgtgcaaagggggtatacaggaatgtgtaaaatgtctaaaaacccttagaacagagacacagctcaaccagaagggatgctagggcagggtcctggagggcctgctttgccaagggggagttttttcactacagaattgtgggggagtttctgaggaagtacgtgtgtgtgtgtgtgtgtgtgagagagagagagagaaagagagatggctactgagcaatgtgttcagagtgtgtcaatattttaacaaccaggagagtggtatctgtgtacaggctgaacctcagccctggaagcagcagttcctaccttgtctggtgccagcagatgaaaggaaaaaccccacggactcctagtcattctcccttcccaagccacagatccagaccctcctagaaaatgttacctttggcagagctattgtttgggcaagggtgatctctctggccacaaatcagtggtggggtgggtaaggggccatgctcatgccctccagtgtgagcccagcccagggtccaggccaggtctgtgccaagcagaggtcagcacatttcttcatttccttcacaatagccctgcaaggccagcattgttgtccccgttctgcagatggtgaagtcgaggcttggagaggtcaggcatgggctggctaaagtcagttgcccagctgagtctgactccgggtttcctggtacccagcatgcccactccacagtccactctcagtctgcaccttctccccacccttcttttctttccctgtttctctcacttaccctactaccagccccagtttcctcctccctgagcgcacagaaggaaatctctcctctctgagcaggctgcagagcccagaactttcccgtcatcgcccagaggctttcccacaccacttggcagcctgcagactggtcttcatccaagtgccaaaggagaacccacagtgcaagccaggaagagtaagtaacctgcccagagcagcagacggtgacttctaccccactccacccccaagaagcctctgggcaggcccaggagttctctctgggcaggggctctgagcgcaacaaagccccctttaggataaatgtcttgccaccatcaatgtgctgtgtgcacctggtgtggctgctctgccccacctgagtgcggtggtctcccgtcttacagtgcagcccaacttacccagtgccaagaaggagaagacaaactgtaggacagcaagtgtctgcagcctgcgctcccacggcataaacaagggcgcgaactctaccatgctggcgggtcagcctggctcccgcaggttctgtgagctctgctgtggtctgaggcacccacaggtttttgttccctccccaggttgtagaagctggcagggagagtgccacacccagcccagcccagcccagccccaaggcctccttgcccctgctgaggcaggaaattctatcctacaagaaacctttgaatctacctgctggagcctggctaaggaaggaggaagagaaggggttgtatagcctttatcaactttctcaggcaatgccttatctgcatggctgcctttccccaattgcttaaatcttgtccttcctataactaggcaggtgaagccccaagcatatgcaatctcacccccttcccacctattcaatgacctggccccaaggtcaatggataggataaccttgtcctgtccattgttccccctccacacatatgctgtactaactcccacctaaaaatccccacccacactgtgtcctccacctcctgccccatttttctgctcactcacacagcaaactctcggaagagctatctttcatgccttcctgtcctcacctcccatctgtggtaccacaaatggtggtccacacttcaggtatcacccttccacaaaactgcccttggcaagttccctagtgacctccatgatgttaaatccagtaatcaattctcagatctcatcctgacctattggcagcattagatatggttgatcattcccgtttctttgaaaccacttggcctttggacactatgctctcccagttttcttcctagctctctggctgctccctttgtgcctctcgtctttcaccaggccagctgttcgagtccccctcctccactccatcctcgggacttctcttttctctccagtttctgctctctgagatctcatccaggctcacaccttgcattgtatttacacagcaaagacttccaaatctgcatctgcagctctgctccctggggctctaaacttgaatctctaggtggctccttgacatcttcacttgaatgcctgataggcacctccatcgtagcatgtctaaaggtgaacttgattccctcccccacctcccttctgccccactgactcctcctctgctctttcccatctcagtaaagggtaatgccatttacccagttgctcaggccaaaacctgagtcacactagatcccttctgttcttctccatccacctctaccagtcaccatgtcctatcagttcttctaagtccctccttttaaatgtcaacttcaaattgacgtataccatacatacggaaaaatgcacaaatcctaagcggacagagaaatgtcttttcacaaagtgaaagttatcaccactctgatcgacaaacagaacttacctagcaccccttctggccttgccagtcactgctctcctccctgtagctcagcaccatcctcatctctgttcttgaactttatgaaaactgaatcatttagtgtatactcttttgagacatcatatgtgcctgtattgcctttgttttcattgctgtatagcattccattgtgtgaatatgccacaaagtgtccatttggacgctgacaggcatttgggctgtcacctgtttctggctattatgaatattgctgctacgaacattcctgtacatgtctttcagtacacatctatacacatttctgttgggtatgtgcctggaaatagaattgatgggtctcatggtagatagccatagagttttccaaagtggttgtacaaatctacactcccatagccttatataagaattccgagttctgaattttggtgggtgtgtagtggtccttcattgtggttatagcattttcctaacaactaataaatataagcacattttaatatgcttactgaccatttggatatcattttctatgaccttcttgttctagtgttttgttgatttcagtctcttgaactgaacagctgctgtctacctccacagccagcctctt

SEQ ID NO: 914975 - DNA, 4001 bp, Homo sapiens
gaattggtcactatgacagtattggtggcagcctgactcatgaggggtggccgggtgaaaggtgggagcctggcagggggcagggaccctcctgtgaagagcccggatttgacgcaataggacacttggcatccatcgctgatgagggctgggtgctggctgaagcccccggggcactttttcagagacggtgcccctaaatctctggatatagcaggatctaccagggggttcccaactgtgcagctaaagaacccgccaaaggggaccgcaaacctgcttcccaactcatagtcctgagaaacacataccttgaggttttcaaagagtctcagtggaaagtagccggctgggcatgactgtgcatttgtcatggggtttatgctcttgctgctgaagaggcccccaaaaagcagtcctgagttttcaggtacttggctgctggccacacaccaaaaagccctaaattcagcttttgccacctggaacacatcttcacacacggtcttgcagaagacgaggagagtgcactttcgatgacactccaggtggttgtaaccctcctcgtggatctgggataacaggtgcaccggggagtagccagaggggcaggagaaatcaccagtgagtggattcttctgctccaacttttggcagaggaggacatccctattccctgagagctgagtgcattcctgataaaccccaccgaaagagaagttggtcattttcccctcgcaggagccatcatccgtgttggcctgaaaattgaagttgggagaattgagatctgtgcagccagggtaggtgttgaatgtataatagcgcttcacagcagtttccactgtctttgacaccttcttcaccagggggcctggcaagtcaggtagcatgttggggttgatgaagaaatgcagcggcaggccagagcggtcgatggccaccaggtggttggtgataccctgctgccaggcctggagggtgatgcctgggtaaaaaggaacccctccaatgctctgcaccctggagttggttcggtttgagaggtagctcttggtgaggacattctgcgaggtatagttttcctcaaatttgaagttcacggtgttttgaaaggcaagtccagcagaggcggtcacggcactacgactgctctggctgtcttggaggaaggaggccctgaggtggtcctcctgaataagagcagccccagcgtcgacactggtggtgacgtgggtgccatagttgagcaccaggagttctgccaggtaggtggccatcctcgtctggttgttctctagacggtcagagatgtcaaggagttccttcctaaaacctgagcttagctctaaagttgggttgattttgactgtgtagacgaggtttcttacctgaactcgggtagttatagcttggtccttcacttggagggtcttcatcctctggaactcagtggaaaacttgccattgactttggaaaaaagagagagttctgtgttgatggagtaggaggtgctactctggtaatttgcccaggattccaggatttctgagttcatctccaggttgctctgtttctggggaatggtgaagatttcatcagggatgatatactgtccatcctctgttgtcctgcagttggagtaagtcaattccataactcgtcccatgtccacattccgcagattgtcccagccccctccaggtaggacttccaggacaggtagtttcaaggcattcttgcatttttgaactccaacttcgtccatctctcccgaaggcttgcctgatttagcccatgctgccgctgcccagaagaggatggtggccctgaagttgttcatggctcagacagccccagccactcaccagccctacacagcggccagcaagctttgggcaaactaagatggagaaaacagaagcagatgatgaagcggaaaactcatgagttctctaaaagctacaagttcctctttaagctaatttaatgacaaaatggggaaacgagagttggttggaatattaaagaccatcaggtctttgaagaatttatgccgtactaaacatgcaaacacacccctacatgcctaacaggtagctatcctaatttttcccccagctctggctggttactctgctgcaggggtgtgcacttagaaaaaaatcccgaccccacaccctactgcttcctccaccagaaagtttggctttgctttttgctcattctcttggacttgatgtttcatattttccctgactgctgtctcttgggactccattatcagttttcttttactataaatgcagaggcaaatgaccacaccacccttactgaaacaccctggctccaccatacctatgcaagctgttagtcaaggccaaccctgggtttcctctttgcctgagggtggaggctgtttccacaaaagaaaggagtgaaactcttggacacttgtcctgtgggtttcactgttatgaaccatagcaattctgtctttggggatggcattgtctggagcacagctgacagggcctgaagaggattcggttgcaatatgctgggaaaccccaatttgcattgtcctaagcattcaaagcgagggcaaggaactcctacactgtgttgttttcattcagatagaaatgttcaagacaaaaccacactattatctagattttgatttatcaacagcagacaggggccaaggaacatatgtgtatgtgtacacacatttatatatcctctgtgtgtgtgcattttgtatgaagttggtacctgttatacctttaattttttgttccattgctaagtgtgtgtaatcagtttaggtggataaaaaagaatgtggctcttcactacccaatattttttctaaaagcaaaaattcatttgctatatcattagaagaatataattacatgagtttcttttcaagttccaatgccagctctattagagcccataatttaaaacaatggtgacaggtttgattgaaacccaactctgttaattctttgggacaattaggctatgtcttagtatgcttagtggtagccagggaatccagaggacttagtgaagctcccagttgcatccttaacattcccaagattataccatgaactagatacagtactgagactgaaaaagtcatgttgcaattcacaggtatcactacaccatcacctgtatgcatcctggaaggaaggttccaaggagttgaattcctctgttggttattaatgcagcaaagaagtgtttttagaaagaatgaggctagttatcttgcttcccaggctgggcttcaccagttattatcaaaaccatgatggtgttctataaatctagaaatactgcattccgggtatatttttttttccaagacagggtcttgcttattgcccaggcttgagtgcagtagctattcacaggcatggtcccactactaatcagcataggagttttgacctgctccatttccaacctggacccgtttagccctccttaggcaacctggtgatttgctccaaggaggccaccatattgatgctgagcttagtgcagacacccaactggcatagcacactacagcccagaactcatggattcaagcaatcctcccacatcagcttcccaggaatctgggactgcagtcatgcaccaccacacctggccattctggttctatttgtgccacagttatcatgcttctgggaagtgacaccagccacctaagagggattaatttatgaaccagtgcctagtctgtatttggctaaagaaccaaatctttgcacaggatgttctagttaatttataaatcagttagccataaatttatacctcagcagcatgatcccagaattagaaaaatgagagttgaatgcccttgagtacttccaataagtctgttgaaatacctacatacttctcttcaaactatttctgggatggttcatcaaaattagaatactctcacactgctttggagacaagc

SEQ ID NO: 914976 - DNA, 4001 bp, Homo sapiens
cactcgccctgcccttctaggctcacggctggctcttcccggctacaacttccccttccttcctgaaacaccagcgccttactcgctcagtcccccgttgccacctccgtcacctcctcggccgccgctcctgctggcactgctggcgctagcgctggcggccccgggctccgctggacgcctatcttttttctctccctcttccctagctctggattgattgatgaccaccggcggccaatggctctgacaccacgccatcctcggtcgggcatcacagccccacgtccccgacctcagcctcccgggcgcgttggcatccccgaacccacagcgctgagcccgagcccggggccgccgcctcctccctgctctacgcctgggcgctgccaggttccttccctggaacggcggagaaaggaagggagggagccagcgagcgttggaagggggtgtggaggccacgggatctccccctcttctgacatcttttttcacttaaacttttgtttgtcccacccccccgacctgtttgtgtttgtttgcagcatctcaaatcaattatacatttttcatgacccgcatttgcacttaatttggggtgtgtgtgtgagaggggggtggtgatgtactattataaatcaacttcactggggcatccttaatttattttcttgctgacggattccaaccggctcctgagcctctagaaaaatgcccccttcacctcctaggccgcaaaaccccggaattcaaaggctttacaaagataaccttgttatacgtaaatagcaaagaaactcctgcctctgtagagaagaaatccggcggcaacggttacttttcctcggtactcgtcccccgtcgcctagcctcgaccccagcttgggtcgccgggtcgctccgcaggctgcgagcgcggagacccaggcagcggcggagagtgaggttggggcgcggggacggggtgagaaagagccccgagcgagagcggcgcgcgcgggcggccccgggggcggccgcggggcgcagccggagcacaaagctgcgcggtgccttcccctcgtcactgcacctggcctcgggccgccgcgggagcccggggatcgggccaacacaatgcacccaggcctaggccggggcggctcgaacacatcaccccgggactttctagtaaacagctcgctgagccctcgtccccacccccatccccgccgcccggcttccccagcttctcgccgataccccctcctctcctcctaagaaatcctggcggaggagggagcgaagaggtggggacccccagaggtcgggggactgatggctggagggggtggagaagagaagaggcgcaggatggggagtcggagggaagacacctcctaaaaaagaatttgctttcgctcaggggttgaaaatcagccctccccgagcgccgaattgcccgggaggcgcccgctcgtgcggatgtcaggggcaccggggcagcccgggtccgcagcctccgagcccctcgcacgcgcctctgacaaggcacctctcacccgggctccgctttgtgtgtgcatttttttcccttcctctagtgctcggcaccgggctcccggccgcctcctccccctcccccgccctccgcctcccttcccggggcggattacctttcccgggctgcgctccggatcccggggatgccttcagcgcccggcgagcaggcgatccatagccgagcggcccgagccggctggaggagcgctgggggcgcgcgggggcggcgaggggcgcgagcgggccagaaccttcgaccccggaggtcccgccgcaggctggggctgggggccagggggcgcggcgctagagggaggcggggggagaaaggacccgagcagcctcgatctggggagagagcgagcgagggggcgaggagagggagcgagggcgcggcgagccggagggagagcgagcggtgcagtgacagggactgccactggggtcaaaggagcacagctccaggaagcagggcggccgaggcgccgctccgtgcgcgctccccggcgggaccccgcgcccctgcacgcccctcccgcagtccctgcccactcggacccccaccggtgccccgaagccccagggtttcgagaggaggagggagccgagggcgaggcccggtagcctgctggtgctcccgggtcaagcaggcggcaggaagctgagctgcaagttcatcatcatgagtgcgatctgcgtaaaaaatgataggggaaggaaggcgggctacggtgccccaggaaaagaagggagctttctcccaaatggtgttcttctgcaaagagaacacccagctccccgccacccaccgacctgccaggctctgtcaggagtcctggcaccgttccaggacgcagggctcaccgcaggggtaaggggagcggctgggacacttcgctcagacctaggaaggcgaccctaggttccctcccatctgctgatctgaggctttcctgggggagagctgtgctcctttttccccaagcctttcaacacgacagacacacacacacacacacacgctcactcactcactcacacactcacctctttctctctgcaatgttgctgagaaagaaaaggccaacccagctgatcattttttttacctccatgaattaaggcagattcaggacaggaaggtgaggagaggcaaagactctaattgtttccattttcgtcttttggataaaattttccccaaaagataagcatgtcaaaagcattttaaaaatcaaacttagtccagttttgtctgctactttggaaaatggaagaaaaggttttcagaattttgtacaaacaacacaaggaaaggaaatgccgctgaaatgctggaagacagaaaacaagggagagaaggcttttagaaaacttggttggcagggttgtctgtgaaagatgaggtggccctgtgatgttatgccattgtcattgctgaaagattgggacagcaaccagatctaattcctttctaggagtcagactgaaagatctgtgcattctctgaagggaaatccaatgtatatatatgtgtgtgagagagaagtgtgctaagtatactatgtgacaactgactagacatcctggctgaaattataccccctaaaaataaaaaggagccattgcaacctggtctgtggcctctgtgctgagactaattggtttccagggtctggggaggaagggagagaggcttgtaggagcccctataaaaaaagatcaaacggaattcacttgaaaatatttcccttttacaatgggctttcctggcacttgaattttaagtaacccatctcttatgcctaggctgaaatgaaaagggaaatggtcttactaatgtatttattttattttacagcatgcccagagtgtcagtgcttgtcaaatgtgctggggtggaaaggacagtgtctttccttgcccagcacaaatcagaacaagtgacattgacattaaaggatgccaaagatgggggcatagaggcacctttaaattttgttttcttttgttttctagcccatcagcgaacactgactagaatcacgtttttgaagaaatgcttggttttgtttcctttactctgtgactgagtactacattcctcatatcttaatagtttgaatttttagactgatttgggctgatttaatcagttcaaaaaaaaaaaagcatcaccagccaaataatttctgtggtttccttctttaaaaaaaattgcagtcaaacaaaacagacaaactagtttgaacatgattctgaatctaaatatgtgcacccagacagtaaataataatgctttctactttagtggtacattttacaggatacttaatgccataaaaaatcaagtgggttatccattacaaagttgatggaaatttgtataccattttactgagtggggaaaattgaggtaaaaaggcttaaaattgtaatttgtagtgctggaagaa

SEQ ID NO: 914977 - DNA, 4001 bp, Homo sapiens
caactttaaagttacatgatttttaaaatatctctgtgcattcacagttcgccagtggaatcttgaggccaagaacaagtgagcagatgtctgcagacttgagaactaagctgaggttccccagcagtcattttccaaggaatctgggcaaaacacactttgttttgcttgaatggaaacagcatctacaaagttccttgtagttctttaatacaaaaacataacaccagcaaaacagaactgaagctattctaaagtatggcttacacaaatattgtaacatatttgaagaaaaacaagtaaatagaaacagtagaataaaaagaatatttgaattaaacagatatttattgttcagaaaagctattttaacaaagaaaaactttatccatttttccttaaaatcatgttagcgatccttcataatcatgaatatattctcatttaaagaacgtataaagttctttcaaatagtttagcagtaaccacttacaaggattgtcttttccttttttttttttttttggtcactcaagcatgctgctttaaaacggctgctttgcagaaatctcatcataggtaactgactcgctctccagaatatacttgcaaagcaacatcctagtatttacactaatatccaggcagtcaatggaaagacccttttgtttggttagcgtttgtaaattccagggtgggggggtgtgtgtatttggggtgtcctactatttttttttaaatgctcatgtaaaacaattcctaaaaaaagagcttgtgacttggacatgccccgagttcaattcttccaggagtggtaaaaacagtcaacagagctctaacctcctttctatcttgactatacaatagttttcaaagaggtttagtcctactatgaaagactcatgttagacattggaagggtctcatagagaatgagcaccaggccttgaataaacaagagagatggtgaccttttgctcccttcttctgaaagcccagcacatcctgtagcagaggaccagaaaaaagttgatgtgcaaccaggtgctgcaaaatccttgcctctgggtttctgccacactttgctccttaaacagtttaaacctcaacatgacttaaatagtattagggagtgagaggaaagtacaattcctggaaccaactgttccactgtcccttattcctttgttccccatattgtttgagtcctgtagcatgcagcacacgtttcactagcaacaggcaagacaatggatctagcagtagctggacaattagtcccaattaggcctatttcccagctgaatgtaaagggctagtggggtgaggtgtgggaaaaaaaaaaaaaactacagaaattttaaagaaatatttcagaatggaggcaagcaatacaatgtaaagcaaattgaactaggggtcaggagtctcaggcaaattcgctgtgtggcaaatactttaacctctctgttcttttccgttcttatctataaataggggcaaccaaccaccagtcctcagaggctctgaaaatctaatttcaattgtggttgaaagtgctctgaaaatttgaaatgttacacagatgtatgggattcctcctgagctgtatttgaaaccacagatatccatctgatttgtaaatcatttaccttttagtctccctagcagaagttaatagtgaatgcttttcttttttttctttttattttcttgattgctaattttgttaagttcataagcgatacttacatatgtacatgtggaggctggaatctgctctggttgatgttgtagtgcgtgaatgcctgggtggggtttgagctgtactcatccaccgttatggtaactttgccttgagaaggaatcccatgtgccatccttcctccctataggcatgagcaattcacaactttacagagcaaaagatggaagcaggcatggtgcgtttcagccaacctctgaatccaaggatctactcatcaataccgctgtgcatttctgaaagaaaaaaaaaatgtatataaaatgagaacaaagagaaaaagggtgttctaagagacataaatttaacatctagacatgaaactagttcagggaaaatctgaatatgtgttgttggctcatggatacaactgttcccaactctcttcccttcatgcacttcaaagtggatattacactctatacatattgctgggtgctagcaaatcttctcaatggagttcaaactaagatttcctctttaattataattatggcacttagcgtgaattacggaaggggcatatccaccgttgccatggcatctggctatacatggtttgtgctccaagtgaagaatcttccaaacctgccctgctaattggaatgtttggtctttacaaagttggtgtcacgtaatcatttgaaagctccatgtttaaagcagctatataacacaatgacagataagaatttaaaatgttgtgcttataacaaatacatgtgtattactataacatgcacataataaccacacattacacatatttttttctttcacaagcagctcccaaaatacacaggtaggcaatgcttggcattcctcactggcccagaaccttatggtaaggcaaatctttcttgttaaatgtagtgtcatttttttcaacactccagtcactcaggggaaaaccaaacacctccaggtctggaccaccactttgaatgcattcattacctcccttcttcaagccccgatggagcggtaaagaagggcggccattacatctgccacctcattcttggtgcaacgtaattctcagtaattggtttcattttttaaaatttccattagttctgattttttcataaatgtcaatatattatttgctgcactgggttgagaaatgaagatgtctatttttatggtaggtgtgcaaaggctgagggaagcaaattctcatgtccaagttgttgcaattgatcagtgcggtagagaagaagccgtagtacactccttgggtaacccttaggtaacccatgctcttactttaagtgcacaacgtcagaataggtttgccatgtgcaccattaagctctgagaatcttatctgctatttcaaataaaaatatttagaataataagatgagatttaaaattggcatgaaacaccttaaatatcgagcaaaaggcagatggcctgccataggccatttattttattattttacaacccggggcttgagtaatcccccatatgctagctgggctaagaaattccagagtgttctactcaaatcattgccttcttcatattagcaaagcaagctaaataacacccaccttgcctgccttcctaatgtcaagtgcactgccaagagatgaatccccgtgctctggcattttaaacaaagtgtcactttgggttctctttctttttcctgacttcatgggaggtatgagtcttttaagcgccagatgatagacaaccaggccagtaggattaactaaattaaaatctttccctgctcctctgatgtaagatatctataagaactgcttacaaatcataatgtagcagttttcataccaagtttgcagctgtttccttaatttctcccacaattatattttactgttattttgcataacagtaaaacacaacacctgcttcaaattgcagtcctgttctaagtactgtaattctcttttgagacacaaagtaccgagacactactgaagcgcaaaactgcataattgcgtcgcgctgaaaagtaaatacaaatgaaaacatcttcctgttatagaaatgactgtcattaaaaagaatgttagccatcaaagcacagagggggaaaaattcacattttcagactgtgagaagttagtgtttgcataaattagagagtggtgtaaaaattacttgacaattcttatgttcattcttccatcaatgtctattgtgtgaaatactgaacattaagaagcaaaggaaatcaaattcatgtctagaccg

SEQ ID NO: 914978 - DNA, 4001 bp, Homo sapiens
gtttccagagaaggatggaggcatcgtaccgctcaggattcccatcccaagacacccggtccttaaaccgcccactcatgggttggaagggatctatgtggtagtagaatacctagagaggggaaatggcaaaaggtcttcttactcagcacccaggcaaggaggccaagatggtgggagcggaagtgaaacaccagcaaacccaactgtcctgtctgcagctctgtcacttgctttccccttcaacggcctctcagtctctgtcccaagaattgtttccgagcttaaccttgtgcttgctgctaagaaaaatactggaagggaaaggagaaatggactggcttattatttccctaaacaagagtaccctggaaaatgatgataatctacttacaaactgctcaggtcccccgtctagaggacgaaaattccaggtcactgttagagcatcacccacaggggcaaagctggagaaagtgcattttaaccgagcatctgtcccattaacagcctccagcacccgggaggtataaatttccacagctgctataggccaaagagctgcaatgaaaaagaagaaaaagaagggttaacaggggatgtagtattgtgagaacttctgctgacacttccaaaataaatatctgagtaggacttaaagtaaagtgaaactgagatgccccatctcccaaacttacttcacccagaatctacatactcctacctgtatgcagcctggaccctcccattccatgtgacaactaaactaccacacagcaagccttcgcagtgcttttactttctccacagcattaaagcctcgcctcgtggtactgacttcaaaactgttataacaaactacaaacatccgcaaatagaattgaaagcataaacaaaaaattaaaatgaatcataacattgattagacattacattatgtattaaggttaagcattatgtgttgtatgtaaagtggtctcctagcaggtaagttttccagatgggtccttaggtggatttcatactgttactagtctattgcagaaactgaattaatcaactccagacagcttatgtttgcctgcacccctagaacctttgtaccacgtggcatttttttaaacttgatatttacatttagaatgtgtgtgttggggcactttcaaaatcacagtaggtctctctctaacaatctccactttcctggtgttgctgagagtcacagacaagacccacacacagaaatccaaatgccaagtcctgccagcagtgggaggttgagaacagccacacacaaaaaaatggcatgtaacctgagattagaaagccctctctgtgcctgaatcactggcagctgaacacacctaaacctgtttgtccgagagcagttctccaaaaacagtccaccaactttggtttcagtaaaacccaaagtaaaacaaactgtatctgtggctcaggctcccaaacaaaagtcttgcaacttctaagacaattagctaactttatagagtgagcagtgaaggaggaaactctgagagaagcccgccggctcttacctgtgagctgtatgccaaggagaagaagcaccgcacgagtagagctcttgccatacatgagggaaacccagccttggccccagagaccggacggggcagaccgagggctccaacaccctgccaaggccactccgggaggagcaagcaccgcgttttcccagagagaggagtttgagttgagttcctcacctgtgcctgtgactcagcccgctctgcctgtgcacttttctgaaatgaaaggtggggcctcagctcccaatgccctccttcctttcctctctcccgccctctacacgaacgagcatgagcacgtctgcacaaaggtcccaaactcccgcagtcctctctttactttcagttaatctgactgggctctggcctctagatggcctcggaaacagccagaggaggtggtgccagtctgaaatgtcccagactgttatgggtttggcccccacacgcccttttaaaacaggctttaggcttgcctgggaagtgaatgttgaaactgtcctgcagtgattccacttctcaaagcaccaccccagggccacattcacttgggactggattcgatacaatttcaaaacgggagtcggaattccttaggaccctctgtggacaaaaagctgatacccctgttaccacaaggattcctgcacttcttctagtttgtagctttccaggagacctggcagaaacaacaaatcaaatctccatgcttaacaatcctttacctttgaagactttaaaaacaaatgaggacaccatccctgctcattcaccctgccatccgagtgcaatctacaaagtgctctcctgctgattgtttcatctccattaacgcccttgtgaagcattcccattctaccagtgaggacgctaagaacccgaggaaggtaaatgatttgcccaaggttgcacagctaccatgtggcaaaaccagaacttttcttaaaaatctagcgttctttccaccaaataacagctaatatgaacaatcagacatggggctctcaaggaaaaggttttcatgataactttgttgtgcctcggatttcatctgtcattttttgaatagctaaatgactgagaagtctaaagagctgaggaatctaaacgagaaaagatgcctccttgtctggaaagagggtgggtcatctttacagattaatgaagcggcacagaaacatcggtaggagggggatgaagattacacatgcagttaagaagtaggctgggctgggaatctaaccctgaaaaaagacagattgcgtttatccctggattagcagtctagaaactcttcagtcactcataaaatcttctagctgaatccagagcagaaagggtggcaggaacaagagaaggcggcaggctgagtagaaaaaaataaaacatcataaagagggaagaaaagagaaaattctaccaaaagagaggagaatgcagaagtgcagaaaacagaaagcaacaggagaaagatgacatgggcatggagcaaaaacaggtagacaaccacaaaaatccattgtgttggaactcagaaagcagaggtggccccaaatgcagaccagctgtgtgctagtgaaaatctgttgcatggtgagagtttctgaaaactgtgtggcgtctttgtcagattctagttcagaaagggacctaaaatcagtctgctgggggaacctttcagatgttggtgaggaaggataagatacagcctttctggtatgtaggtcagaagagttcagctccaggaccctgaaagaaaaagagttaaggaaacttgatcttggttggcttccaactttgcagggaaatacagctacagaggaaggagaggtagagccaggattttgaagtctacagcaaattgcaaaaactggtgagaggtagagttaccaaagagctcagggatgcagtgaaaagcaacaggagaagaatcagggcaggaagaactgaacaaactgcctgttgtcaggagcagaaatccctcccccaggtagccaaacacccatgagctggttgccagccttgctctgaggggcaggagttatccagatcccacttctcagctgagttcaagttcctggcttagtgcctggcaacgcccagttccttccagttagcaggagtggctccacagtcaaccacttcacctcactgggcaaggaagaggccaagggtagaaggttaagaagagaaaatgctaaataaaaaggatgtttgcccctcacagttttctggacaccagtcagcaggacttagaccaaaactgcaggcatctacataaggcctaagttatgtttgtgcccaggcaaatggaaggaaaggaagaggagttctggaaattgaaaagaagaaaagtaaagttttcagagacaccattttctttctaaacttttccagagaaagatcctgattgtcatttaaaattgtgac

SEQ ID NO: 914979 - DNA, 4001 bp, Homo sapiens
ggttgccaggggctaagggaaatggagagtgaggagtgattgttaatgggtatcaagtttctctttggggtgatgaaaatgttctaaaattgatagtggtaattattgcataactgtgaatatactaaaaaccattcaattatgccctttaagacagtaaattgtatggcatgtgaataatatgataaaccagttgtttcttttttgtttgtttttgtttttgttttttgagacggagtttctctcttgtcgcccaggctagagtgcaatggcgagatctcagctcactgcaacctctgcctcctgggttcaagcgattctcctgtctcagcctcccgagtagctgggattacaggcgcccgccaccacgcctggctaattttttttgtattttttagtagagacggagtttcactatgttggtcagcctggtctcgaactcctgacctcaggtgatccagctgcctcggtctcccaaagtgctgggattacaggcaagaaccaccacaccctgccaccagttattttttaaaaggcaaaaaatctattccacaagtacatagagattgtaaaatcaactttaaatgtttgattgaattatatggtctgctggacttgacagatgctcttcaaagcaaaatgacattagatttaagaaaacaccatttccagattttttttctcaataagacaatatttgaatatttctcgtgtgtgtgtgtgtgtgtgtgtgtgtgtgtgtgtgtgtgtgaaagagagagagagaggactgggtttattaggagtgacagtaggccagcctaaatatcatactgcaaagtaatttagcttaaaaactggagacttatgatgacacaggcagctgggagggatcgggggtgtgctggcaacatgaatattagtcaccagttaaaaactttccagccttaactgctaagatttaggacatctgaagtctttatattaaactatttatatttatataatattaaatatctctttcagaaatccccattaccctcaaggaaattttataaatttagcaattcactctaatactagatatactaatattttatttcccaggaagacacacatacacaaaatccaggaaataattgtaccttaagatgaaggtaattaggctggattgaaatttatgcaatttgaaaattatatgaaagcaaaactcacctaattttaagatgtgaatgtcagtgtgaataccctacttctgatattacttaataaattttaacagaatttatatgctctttcttgtattaaaaaaagttatgaaaatgctaaagcagttactttttcatcgatatgcttctctataacgaatcacatcacatcccttctgtgactagcaaatatttcattttatagactacaataatcacctacaaaaaataaaattaccaactgtcatgattttgtttcccaaaactactggggcaaactactgaatgctagaactgttttctttctaatcagggtatacagcgcccaaacgacagcggtcaaccactgataataacaccacaaaataacaccgggtgcccccaaagccagagctctttgtggttccatcaagtatgctatcaccaaactacaatgacaggtcacgcaaggtgaaaaagctcccaaagctcaggaaaggactgacaaaataccaactatcctcaacggggtggtgatgacatcgtcccaacgtcccgctccctccctccttccttcccagagctatgcgggggctttctggagacccccctacccggaaccggaaaagcgaccatcttccctaaccccccggccggaagtggagcgtagccagccggagcactcaccctggaagaacaggacgcccagcagagggaagagagcgcagccacggcttccagctgctcctctctgctgcatcccggcagctcttcagatgcttgcacaccttgtttacagctcccggtaacgacacaggtaacaccggaagtgacgtcagagcaggaggccgagagacaacttaaatggcgatccgaagttaccataggaacctggcttctttccagaaccacacctggtttcactgaccagagatttattaactttcaggcgggagctaaatgctctcttttgcttgaaaatgaagtaggctacggacttggaataattacaattttgtttttatggaattctgcagaactaaataattttgatgctctgactgcatgtcagacatcgtttttacgtctcgagatttagttgaaggttctcagaatacactactgtaaatttagagttcagaaacacctgggagatcatacagtatagataaatatatattaggtgcttgtagtgatatgtgccacaagcctcattggttggtgtcctttttagtgtaagtattgcagcctccaaaattgggtgtttattaaattacttttggcggtggcaatgatgatcaaatcattacagcctgtattagaggaaaagaggaactgggatttctgtgtctttggttggaaaagtaagaaagttatgttatcacagtacttgaagtgagatggcgtcacatacttctgaaaaagagatggtacaataagtacactgctttaataatcagtaagcctcttccctggaaattgccacatgtcaatgaaagcaggaggagaataaaagtatgctttcgctttggggaagaattaataagtttccatttttcaatttccattcctttactagacttgaaagccagtagttttccctattaaaagtgtaatgcaaagtactaaatagaatctttgatacttttctttgaaagagccctcaaactaagtagtgttgttatgcccaattcccagctatccaaaacagtgtgaaaattctgtggaaatccgtatacttctgtttacccattagaaactaactgtatccattattgacttgcaggttgtctctactaagaaaactttttggtaaagattaaatatatatccatctgtttttcctgcaatgtagaacttctagatatgtatatacacaaattatataactgataattctttattactaaaggtttatttacatagtgtttaaagcataataaaaaataaattacaatacaaaagtgctctttaggaaggagacactaaacaacaggcccatattaccccttgactatttagccaagacataagctacaaattttgccggaaaaactgtccatacatttttaactacttcttcattattcttatggaccatcatccaggacatctgtttgaagaaatatccagttataatattttcaaaggttagaattgtgaagaaaaaatataaaatgtgattaaaggatatatagccttcagatgtaatttacagttttaaaattgcactttaaaactttgcttttttagacagtataaaaggcagaatgagacagatatgtaatgaatttcagaactgaggttcatatgtaaatcatacaattttttaaaaaatagtattggaaaaatatcaaggtctatacatttaaatacagataatctgtttgaaaattccagtttgttaaaagaaaaaacatctgcagtccagtcgattaaaaactgaaaatatcaatctgtaaagattgatcttgagcctaaacttttagatgctttctatcctttgaacaaatgcttctgtatcttaagcttgtaacttttctttcaatagcccacttataaagtttgctttatctaccagtatgggggaaaaaaagaataaagttggttttattccatttaaagtagttttggtatttctttgctccataccaaagtcttcctcccccaaaataaacaagtgaattagaattaaaaaagaaaaaaagttaataatttcttctagttctcagagttttatataaaactgtacaaaattatcatcatttagagttgatttttttcaccagccctgaattttcaaacttgtaatatgctgtttcacaatttttttat

SEQ ID NO: 914980 - DNA, 4001 bp, Homo sapiens
tatatccaagaaggtaggtcagatacttttcaaatcataatactacatgtttctgtagcaatttatgaagtattttctcatgaattctctcatttaagcctcaaaattaatctgaaaaaggtataattattccaattataccaatggcaaaattgaggcaaggctcagagaactgctgacttgcccaaggtcacacagctagtagggtccaaggacttgaaactagggtaaaagactccaagtctaaagtctttcccacataactttttttttttacgatctcggctcactgcaacctccgcctctcgggttcaaatgatactcctgcctcagcctcctgagtagctgggattacaggcatgcgccaccacgcctggctaattttgtatttttagtagagacggggtttcaccatgttggtcaggctggtctccaaatcctgacctcagatgatcccgctagcctcggcctcccaaagtgcacataacttttacagtccttttatttattcccattccattcaaattcatttccagcttatttaatactagaggaatttactctaaaaatcttaaacagaactgcattgactaataagaatttgtcaggaaaattcaagaatatttatcacttcaataatttaagatgaagcctaagaacataaacaatactatatcaatatatcaaattactgcaagactccaatctatagctgcatattagcttccagttaacaaacagataaatatttaaaacattccaaataccctttttgatgactaatatttctgttcataaacaggttccttatttactgcttattaaataagttttcttttactgtgatcacagttgacgagctttagaaaccccaaataacaagggattccagaagtcaggtgcttacagtgcatctgcagtactcatttttatggtcagtcaagctcctctgggaccaggttcttctccaagaacccctgggtactgtactcaaatgtcagaaaatgcactcgattccaaattctagaaattctaaaaacaaaattacatcataaaacacattttttaaaagcctgcacgtatttaaccaacatgatttacgctgcacaaggtacagacgtcttaattagactggcaaatttagaagtctcattttcatctaagcacccactatacttttttttaatgaactgagcatagaaaataatatatctccagtgtacatcctgtttcctagtttcaccaagatgattaaactcctattttcctttcccgtgctcttatgggaaattaatgtatgctaaataaatgggcagaaagggtcacatacggttctggttcaacacacaaacaactctagatgtgcagatatttttaagttgcacgcataggttactctggagaacagaggcaatcctgtatttcctattcaaaccccacgattttttttaaaggacctggctagtttggaaaagggaacgggcccgcgtttaaagcgagtgtaaataaacaaacacgtggtctgcggaggaacacctttaagcaccagcaggatgactgaaaatagccaggtttggggaagagtggctgccaccgcgagacaacccccaccacatctggagctccagattccgtcgggattccaagcctcaacacgccctcaccgcagggaacctcggaatcagaacgctgagcccgccaggacccctcccctgcccactcggcccgctcttcccgaggttccagttaactctgggcttccgcctgggaacctgcagaaacaggagacgaatgcgattcctaaattaccccactgctggactcttcgaagccccacaatcgcgacccaaggctgtcttcttttcgggaagaaagggcaggatccgtgaaaagaaaacaacacggtctgaacttgcctctgagaacccgcagggccgtaaacctgaattccgcgggagagaacggcgtccgtttctctcgcgacacttcatggataacgtagatgcttcaagtccagttcggctctcattggctaccgcacgcagtgagggggcggggaaagtagcggcgaggccccgccctcacgcaggagccaatcctgagcaggctaggagacgaacccggaagtgagatgcaaggcggcgattttcccttctgtcaggtgggttgttattccctgtcccggacctcgctttttgatggaccggcgccatctaagaactcctgagcccgtgggggtgggtagcctgtggacacaggccgagccctgcaggtcaggccgcttcgtggtccccaggtaggaccgaagccgcttctccgctcttggctgtttggaaggccgcaggcggagctcacgggcctgtgagctcccggctggtggcagagtgccggagctggatcccctctccctccctcccagtcgccagaccctctacaggtgtcgcccctaggtccttgagttcagcacatctgcactgctttgtgctgagagcagtaagatgtatagtgcagcgaaaaataatgtagaacttttgaattagaacgtctgccctttcagttccattgaagggtccttgatctagggcaagttgttttaatctatctgaacctccttcaccagtaaggtttatagccccgcctatcactgagttgtttgtaaggagttgacatagttcggatctctctcaaaataggatatgccctttaagttaggaaacataccctgacattcctgatggaatatcaggaatatcatcatcaagtcatcagttttgtttcttaactgtaagtcgggtagatgcgcctaggcttggctttttaaactaaatataccagtaaaattttgtacataattttttgtatctggatctgtaaactcaaaatttatataaagggagtttttattgaaaggaaaagcatgttgggggagagggtaagatctgtggtataaggttactatatttgatataattacaagtgaacttttatttattagcatctgttaagtgtttaatgaattgatgtatggtcatttttgtgttgcaaggttcaggaattagtttgagaatcaaagaaaaagtggaagctccaggagaattaataaaacacagagcaattctgattggatatctctgattccaagggtgtctctgattgggtgactgaaaagccggattggccttaggaatactttagtaaaattcttacattttacaataaagtaacaggaccagaaaagttactggacatgagtaatacatttaaacttgagtttagtgctattgccactagtaataaagtttaataccacattaagattgtatactgttaaacttgtgagattaggtatcaagaaatcagtatcttggggttatgcctaactctggaacttctcagaatccattccaggcaaaatcaagtgacaagactttaattaaatgtaatgctacacatacttcttaatgccttctatagacaagtaggagataaatataagttaaatgtggtccttatctttcagcttataatcttttaaggggctaaaacaagaacaaagttagaggtgaaatgtagcaccaaaaaaagtagaaagcagaaagcgatctaaatgagaggatcaagaaagaatgaaagagataacatcagagaagagccttgaaagactgattatatttcaacaaatagagttgagaggctgggaattcgtatttgtaaattatctattggttattctccttttctttaattgattaaggtttatatgttgtgtaaccctttaagctgatattggtttaaaaattaatatggcagcttagcagaataaacatcagttccttcaggaagccttctttaatcccttaggactaggggaattatgaacctcctgtatactcatggtttctagacaaggtcttgtagtagtacttatcatgttgtctttgccagacacatgatgtctttgccagtcacctacactagagtaagcttcctgaggtgaagac

SEQ ID NO: 914981 - DNA, 4001 bp, Homo sapiens
cctcctgtcttgcaccccctccatgcaagccccgagcctcgaggctggatgctgggtggtaggaaagggctgtgatttgtggaaagtgcaggaaacatctgccttgttctggacccaggggactgtgggaaggaaagggggagggaggagagtggagccagctgatgtgtgtcccagatgttccgtctttgggcttttgggcaaagtgagggggccctgggagggacagtcagtgaggtatgagactctggctctgggggacactgcctggaaggctgccctccactgcctggggcactgtcctatcagcatctgctggagtgactgccagtgaagccaggcagaggctcttcccttcccagtgcggcctggaggaaagcgaacaggcctgccctgggtgcgaggggtgacagggtaaggcgacctcatagcaaatgccaggggtcaagggctggccaggggtcagagggatggtggggcagagtctcatggcccacagccagcgagatccgggtcggcgatggcgacaccgtttacttgccagacttcaggcacacctggggaaaggtgcacgggggcaccaccttggtggccagttgatgccacccaaggaccagcatagggccaaagatcacccgaggtcacctgcctcctccacaaagatgccgtcttaggcagagaaggtggttgggagaaagctttcatattcaaatgagattcctgttatccacccatagataaccagcttaaagcagggtagggctaaaagctaatattttcccccaaccagataatctgctataaacaaataaattgcatcttccagcggggttgcattgtgagatccaggacacaggtgttgtggggagttttgacatgcagggaagtgacccccacatgcagctgcaaagtccttggggctcccccaagaaggcgggccagacacttggcagggacgaggtgggaggcagctcacggctcgggaatctccagggcatgggctcgcacaggtgggaagcacctgtgggcggctctcaagcccccatctcattggtgcccacggtgggcgtctccccaccttccagctcgggctcctcgcgaagcgcctgttggagcacagtccccagggacctggtgggcagcctgtggctcctccggctgcccaccaggaagtagatgacggggttggcgctgctgcttacggacgaggagaggcgtgacaagctgaagcacaggacctgcatctcgggcggcaggctcaaccagtagagcacaaaccagtagatgctcagaggcagggaacagatgaggaacaccaggacagaggccaggaccaccacgaacagccgtgtgggctgccgccgccactgctgggagctcctccgcacccagacaaagagggtcaggctggacagagtcatcactggggttaagacccccatgatgagggcggcctggaccatgtccaccctgaagcaccgatcttcattgaatttcaagaacttgctgcagaaggaagaggtcaacccgttcatcaggagacagagtgtccacagcaggccacacacccaggctgacaggtgcctgggccggtgacacttgaaccagatagggaagaggacagagagacagcgctgggtgctgatggccgtcagcaggctcaggcccactgtgtaggcaaagtacatcagtctcttcatcagctcgtggaccttgtcagtggtattgaccaggggctgggtttccaggctgagcgtggaagccatgctgaagaggaagaggaggtcggctgccgccaggttgaggatatagatgcagaaggggttcctgtgcattcgaaagcccagcagccagatcaccatgctgttgcctgccatcccgcacaggcaggtgaacatggccagggagctcagcaccaggtaggccgtgtgcactgtgctccctctggaatagtttagggctgactccacggtcccactgctattcaaagtctggttcatccctacgagaggaagatgtaccaatgtgaaattctgtgttgctgggaccacgggggacccctgggtgcccctcgaatttccagcttcagagctctcccctccaggttctttatgtaacagaccatgaccgggaggcttaaccttcccccactcctgtgactcactcagcccagatctgcctccagggtcacctttatagctacaaagctgttataaataccctttatcaggttaaaaaattctcttctatcttgctttgaattattttttaaatcatggagaggtattgaattttatcaaatgctttttctacatctattatagaaaaatcattattatcaatagatgtagaaaaactatttgatagaaacatttgaaatcattttttttttctcctgtaattgtcaaaccctgtgagttaattaaaaaaacaatagaccttagggctgggcgtggtggtgcatgcctgtaaccccagcactttggggtttgcttgaggccaggagtttgagaccagcctgggccacatagcaagatctcatctctacaatttttttttttaattagccaggcatggtggcacacacctgtggtcccacctacttgagaggccaaggcgggaggatcgcttgagcctggcacattgaggttgtagtgagccatggtcccgccactgcaccccagcctggaagacagagcgagatgctgtctcttaaaaaaaaaaaaaaattagacctcagggcaaagtgtagaattaactacactccttagtttaagacacaccatgagcatcagcccattaaaaaccctccatttattcaagtttccttccccatcccatcttagctgcctttttcctcctgccgcttgcatccatccaacctgtttcacgcaaatccttggacacctcaatatctttcaagatggagtggttgcccattgtgttttaaatttacgtaaatgttgtgatttagaattaatgatgggttttttatttttcacttgacaatatgtttgtaggatatatccaggtggctgtatgcaaaagttgtggtttaaaatgtcatcatgcacattgatctgttatccattccttactgtggatcctcagcttgcttcaaaattcccattatcaccaaaacactgtgttggacatcctcatgcatgtacccattggacttgactcaatatttttctgggatacattcttggaggaggattgctcggtcatagaacatatgcacatttagtctcactaaatattgcctggtaattctttttctgagtggctgcttcaggtttcacctgtaccagcagaataggaatgtttacgttttcccattctctcaccaacacttggtgttatttgtttttctaacttttgccaacctgatggttgcaaagtgatatactgtagatgttttaacttgcatttctgtgattacagtgagtttgagcatcaattcatatatctgttagccatttggagttccccttcttcaaattgtctgttcacacctgttgtccatttttcaattgggtttcttttcttttcctttctgatttgcaagagttgcttgtatttctaggtattaatgccttcctggatttagacattgcagatacttttctctgagaacgctctgttttttatggcaactttatctattgtgaactttggttggaagacatcctaaattttggtatagccaactcttcagaatttttttctctgaaattttgtgtcttctaaatctgaaagtattctgtctccctggataaaaaatgtagtcttttctattttcttctattacttttatagtttttcccattcagattttgttcttggatccaactggaatctattttttatgagcttgatttttcctccatagtatggatcagctttcctaacactgtctcctaaacagtctgtcctttccctattgacttattaagttctcatttacacatgggactgggtttttaatttcattcttc

SEQ ID NO: 914982 - DNA, 4001 bp, Homo sapiens
caaggttgtgctcagaacccctgctgtctccctccagtgataggagcacccgagaccatgcagggggacgctgcggtgctgggatgctggggagaggtggcccggggcggggctatcgctgagcacagaggtgccagccaccccgtgaggtgctggtcatctccctcggcttacaccctcagctctgtggtcttttgtttgactggggtgaaatgacagcctgaggttgtccccgcctcaggggtgggcatgggggtggggggctcagtggagaggaggccccagtcccagcacctcaggaagctgagtcctgcccgtggtccagtctgaatctcctgcgggtggagtcaagcctggttggagatatagggctcttcctcctgtccctgtgctccatcctagcacccaaggccccgggaaggcagaccatgggtgggaggtgaggtggtggtggagggagccccacctgggccagcatcatcaggaggacaccctgagtggggcagacggggcatcactgccatggcaggtggggagatgtggggagggggacagatgctctcctactcaggatagcttgggggggtcaccaaccctcaggcccagagggaggcagagatgagttttgggaggtcttaagtctgttgatggtggaccccctcccaggcacaagtcccgtccacccatggacggagctatctccgggatctaccagcaagctccagccccaaagcaacaggtggggtttctccagcctgtggcccaccaagggccatggtccctctcctatctcacctcctgcatggctgaggaggacacgggcctcatgggtgggccccagggagagagcatggcagggaagcgatggacatagagggagaggggagagtgcaggaaggggagaggcatgaagagatgggggacagagaaggaaacagggaggagaacagggggacaaggggttagagccacggagctcagccagaccctgctgctgccccctctctgctgtgaccctggaggaggtctccctgtgggaccatgtgccccactgggggctcgggagggaggcagagctctgtaggaagggtcgccacagttgggttacaggactgtggggagtagaggagtttgttgcatccttggtgagcaggaggaagaggagagggaggagaaggaggggaggaggcgggggaggacgatggaagagaacaggagggaggaggaggagggggaggagaaggaggggaggaggcggggaaggacgatggaacagaagaggagggaggcacagcattccccatccctgggtggtccaggagtggctctgtgtcccgcccagacagccaatactgagaagccctgaggctgagcacccaggtgtggcagggaggagagggcctatccccggctgcccccatgactccccttgagagtctgcacctgcagggaacactctagatcatggaggaagcaaggcagacaggagacagagccaccgggggtggggggttggggagccatcacccaagctatcgtcctcttccagactcagcccagggctggctgcggaccaggtggtgcggcccgtcagagggcggaggctgcagcctggagagctccctgttgatagcatctgctgttgcccacgccccacccctgccaccatctggccagcaaaagagcccagaaaatgccgagcgcctgggccggccccagagacccaccctgatccagccacctgcgctactcaccgtttggggcagaggactggccgagccctgcctgctctgaccctgggccttggatctatcctggccgcggccgagggctccagtccccagagcctctgggcggctcctgttcagtgtccaccagctcctccgagtcacatggcatccagctggaatggggccggtcaggaaggtgtctctctgaggaccccttctcttccgctcagctctcgcccaggtgtggacagcaagagaaaccctgaacctccctgcagccttccaggcaggcctggcaggcagaggaaaccacgagatctctgggtggagcccagccaagctgtgacttcactggcactcctggctcagagacaccaagccctgtagggccctttagggaccacttctttccatctgtgcctcggaggggccggctgagagccgggctaccggcggaacttgtccttgcagcaaaaatgtgtttttctctccgcagagcacaggctgccggccccagctctccaggcagtgtgggaccgcggggaggagcggggatgtgcgtgaggccgtccctcctgcctcgttcgcaggcacagagtagatggccggtgtcaagaagctgccgcgcggtccccggccgaggagaatcaaacacatacagcagcgtcaggctccgggagacctcgtgaactcagtgatttcaagtcccgtttcagaccgtgcctttccttccagtgccctgccttaagggagatcgcaattgacgtgccaagagaaggaaaacaaggtcattttttggcctctgttcctccccgagtccaggccctagcaactcttttctcatctttgtctttagaaaaatctccgaggtagagaagagtgcagaaacagcacggatttgctccggagcgtttcccactctgcgcagtccgcctgacctctcctcttgcggaccaagtgagagcaagtttcccgcacgtggcctttgacctgtcactacatcagcaggcatcccccagggcaccggcatcctccatccccaaaacggaggggccgcacacaggtcgtctggcgtctgtgcaatgctggtgtctgatgaatgtgtcgcgctggtgtctgacgtccatgcggggctggtatctgacaggcagcagtgccgcttgctgagttgtgtctcagcttcaaatcctcccttcctaaaccaggatccgagctgccaggtgcccgaggctctgtaaaccatgcctgggctctgccaccgctctgggaggccctaccagtgggtggtcactcaaggatggcccaggggtgtgggggaagtgctcccaatcgccccacacgttccaaatatctcacccttctaagtgccacactccctccagttgtcccacagttccaatagtgccactcctttcaattgtccatcccaccctttcataagttccatgccttccacttgtcttacaccttaaagctgtcccacccttccaaatgcccgacccttccaattgtcccactccttccaactgtcccactcttccatttgtcccactcttccatttgtcccactccttccaattgtcccactcttccaattgtcccactccttccaattgtcccactcttccatttgtcccactccttccaattgtcccactcttccatttgtcccactccttccaattgtcccactcttccaattgtcccactccttccaattgtcccactcttccatttgtcccactccttccaattgtcccactcttccatttgtcccactccttccagttgtcccaccctccaattatcccaccttccaattgcattagccttccaactgtcccacccttccaattttcccactctttccaattgtcccagccttccaattgcctcatccttttaattatcccactcttttagttgtccccctccttccaattgccccattctttccaatggtcccactttttaaattgcccttcccttgcaattgtccccctctttcaattgacccacctttccaatggtcttaccttccaattgatccacctttccaatggtctcaccttccagttgtcccactccttccagttgtcccactcctatcaattgtactgccttccaattgcctcactcttccaattgtcccacccttccaatttccccacagttttaattgtcccactctttcaattgtcccacccttccaattgtctcaccgttccaattgtccaaccctcccaattgtcccactccttccaattgttc

SEQ ID NO: 914983 - DNA, 4001 bp, Homo sapiens
gtttgtgagcacctgtgcctggcctacggctgactcagcctggggtcttcggggtgtcccagggtgggggcaccttgtgtgccggagtgagccagtgcattgtgatgtgtgtgcagtgggcttgcagatggctggtgctgcgacctgtatcttaagtctccctccttggactccagttgggccattgtcccgttgccacagacaggccgtaacttctccacgctctggggcctgtctgagctttcctgccctgcaaccccagacctatcacctgccctcatccttccgggcgcctggtaagagccccccaagctctctccattgcccctactctttttggtggcccttctggacacccaccacccctaggtctgggcccccagccttgtttccagagatgtcctgactcacaggagcctcatccattcaccctggccaggctagaccccagccacaccaactagtgccccaaaggcagtgggctgggctcccccctacgctgcaggtgggcatgcagtgggggcccccagctcccctctctaccatctgcgtccctccattatgtgggtgtccctgtgcatttgtccttgtcctgccagggacaacctgaaaagcgatttcacgcatgcacagaaagatctagaagccagcagaccccagatgggccatattaaaggacatgtgtgtgacacgtggatggggcgtgcgtgtcagtacatgtgtatgtgtgttcctctgggtgggatctgggctgctatgacagaactagtttccactgaagctgacccaaaaagctgccagcacagctcacacctgaccctcccctcggagcaagcccaagggtggcctggccacctgtcagcctcctgcagccttgcccgcaggaagctcctcctctcccttcactccatcccaccatgacccagccccgacgccgctggggctgtcccagcccctctccttagccgcttgtgccgccatcagaggggcctgtctcgctcccccagacacagagcctctgttttcctcactccgggtctggagtcccctgcttaacagcttggattgaagaggcttgtctggggggactgagaccttgcagatcattccaggagccgcctccatccaaggccaacagcttcatcaggccgcaggcctgggagaaggtgggactgcagttgcccaacatcctgtggctgcccacacggacaccccatgtgcaccccagggctgagagcagggggagccatctccctgtgtgtgggacactgcctgctgggtgttccgttccagcccctctagaatgcatgcttgaatggccagtgaggctgggggagggaccgagagggagccctcacccccagcagcacagagcaggagctggacggtggggctgggggtgaggccagctgagaggggtcaggtcctgccacgggagggggacttttaaagttcctccatggccctggaaccctggagcctcaggagtggcaggggagcttctccggtgagtgacagcctctctggggtctcagggctccctgcctggggccttaggatttctgggagctgcctgccccgacagcgtccacctctctgcccctacagtgcccgcgtcattttccttccctgcctggccctcaccctgcagccccggttgttggaacaccctcccctggaccctgggcccctggagctacctgcagctgtcctgatccgccgaggcctccttttgtggagggctcttcctgtgactcccgcctccggccggcggacccgccggggcagcaggccagcgccgagcgcggcccggagccttggaaaataggagctcagagtagagccctctcctgctggaagagatggctttggaagcagaacccgccccaaacccaattcctggcccggcaggagggggagggggaggggagtaggaggaggggctgagcagggctgagcggggatgaggcttcaggaaggaatgccccgctcaggagccccccccagagccccaccgggaactcatctctccgcctggtgacgtcacgttggcccgagcactgcagcccgagtccagctgttcatctccctcacattctgctgctcggcagggctgcccaggagagggagcaccggctgtacacttgcctggcgtctttggtctgcccccagtgggcatttcggggcaggctggcccaggaggggctagtccccaccccgttgttttaatttactcaggggctgatacagagcagtggggggcagcagggcgagggctccatggaggggcagtgcagaactggcagaggtggtcagcaccgcccaagcggcacccctcccccttcccaccccggactcggcctgggccccctgggggcttatggaaccaggaattcccttttccccagccctaatagcaatcagatggcgcaagtggaaaatcacggcgctcggcaagcaagctggaaattggcgggctgtggtgcctggtgcctgcgctgctcagcgggaggatgagtcaggtcccccttccccattgagcccctggaggcgggcggtgggggggggtcctggaacgcgttcatgcctggggcactgagcattggtaggggtgggggtgcagagtcgggggtgcgggagccagcagggtggccaggaggagggggtgatgagaaggctcccctcctaccctgggccaactttctcagggtccaggaagcccgagggaattctgaactttccctgcaggagtgtagtgcccagactgggagagatgtgcctctgtgggcatcttgaagggaaatgagaagcggagctgcccctgcacctgcgctgggagctgcctgcctcctgcttgtcctggccatgtgcgaacctcagcgtggaagagggactctcgcactgctccctgcgcggctcagctggcctcctggggtccgtttttcagggatggggtgaggagggactctgggatcctggaggctcacgggccatgcctgaggctgagagagaggctggaggcagcaggcagggtggtgacccgtcccctcctctccagggcagccagctggggcccagctggaacgcttgtttacatggggaggccgggggaggctgaatcccggcgagttccaagtgtaattgcgtttggacacttaaaaggaattgtgtgaagtgggcagaggctctgaagtccaccgccttatttggtatggaaatctgtttctctcaaaataagcgagaggcgcttgtaaacgggaaggtcgtcctggcctgagtttgtggagtccccttcccgtgggcttggtgtgtccggctgctctgttgcagtaccgcagaccaggggcttatcggagcaggcgtttgtttcccatggctccgggggctggaaggccaagatcaaggcctccacagattcagcgtctggtgaggacccagcctctcactgagtccccatgtggtgacccctttcaggcaggcgaaggagctcaatggggcctcttttactcgggcattaatgccattatgaggccccaccctcataacctgctcatctcccaaacaccccacctcacacaggagattagatgtcaacacatgaattcagggcagtggggcagcagggcagggggtggggccacaaacatgcagtctgtagcagccaccctgggggtctctccccaccccctgggggagtggtgggctgtgtgtgtggggtggtgcccagaggcccagtgcaaggagttcctgtgctgcctccaggcttgggtgaccgtggacagtttccttcccactggggaccttggtttcctcagctgtcagatgggaaaagataatgacccacagggttatagcaaggagggattggatgccgggaggagccgggagaaagagctcttcatgcacctcagcaacgccgctccctgctccaggtgtcccgctggtgccaggccctccctgcaaggctcagggctctggctgatgctgagaatggggcatgg

SEQ ID NO: 914984 - DNA, 4001 bp, Homo sapiens
tcctccctccctcctcccctcccctccccttctctcttctcttctcttctctttctttctttcttgctttcttgctttcttgctttcttgctttctttctttctttttccttcctttcttccttcctttctttctttctttctttctttctttctttctttctttctttctttctttttccttccttccttctttccttcttttcttttctctctctctctttctctctctctctgtctctctctctctctctgtctctctctctctctctccaaagcaaacacttggggcaaaagctccagatgatccagggctgaggagggagggtgagagcagaggtgggagacgggagcaacccgcagagagcggatggccctggggacgcaggagaggccgggtggggaccagtgtgggaggggatgggaggggaccgaggggatggaggctcctgcatccgccggcccacggggctgggtctgttctgtgcagaagcagcaccacctggtggcctctgctggtgacatcaggcacctgccagtcctgggcctcagagagggggacagagccctgggtgtggtccccgcggggtgggcaggacaatgatggctgagcagggcggggagtaaggagtagttccacctcaactctgtagggggcgaatcagagcctcagccagcaggtggcatggacggcgcccacctagcccaggagtccggaagcctgggttccaatccggccactgtgggctggtggctggctctgttttattgtgcagttttctcccctgtgactcaggtgcagcagggtggggaggggccgggtaaggggatctgggctgggcctgggggcgtggtgcctgtcctcacccctattcaggaggcttctcctttctctctccttgcctgacctctctccagctccattttctgcctccctcatcctcagcaggcctggctggggggtggtcagggccaagtctctccagctgtgtccagcccttgggtgctcagggtaagagctaggtggtgggcggggctcctcctggtcctgaaagcatctgggtgtggggtgagcgagggtcggtgggggtgggcacctcctggcaggccctgtgggcggggcaagcccacttataggagacccatgggcagggactgtcccctggcacccagctcggcgccctcccccagggccctccgcagtaccgacctcagcggctcccgcttcccgggctgtcggcccaaccccgagtagatgaggggcttggagctgctgttgacgcaggccagcagcgtggccagcggggaaaacacgggcagcaggaagttcagcaggggctgcaggctccagtagaagaccgagggcaggccacagaagaagagcaggagcagcgcgcccaggacgatgccgtagagcctgggccgcgggcgagtggagcagcaggtcacccagacaaagaggaccacgccagccgtccaggcgacgcgggccagcaccaggaaccaggtgacgctggccacgtggtagcgcgggcagaccagggggcacgcgctgttgcgcagcaggccgcaggcgttggcgggcagcggcacggccggcagggtcggggtccacaccagggcgcagaggacggccgaggcgtgtctgggccggcagccctggtagcaggcggggaagaggtcggagaggcagcgctccacgctgaaggccgccagcagccagagccccaccgcgaaccacaggaaggtgagcacgaagtagagtgtgtcctgggcgcccagggcagcctgagccacggagaagcccacacggcaggagaggaacaggaagtcggcggcggccaggtgcagcaggtagatggagaaggggcccttcttgatgcggaagccgaggttccagagcaccagcccgttacctaccggtcccccgaggcccacgatcagcgtcaggtagaagaccacactgtcgaaggttctccagaggccgaacagcccaaacatcctggccggctcagagggtgctggcgagggacctgcaagatggagacagacatggtcctcaggagtcttttgtgcccccgctgggggcacagggagtggcatccatggccctgcaggtgccctctgggtgcagcccctggaccacccttcccagcggcgggacctcagccgggtctcagccctctgcacctcaggtcaggcgtgcctaatgcctccccatacctgagggcaggccctgggctcctggcagggtggactaacttgctgaaaagatgtccatgtccctcatggatgtggtgagggtgatgctgcaccctccaccgtgtgccagacaagggtctgcagacagagggaacgtgcatggggaacccacgtgtggcgccttcctcttcccccagaggtgggagcttctccacggtggaccctcatggggctcccacctggtgagcctagaccagcctgctggcgaagtcccctccccggagggtctctggaggtgtccagggaggtgcccaaaggcagaggctgcaggtggtctgaggaggagggaggagggaagatgcggtgtgaggagctggagggagcccccagccttccctgtgcactcctggcctaagcagaagctgaatcccggggctcatgctgccggcggtgcactcaggaggctgctctgaagcctcaagccaagagaggggctttggtgatggtggcagggccagggggcctctccaggagccactaacacaaggggaggggcagatacaagtggccacttgcaaggagcgaggctgagagtcccgaggatgttctcagagtgcgagagagattggccaccggaagctgcgctgaaaggcagagggtctcagagcagcccttccctttccagccatccctcctcccccaggatccacatgggtcatgttcttagtcctgggagatgcatcaggaccaggctcagcagtggcggcgtcagcggtgagagacacgggagagagaagagagatagagagagacagagagacagggagagacagagatgtagacagacattgagagacagagacagagagacagagacagagagctacagagagatagagacagagatagacacagagaaacagagatgagacagactgtgtgtgtgtgagagagagagagacagacagagagagagccatcaagccgccaacacacacctggagccctccctgtcacatctttgcctgggctgtgtcccctgcccagacagccctgaatacctctcccctgacccaggtcccaccctacttcaaggttttgctccttctcaggggcctgcaaccccctgcagcttcctccgacccccgtgagccccctgcctcatggctgagcatcccccggcaccttctttgtgcttgtcattgcccctagtcaggggttggggagtgcggctcgggccttggctcctgtgccttgccatggccgggcacacggtgatggtggcctgtcctccgagcccaaccaggggcagtgggagacctcggccgggccctggcttgtggtggtgagtgtggtgactgggggtggggtggtggggtggaaacacacctcccctctctgagcctcaatttcctcaaggaggaaaccagactctcctggctgtgctctggctctggctcagagtctgaggctgggggtgaggccggcgctcaggccccccatgctggggtgaggttaggctctattcctggagagagagttacagagaggagtggcccggcggcaggagggggcatcttcattgttatcagaacaggttcacctgctcggcccgctccagcgacgcccttgagctctggtgtccacacatttcaacttagccggaattcccacccgcatcccgccctgccttcccttcccaaaggaaatccaaacatcccagccagccccatccaccggggagccaggctgagagcaggggccactgcggagggcaggggagggtgccagtgcctcacc

SEQ ID NO: 914985 - DNA, 4001 bp, Homo sapiens
tgaaagagtctgtaagcaaataataaatggttttcaagataatttccactttgaaaccaatattgaggtttccaatggccaaaatagaactggggcacatttatgggctcctcactggtccattagtccaggaagagctaaataagcacttaaaagttctcaaggggaaggggccacagttgtctttactagaaaccaaggccaacatatcaccatgctgtgaacaaatgacaggggaagactttttataaaaccaataggtgagagtgtttttatgaagagagagtctgtctctaaggacattattttgctctgtatctgagaattcaatggaatgtagagatagcagaactcacttattaagaatcgagcttctaactgcagtaatgcctccagtcatagaagggaacatgattttcaggggaacatagtctgagagattaataaggaatcttcctttttgatgctatcaggtaggaaagaagtataaagagtgttttagggttttgtacaggaactccttttattacaaagaaaattgcagaaaaagtgttctgtaggaaagattcagtgtgagataacagggaaaatgtgttggtaatatcaaggagaatctaaacattgtactgtcagactaatgctttccatgggtgaaaaccgcaactgtcaggttagataaacatctatttgaagaccttgaggaaccactgagacatttctgaggcagaaggctaagaaaaacgcatataattgtcaagggtggcagggcagtgttgctctcaaagtcctgtctgacagggcagaggctcttcctcactgctccaatctgcttcccgacagctccaggatttcctcaggaagctgccctccaccttcatccacctcagacgcgtcctgcagagccctctggagaaccagcttcaggttctgcctattttgacgctgcctaaaggagcccacgaagaagtaaatgatggggttggcactgctgttaagagcggacaggaaaatagaaactagatgaacatgacaaaataagacttccctgtccacgtggatccataaaaataggaaaaactgaatgccaaagggcaggccacagaggaggaagaccagtactgtgagcaggatggtcacgtacagcctggtcagcggtatcttccgggatccacagagaatcctgatcagcaggaccaggctggacccacagagaaccacacataaaaaaatcagccacgcgactgtgatgaaatctgatgtttgacaccaagcagaatcagcaccactgaacaggaagccacataacatccactccaggatgctccgcagcagggacagggcccagagcaggacacacaccaccgctgacaggtgtgtggggcggtggcagcggtaccagatgggccacaggacggacaggcagcgctcggtgctcacggcactcagaaagctcaggcctgcaaagtaggaaaacatcatcacaggatagaggattttagagatggtatgggggatactgatgaagcttaacagggaatatataaggcggccgctgaggaagaggaagtctgctgcggccaagttgaggatgtagatggagaaggcgttcctgcgcatgcggcagcccaggagccagagcacaactgcgtttcctgtcagcccgacaagggaaacgatgcacgtcagcaccgtgaggctcaaggtctgcttgtagcaaagagtctcctcagttccgttgattggtgtcagttctgtgtccaaggttgagatggttggatccatgctcagaaaccctagtctggtgaccctggaaacagaaaccagttgtgatcaccagctgtatgatctctgattctccccaccaccctgccatgtgggatttacttcctcatttaaagagggcagatcagagactcacagagaataagtcacctatcaaaaggtgggggtcctcaaatccagtttgaaatccagttcttgctgactctgaagcctgacctctctctactgccacacaagttctgtgctaacatgggaataacattaggatcaaaacacccccactcatctagccagggctgtggacccgatgattactctatcctgggcctgaaattttctctcagggggaggaattcaggtatgcaaagaggtggttgtgacaccctcatgaccaggactgatcatccatggacaggaaaggagaccatgcattatgaaccagaggaaaatgtgaccttcgctaggataagtgtgaaaatggctgggcctggtgggtgagaaataactcagcatgtcagtcattgcagacaggaccacattttacattttatactcctagtgcctattccataagcagcacactgtgcttttcatatacattcattcaatgaatgaatgcatgcatgagaagcctaatggtaatggtagatttgggtgaaatggaaaacaaaaatgaaagcacaatgtaagttattagaacacccatgtttaattaggtacagaaaatttcattcatcagaattctatttgtggacagctctatctgtgttgagaagaatgattgatgagtgcccaaaacctgaaattgaccactgatgtgcctttaaaataaggactcagtgtggctttgccgaacccctagaagcattttgtacacagtgttttgggtagggtgtgggtctgagctgaattgctcagcaatagaacagaggaaagagtaagtgagggtgagcctgagtgccactgcagcaggtaattaaagtgtgggaatatctgtggggcactactgagtattctgctgagtatacacaatataaacctatttcattctttctttcaggagatctttggttcgtttctttgttgatgcaaacatttgtatgtgaggagtccatgaggcgaaataggagatatgtagggcttggagtataaagagagatattcatgtagatttcaactggagaatgaggactgggtctaatctgggagaataagagcagctgatggagagtttattaggtattgtctgttttaattatctgaagagcctaggagttaagaatgagtattattcccatatgtcagataatgcattggaacacaaaaagagtgaattattcattctgggacttatatagtatgaatttgagcccagcagggctgactcatgatccagtctttgagcagccctttacacccagcacgactctgtgtcgattatacatgttagagcgggtaaaggagaggagggattctcaagattaaatccaagttggcggcaaaattgtgggttgaaaaaaaaaaaaactaacctaaaccaacttcagatagagaaagagaagcaggtcaaatagggaacaaaatagagaagagtgaaagccatttagtaacaaattcaggagttcctttttgcctatcagaggccacctttgctctggaatcccgagaatgcacagggacaggaggcctccaggtggaaagaagactcaccctcctctgggattacagaggagcatcaggagtgagtgcatccatcatgagctctcttagagagacaagctgccacagccttgcttggcccaaaaaggaaatgggaggaaaaggagaacctctgttatccacaggcagggcactaaacacattgtccctctatatttagggtaatggtgtgtttgtcttcctcatgaaacctgaagcttcataacggctagtcatgcctgtcttttccactgtggtatcaccaacatttagcatgtgttctttaaagatcatctatggtattatcttaatataacataagatgaagccgaggcctagagaattaaagtgttttcatgagttcacaacacgaagagcaggcccaatgccagcccctggtccctggagccctgcatgagacttctgtatggttctctgccgcatgattcattatttcagaggagttcctgaaaaatcttgatgtgagtacagaatcagagacagaggcagaagagactgct

SEQ ID NO: 914986 - DNA, 4001 bp, Homo sapiens
tcccaaagtgccaggattacaggcgtgagccaccgtgcccggccctgcacctgtatttttaagtgtatgtctgttttttcttttacttccctcattaagctcaacatttttgttgtggttgttcactattatatccccagcctccaacacatatcccttggaggccatctattgtaatacgctcatttaacaaagaaagacaggcttaacgtgtacaaaagagtttcctgaatcacatggtgaaaagcaggtccaataccagctccagtctcctggggccctgtcctaggtttatttctgttccatgtctacatcattcactatttgtgaggcagtgttgagaaaaatctccaggtgagcacagatgctaaaagagaatcgggctatagagactgcttgttgccccaaaagccattctccttttctcacacataataattctgagtcttagatcagaaaaaggcccatttctcagcttccctttatgctaatggcaccatgtaaccatatgtgatggtcaaggggaggtgagagaaagtgatataaccagctactcctgtactctttctttttttctcttctctctggctggaatgctgatgtgtttgggagccatgtaggaccatgagggtaagggtaccgctttagggatggggaaatagaaattggaaggagccttgatgtttgatgtcttagagttatcagcccaagtctagtaaacattctttttgattatcactataataggtttctttttagagaagccaaaatcataaacttacattacacatacctgtgtacttatagctgggagtacctatgtactcccaatccctttttttcccaaccacattccattctcaaggcatttatgatgatagtgagagactagtccaaagaagtgacactagatgggaaggtcaaacaattaaaaaaaagggaggtgatagaatgagaaattgattcaatcacattaatagagaaagtctcaggaaagacaaactgagaagaggctatgggaagaaatggactttcctatttgctattaggatctcatgtccatccttctctacctgcctttgcatcctgggaggagacatgtctgtgcctcgtcaatgggctgtctttcactcaggctccaaagggtacacattgacaggagattggagggtgactttttttttcagccaaagggacacattgacagtagattgggggatgattttttaaaaatttcctggctctctccctgcgccctgaagggctgtgagttggcagtggcagtgtttttctacctaaggacatagccctgcctggtggccctttcctgtagccacagctatagttacagttacagttaccgctacagcacattctgagttctcagaacttctctttctccttatcacttcagacctagcaacggtaacagccctccactatcacttgcctttgagggcttcatcattccttaatccctgttcacgccgttgtaaacagtctcttcactaaactcctctaaactacccctttagagtgtgtgatgtgtgttttctgctgggacaatgacagatatgaaggaaaaaccttttgaataacaagaaaatcagtgcaacctgaggttttaaataacaatttagcttagggaagtaatgacttcattctagcctgcccctaaattaaaatcagcaaaatctttctctccatagtttcagatttgaatggtcgaagagaaggggagaatattggtagatagaagagaagtgggacgaacctgcttgaccccattcggatctcccagcatctaagctgccagcatccaaagcttcctcaaaggagcttcctgtcttcttttcctaatgaattcatcaggatgtggactaaggtaaaaaccaaaactgcctttgaaagaagatggttcttgaacaaactcttaccttaacacccttctttctactggagttggtgagttgagaagtgctttcctgggactggcaaacagctgaggatggggagatgcctgcaggatctggagtgaaacctgatgactgagtgaagcttatcaagatgctcaacaaccctgtgatttcctgtacagagggtgctggaaaataagagtatgacacaggaaaccacatgagatgtttctcagcatttgccctgactccaatcacttatcttggtttctcccctaccctctccggccccactccctgcaaggaatcaccgtcctgaagtctttcattgcccacaatgagcatccaggaagcagaccaatcaagcgacgtgagctttcatagctaaagaatagtctgccctcttctgcttggcattcaaggccctggcttacttgacctttcaaaatcaggtttatttcaaatgacactaaggtgtataaaatgaaatgcaaagtctctcgaagtctcattccccaaaagcaaccactgcatacagtttccattcttttttttaaaaaagctttgcgtaataaaacaacatttctatttttgatttatcgatgttaacaactagatatattgagtctccttataaaatataggggacttagcacatcacatgcaccatctgtcacgtttctccctctacatcatgatatttattagctagattatttttagatcatctagagccaaccaatattttcagccttatctcctatgacttcctttcatgtgcctatgctgcagccaaattgagttataagtaacaattatgaagcatttaagacaatcagaagaaattattcactcatttattcattcattcaacactgtttattgtttgcctatgatatgtcaggtaccgttccaggcaatgaagacacaatgatgaacaccatacaagatcatgcccctttgcattccagagcagctgggtgacctcagacagggaacatgtgttgattgaggcgagttctgagactcagcattttcttgtattatactttggtgcagtgggtaaaccatgcatttgtccccagaaatctgctttcctcatgagcagcagcaggaccttagaaagctttaacttctgttactgtctaacctactgtgctctattatttgattttgattctgtttccctccaacaaatgaaacacttattattgttttaaatagtcagtgtttattcagatttatccacataatcaccaatgcttttgctcatcctcccattttacatctcatatcttccatttctcaaaacacattcttcaggagttccttctgtgagagtctctgcatggtaaatgcctccttttatctatctgaaaatgtcattgtttcaccctcgtcttctaaagatggtttttccaggcatggcattgtagggtgatagtttctttcttccagcacattgaagatccatgttctgactgccagggttactgttgcggccatcagtcaggttgccatttgcttgtggtgatctgcctttttttcctctaagagcttttatttttctctgctatgatacattctcaccaaattgtatctggtgactctttttcaaatcatgtttgggatttgtggagtttcctagattttaaaattatcatcatttaacatttttaaacaatttaatgctataatctctttaaatattaacataacggtgaagaacacaagaccaggctacttggcatttctcctatgggaccttagccagattttgtaactctgttatgtttgtttcctcatcagtaaaatggggataacattattaatctataggtttgctgtgaagattaataatttaatgtatataaatgatttacaataggagcacatagtaagtactataaaattattagctctcattatcacttttagtattatctctttctggaagtctaattcaacatatgttagccctcttcttctatcatccttatttctttaaccttttccttatgtctcgtctctgtctctgaggctgctttctgggtaatttcttcagatgtatcttccagttaacta

SEQ ID NO: 914987 - DNA, 4001 bp, Homo sapiens
aaaaaatgctcaccatcactggccatcagagaaatgcaaatcaaaaccacaatgagataccatctcacaccagttagaatggcaatcattaaaaagtcaggaaacaacagatgctggagaggatgtggagaaacaggaaagcttttacactgttggtgggagtgtaaactagttcaaccattgtggaagagagtgtggcgattcctcaaggatctaggactagaaataccatttgacccagccatcccattactgggtatatacccaaaggattataaatcaccctgctataaagacacatgcacacgtatgtttattgtggcactattcacaatagcaaagacttggaaccaacccaaagatccaaaaatgatagactggatgaagaaaatgtggcacatatacaccatggaatactatgcagccaaaaaattgatgagttcatgtcctttgcagggacgtggatggggctggaaaccatcattctgagcaaagtatcacaaggacagaaaaccaaacaccacatattctcactcacaggtgggaattgaacaatgagaacacttggacacagggcagggaacatcccaccctggggcctgtcgtgggagggatagcattaggagaaatacctaatgtaaatgacaagttaatgagtgcagcaaaccagcatggcacatgtatatctatgtaacaaacctccatgttgtgcacatgtaccctagaacttaaagtataataataaaaaaaaagtctcagcaaggtttgaaggaatgttatctcttgcagctgcaagcaatgcaggtttttttgcaatgcagatttttttgcatgcaagcaatgcagttttttttgcatcataaacatatccttgcaacagttatttctaacaaaaaaaaatcttgaaagatttttcttttttttttttctttttttctttttttttaaattttatttttattgatcattcttgggtgtttctcacagagagggatttggcagggtcataggacaatagtggagggaaggtcagcagataaacaagtgaacaaaggtctctggttttcctaggcagaggaccctgaggccttccgcagtgtttgtgtccctgggtacttgagattagggagtggtgatgactcttaacgagcatgctgccttcaagcgtctgtttaacaaagcacatctttcaccgcccttaatccatttaaccctgagtggacacagcacatgtttcagagagcacagggttgggggtaaggtcacagatcaacaggatcccaaggcagaagaatctttctttgtacagaacaaaatgaaaagtctcccatgtctacttctttccacacagacacggcaaccatccgatttctcaatcttttccccacctttcccgcctttctattccacaaaggcgccattgtcatcctggcccgttctcaatgagctgttgggcacacctcccagacggggcggctggccgggcggggggctaacccccccacctccctcccggtcggagcgtgtggcctggcagaggggctcctcacttcccagtaggggcagctgggcagtggcgcccctcacctcccggacggggcggctggccaggcggggggctgacccccacctccctcccggacagggcggctgccgggcggagacgctcctcacttcccagacggggtggctgccgggcggaggggctcctcacttctcaaacggggcggttgccaggtggagggtctcctcccttctcagatggggcggctgggcagagacgctcctcacctcccagacggggtcgcgaccgggcagaggcgctcctcacatcccagacggggcggcggggcaaaggcactccccacatctcagacgatgggcggccgggcagagacgctcctcacttcctagatgggatggcggccgggaagaggcgctcctcacttcctagatgggatggcggccgggcaaagacgctcctcactttccagactgggcagccaggcagaggggctcctaacatcccagacgatgggcggccaggcagagacgctcctcacttcctagaaggggtggcggccgggcagaggctgcaatctcggcactttgggaggccaaggcagcggctggggaggtggaaggttgtaccgagccgagatcacgccactgcactccagcctgggcaccattgagcactgagtgaaccagacaccgtctgcaatcccggcacctccggaggccgaggctggcggatcactcgcggttaggagctggaggccagcccggccaacacagcgaaaccccgtctccaccaaaaaaatacgaaaaccagtcaggcgtggcggcgtgcgcctgcaatcgcaggcactcggcaggctgaggcaggagaatcaggcagggaggttgcagtgagccgagatggcggcagtacagtccagcttcggctcggcattagagggagaccgtggggagagggagaggagggagagggagaggagggagagggagagggagagggagagggaagtccaggattttcttttgtggtgatgaaaatgttttggaactagatagaggtgggtataacattatgaattaactaaataccccgaattgtaaactttaaaataattaattttatatttggtgaatttcacctcaattaaaaaaaaaattagaaaaaggccaggcatggtggctcatgcctgtaattgcagcgctttggaaagccaaggtaggaggatcactttgtgcccaggggtttgagaccagcctgggcaacatagcaaaaccctgtctcaaaaaaaaaaaaaaagaaagaaagaaaaaggaaaagaaaaaaaagaaagaaagaaagaaagagagagagaaaacggtagaagaaatagggactaaaaacattatatactgtagtctactccagtgatttaatagatctaaaaggctcagaaaactgagccttttggagatggagagaccttcccaaaatcacatcactggctagaagcagagaggtagggcaagaacccagaaattccataccactgaccacccagcgtgtgtgtctgatggagttcagcctcagcaccttttccctagctgactcgtgagattaccgaaagatttttctttcaagtctttcacccagacttcaaagatgattttatgtcctattgttacaggacagggctcaggatccagacccccaagagagggttcttggatcttgcacaagaaagaattcagggcgagtccacagtgcaaagtaaaagcacatttattaagaaagtaaagtgacaaaaggacagctactccatagacagagtagaacgttcctgaaagtcagaaaaggaacgtgtccaccctaggcacaattgcttgtatacatggggagatgtgttctgctacaagggtttgtgataacagatttcttcttttctttttctttttcttttctttctttctttcttttttttttttttttgagacaaagtcttgctttgttgcctaggctgtagtgaagtggcacaatctcagctcgctgcaacctctgcccaccaagttcaagcgattctcctgcctcagcctcccaagtagctgggattacaggtgcccaccaccacgcacagctaatttttgtatttttagtaaagacagggttttgccatgttgggcaggttggtcttgaattcctgacctcaggtgatccaccgccttggcctcccgaagtgctgggattacaggcgtgagcccccgcacccagccctgttttcttaattactatattttgcaagaatcaatattattatctttttttttttttttgagatggagtctcactctgtcacccacgctggagtgcagtggcacaatcacggctcactgcaacctccacctcctggattcaagcaattctcctgcttcagcctcccaagtagctcggactacaagcgcgtgccaccacactcagctaattttgctttttgtatttttagtag

SEQ ID NO: 914988 - DNA, 4001 bp, Homo sapiens
cgtgtgaccatgtgtggacaaatgacaggagagggctattcataaaaccaatttctaagactgtttttatgaagggagaatctctctctaaggacattattttgctttatatctgagaattcaatggaatttagaggtagcagaactcacttattaagaattgagcttccaactgcagtaatgcctccagtcatagaagggaacatgattttcaggggaacatagtctgacagattaataaggaatcttcctttttgatactatcaggtaggaaacaagtataaagaagagttttagggttgtggacaggaactccttttattacaatgaaaagtgcagaaaaagtgttcagtaggaaagattcagtgcaagataacagggaaaatgtattggtaatatcaaggagaatccaaacattgtactgtcagactaatgctttccatgggtgaaaactgcaactgtcaggttagataaacatttatttgaagaccttgagttaccactgagacatttctgaggcgaaacgctaagaaaaacgcatgtaattgtcaagggtggcaggacagtgttgctctcaaagtcccgtctgactgacagggcagaggctctccctcatggccccaatctgcttcccgacagctccaggctttcctcaggaagctgcccttcacctttatccacctcaggcttgtcctgcagagccctctggagaaccagcttcaggttctgcctattttgacgctgcctaaaggagcccacgaagaagtaaatgatggggttggcactactgtttagagaggacagggacatgcaaaccagataaacatgacaatataagacttccaaattcaggtgcatcctgtaaattagggcccccagaatgccgaagggcaggccgcagaggaggaagaccagcactgtgagcaggatggtcacgtacagcctggtcagcggcatcttccgggatccacagaggatcctgaccagcaggaccaggctggaaacacagagaaccacacataaaaaaatcagccacgcgactgggatgaaatctgacgtttcacaccaactagaatcagcaccactaaacaggaagtcacagaacctccactccagcatactaaacagcagggacaggccccagagcaggacacacacgaccgctgacaggtgtgtggggcggcggcagcggtaccagatgggccacagaacagacaggcagcgctcggtgctgatggcgctcagcatactcaggcctgtaaagtagggaaaggtcatcacagaaacgaggattttgcggatgagatggctgatattgatgaggcgtaatggcaaacgtataatctggaagctgaggaagaggaagtctgctgcggccaggttgaggatgtagatggagacagcgttcctgcgcatgcggtagcccaggagccagagcacaaccgcgtttcctgtcagtccgacaagggaaatgatgcacgtcagcaccgtgaagctcagggtctgattgtagcaaggagtctcctcacgtccgttgattggtgtcagttttgtaccgaagactgggacggttggatccatgctcagaaaccctagtctggtgcccctgggaacacaaaccagatgtgatcaccagctgtatcatctctgattctccccaccaccctgccgtatgggatttactgtcctcatttaaagaagagagaaacagaggctcgcagataataagtcacttaccaaaggtgggggtcctcaaatccagtttgaaatccagttcttgttgactctgaagcctgacatctctctactgccacacaagttctgtgctgacatgggaataacattaggatcaaaacacccccactcatccggccagggctttggacccgatgattaatctatcctgggtctgaaattttctttcaggtggaggaattcagatacacaaagaggtggttgtgacacactcgtgactaggactggtcatccatggacaggaaggaagaccatgcattatgaactagaggaaaatgtgacctttgctaggataagtgtgaaaatggctgggcctggtgggtgagaaataactcagtgtgtcagtcattgcagacaggactacattttacattttatactcccagtgcctatttccatgagcagcacactgtgcttttcatatacattcattcaatgaatgaatgcatgcatgagactaatggtactggtagatttggatgaaatggaaaataaagatgaaagcacaatgtaaggtattagaacacacacgtataactggatgaagaaaatttaattcatcagaattctatttgtggaaagctgtatctgtgttgagaagaattcttgatgtgtgcccaaaacttgaaattgaccactgatgtgcctttgaaatgaagactcagtgtggctttgctgaacacctagaagcatttttgtacacagtgtttgggtagggtgtgggtctgagctgaattactcagcaatagaacagaggaaagagtaagtgaagatgaggtctgagtgtaactgacggaggtaattgaagtgtggaaatatctatgggggactactaagtgttctgctgggtatacacaatgtaaactttttggttctctctttcaggagatctttggtagcatttctttgttgatgcaaacatttgtatgagaggcgtccatgaggggaaataggcgatgtgtagggcttggagtgtaaagagagagattcatgcagatttcaactggagaatgaggattaggtctaatctgggagaataacagcagctgattgagagtttgtaaggtattgtctcttttaatcacccgaagagcctaggaggtaagaattggtattattcccatatggcagataatgcaattggagcacaacgaaagggaattatttgtcccaggggttatgtattacatagtatgaatttgagtccggcaggtctgactcacaatccagtcttggagcagccctttatacccagcaccaccctgtgtcgattatatatgttacagggagtaaagcagaggagtgattctcaagttaaatccaagttggcagccaaaattgtggattgaaaaaaaaactgacctaagcaaactccacatagagaaggagaggcaaatcaaagagggaacaaaatagaggtgagtgaatgccatttaggaataaattcaggagttcctttttgcctatcagaggtcacatttgctctggaatcctgaggatgcacaggggcaggaggcctcctggtggacagaagatgcaccctttgctgggagtacagagaagcatcaggagtgaatgcatccatcatgagctctcttagaggggcaaggtgccacagccctgattggcccagaaaggaaatgggaggaaaaggagagcctctgttatccacactcagggcactaaagagtttctctatctatatttatggtatgatatgtttgtcttcctcatgaaaaccaaagctccataaggactaagtcatacctgtcattttccctgtagtatcaccaacatttagcctgtgttccttaaagaccatctatggtattatcctcatataacataagatgaagccaaggcatagagaattaaagggttttcctgagttcacaacacgaagagcaagtctaataccagcccctggtccctggaaccctgcatgaggctccagttctgttctctgccccatcattcattatttctgaggagttcctgaaaaatcttgatgtgagcacagagtcagagacaatcagggctgaagagactgctagattgccccaatattcattttcctcttcggtcacataacaattctgagagtataaaagcagcacaaagacccacatcccagttttccttgatgctggatgacattgtatgaccaggtgctgttaagtggaagaatcacaaagtgatgtaagcaattccttgctcacaggatcaatagaaggagtaaagcctct

SEQ ID NO: 914989 - DNA, 4001 bp, Homo sapiens
tctcccacttggatccttcatggagatctttccatttcttagaacatttgcagaacaacgtctaatacataacaggtgcccaataagagtattccagatcaatgaatgtggcctcccacccccaccccatcctctagaatctagggtcccttgacttaaaagctgactttcccactgcaatgggccctctcagctctgcccgagtccagagctttctgggccctctcgtcacactgcacatgccaggatacttactccttcaccacgcgaatgcccagagaacgggcagacccgatgatggagcggacaacagacgacaggggtacatcctgcagggcaaatgcctcatcctgagctttgatgcgggcaatctcatacacatgcttcaaggtcaccaggcctgccacctctttccctgggaggaaggaacaagtggctcttcaggtgttactgcttccttctggagcccccagaatctcagatgcttaccctggccctcacctgtttgccgggcccccttttcaatcccagctgctgccttcaggaagtaggaaacagtgggctgtccaatcttaatttcaaatgtcctgtcaggcttaacagaaaaaagaaatatgagattctctcttcctactgccccatcccagggaacttctaatgtcttgccccctgcttccttcatctcactttccaatggcatccctcaaaaagaccacagaatcacaagaaaaaaataaatcggggtcaggcgcagtggttcatgcctataatcccagcactttgggaggaaaaggcgggtggatcacctgaggtcaggagttcaagaccagcctgaccaacatggtgaaaccccatctctactaaaaatacaaaaaattagccgggcgtggtggcgggcgcctgtaatcctagctactcgggaggctgaggcaggagaattgcttgaacccgggaggaggagattgcagtgagcggagatcgtgccactgcactccagcctgggcgacaagaacaaaactccatctcagaaaaaaagaaagaaaaaaataaatctgcagcaaacatccctgtcccctctattcctgccctcattctgctctggaagccccagtgagatggaggggcaaagggaggaactgcaacatggcaagatggggctggttcagaaaaaatatgatctagtcctaaatggggaaagtggagcccagtaataggaagtcaagtcaggagcagagaaacaaccccagatgaccagtcccagggccgaggaagaacagagggagaaggaaaccagggatcagagtccagactccaccttcactaaaatcttggtaggcagaggaatgccttccttgatgtcctttgtcctctcattgaactccttgcaaaactggttgatggaaacgcctctctgtgagggaagcagagggggttagtggtgagaggaggggacggcttcctatcgcccaggaggcgccgtccgttccctccttcgtcttcacttctctgggttcccatctgtacccagattcaactacccctccgtgagccagaagatcgtacgcatcttcccacgttatcctcattacagcacattgaagaagggatgaggaagcccaggtggaagacactttgtaaccagcacaaggacataaagcgtgtgagaagcagagccgagctctgaaccgaggcccgggtggttccagggccagcgccctccatccgcgtcctagcttccaccatcctagacaacccccacgtcgggttcccgccacggccgcacctgacccagcactgggcctagtgggggcccgggcatggccaggcctgcccgcacgatcgcccggatcacaccgccgacctcgggcttcctgaggccccgggcggcccggccgagctttgacatgatgcggggctgctggcttcagttcacctcaggggagcagcaagagcgaagctctgggcgccaccatcttgggccagaggtcaagggtcctcacgttaggctagggcaggtgaggccaacaaacagcagccttgtttcaaccctattgctcgccaactagtaagacaaggaggatgagaggaggataaaacactttttaacttgttttatgcagataaaggaagggcccgaatggcctaggtacacacattcccacaggaacgcgcacaggcactacctcggacagctaaccagtagggtgggaccttgataccccatagcattgtgggtatggtagttttgactccgtgtgcaggtccggccaattgctatgcgccagggcgccatctgctgcacacggtgataatcctagggtttgaaatacacctggagctcctgattggtaatggaagtctctcctctctctgttcctcacatgctgttgaaaggcagtacggttgagtgtagaccctgagctgggcacggtaacttacgcctgtaatcccagcactttgggaggccaaggcaggaggatcgcttgagcccaggagtttgagaccagcctgggcaacacagcaagaccccatctctactgggcgggaagatcagttgagtccagaagttggaggcggcagtaagccaggattgcgccactgcatgtgaacttaatcaagtttcttatgctttgtctcctccccactacagcaggtattgtaatatgtagcacctacctcttaggattgctgtgaggactaagttagcaaagtgcttaaaacaatgcccggcacctagtcagcatgtgctattattaaccgtacgattaagataaaacctgagttgttgtgaggcttaacagacccagaacattcgatatatcatctgtgaccaaataagccagcatcttattgtatcatgaggagagcaaaaatcacctggtgacctttgaatcatgaggagagcaaaaatcacctggtgaccagagacaaaaactccttatctgaggaattgaaaagtaattaaacttccctagtgtgtccggaattggtgggttcttggtctccctgacttcaagaatgaagccgtggacactcacggtgagtgttacatttcttaaaggctgcgtgtctggagtttgttccttctgatgtttggatgtgttctgaatttcttccttctggtggggttcatggtctcgatggctcaggagtgaagctgcggaccttcgcggtgagtgttacagctcttaaggcggcgcgtctggagttgttcctcccagtgggttcgtggtcttgctggcttcaggagtgaacctgcagacctttgcggtgagtgttacagctcacaaaggcagtgtggacccaaagagtgagcagtagcaagatttactgcaaagagcaaaagaacaaagctcccacagtgtggaaggggacccgagcgggttgccactgctggctggggcagcctgcttttattctcttatctggcccccgccccacatcctgctgattggtcccttttacagagagccgagtggtctgttttgacagggtgctgattggtgcgtttacaatcgctgagctagacacaaaggttctccatgtccctactagattagctagatacagagtgtccacacaaaggttctccaagtccccaccagagtagctagatacagtgtccattggtgcattcacaaaccctgagctagacacagggtgctaattggtgtgtttacaaaccttgagctagatacagagtgccgattggtgaatttacaacccctagctggacataaagattctccaagtccccaccagagtagctagatacagagtgtcgattggtgcatttacaatcccatacaatcctagacataaaggttctccacgtccccaccagactcaggagcccagctggcttcacccagcggatcccgcacccgggctacaggtggagctgcctgccagtcctgcgccgtgcgcccgcactcctcagcccttgggtggtcgatgggactgggtgccgtggagcagggggtggtgctcgtcggggaggc

SEQ ID NO: 914990 - DNA, 4001 bp, Homo sapiens
cttacttgacgatttggggaaaaaagttaacatacaaatcatttttaaaaatttcttaaatgaaccaagtatggctttataatggagacaaatacaaaatagaagagtttgaggaaataccaaattattactatcagagtttcagaagctgcccctcaacttctatatgtagctacagagaatcttagtaatgctttctttcacctacaagtcaaaatgtactttcaaaacgtggtttaacaattctgtacagaagaccctcagatgtacagaccctattcattttttttgagggttccagtatatttcttttttaaaaagtaaactagttttacgatattgtggcttaaatttaacaaattaaagctttttcacatatcgttagatgactgcatatatgtaaacttatttggaaagaacatcaaaagttcaggttttttttttcttttgagacagagtctcactctgttgcccaggctggagtgcagtggcctcctgagtagctgggattacaggtgtaaactaccacgcccagctaattttttgtatttttagtagagatggggtttcaccaggttggcaggctggtctccaactcctggcctcaagtgatccacccgcctccgcctcctaaagtgctgtgattacaggcgtgagccaccatgcccgctcaaaaatccagatttcaggccaatgactactggctgagtggaccatgggacacacaccagtgggaggttttaggggagctatctcattagacgctgctccgtaagagcaaggaacttttttggtttcctttgtctttgatttatttctagtgctcagaatattagttggcaaaactgtaagctctaaaaacatatttattgaaagagtgaacggggatgggaaacacgagaacattcctatgtcatctcccacccgctcctggtttccatcagagaaaagatttacgaacaggagaaagacaagctctcaccttcaaaacttggtactgggagcagtgtctttacgccagcactggcggggaggagtgcccaggaatctacaaagacaaatcaagttaaacgacgaaggtaacaggccgggaccccgatacaacctgggccaaaggtactacttcttatttttatttattttatttttttgagacggagtcttactctgtcgcccaggatccagtgcagtggcgcgatctcggctcactgcaacctccgcctcccgggttcaagagattctcctgcctcagcctccggactagctgggattacagtcgcccaccaccacgcccagctaattttttttgtattttcagtagagacagggtttcaccatgttggccaggctggtttcaaactactgacctcaagtgattcgcccgcctcggcctcccaaagtgctgctattaaaggcgtgagccaccgcgcccgcccaaaagtacttccgccggaggagtcttgaggtgtgggatgcggattccactaaatggactcaaaggctcaggctccgcaaaaggccagccgggatctctgggcgccgactcccagacgcagctgtgaccctcttgcacgaacccctacggtggaggtcggcggtgcgatagcgtagttcctaaccagtgcttcaccaagcatatgcagagccgccttttgggttagggagaaaaagcactggagggtgggggaggaagaggggtaaagtctttaggaaccaaaagggacttctgacctgacaagggcacccgcaggagcggcgcactagcgcgagccagcagcctccacatggtcacgggcgtccggcggcgcggagctcccccagcgactccggctgtctcctgcacccaggtaagcagcggcgctccactacctagctgtaatcggctcaggacaccgctcagtggggccggaagttgtgttcactcgggtccactccgcagagtcccgacggaagcgaaagaaactcgagcgacgggggttgagttccgggggaggttgagttcctgcggtcaaaggcgccgtccgcccagccacgcccaggggccctgttggctctctagggttctccttccaatctccagtctttccccagaagaagagggcggcggggcggggagtcttttgttttatttatttatttttctgcggagtacaactgttagtgcctgccggttgcttagcaaggtggtcccttacgattcacagcctttgagatgattttctaggggacccctcaaagacattaggagaataccagatttagcaatggtttaacatgtatagggcaattgcaatgtgtcattgagtacctcattcgttagtcctgccaacgaatctgtgagataagtcattatacttattttgcagattccatcctgagggtgaaataatttaacttgttctgggtcatacaacaggaaaacagtaccatcagaatttgagcacagtctgtgattccagagatctcagtgaatgaacaatattgttgatgaaaagagtgaaattctgtaagatattggaagagatttattctgagccaaatatgagcaaccatggcctgtgacacagccctcagggggtcctgagaacatgtgcccaaggtggtagaagtgcagcttggctttatacatattagaggggcatgagacatcaatcaaatgcatttaagaaatacattggtttggttcagaaaggcgggacaagtcaaggtgggcttctaggctataggtaaatgtaaacattttctggttgacaattggttgagtttgtccaaagacctgggatggatagaaaggaatgttcaggttaaacataaatgattgtagagaccaagttttattatgcagaggaagctcttagatagcagactttagagaaagactgttgtaaattgtttttttatctgacttaaagggtgcctggaggccgggcgcagtggttcacgcctgtaatcccagcactttgggaggccaaagcgggcagattacctgaggtcaggagttcaagaccagcctgaccaacatggtgaaaccccgtctccactaaaaatacaaaaaattagctggacgtggtggcgggtgcctgtaatcccagctactcgggaagctgaggcaggagaatcacttgaacctaggaggcggaggttgcagtgagccgagatcacgccactgcactccagactccagactgggcaagacagagaaaaaaaaatatgcctggctcttagttgattgtctcctggatctgggaaggaaggaaggaaaacaaaggggaaagagaatacctatagaaatggatttttcccgcaagagactttgcagggcaatttcaagatatggcaaagaaatatattttggggttaaatatttttttctttgtctcataatgttatgccagagtcatgttgaaaagtaagtcacaatatatagggtaaaataaaacctatatgatgagaatttatggtttgtagggcatgattcccttaggtaggaatttgggcaagataaaaaatcagagcttagtcctcaagttgaatattgtgcaatattgttttgagtgaaaaatgaagtggcactaaaatcacggtttgattggtctctaagtcttttggtaccccaaaacttctaccttattgtttatttcaaaagagccaaaaagtgcaatctacggatccagtgcaatccctatcaaaattccaatgccatttttcacagaaataggaaaaacaacccttaaattcatttggaaccacaaaagaccctgaatagcccagacaatctggaacaaaaagaacaaagctggaggcatcacactccctgacttcaaaacataagttgattgtaatcgaaacagcacggtatggcagagaaatagacacactgaccaaatgaataggatagagagcccagaaataaacacacacatttatacttcattgatttgtttttttttttcttgagacatagtctcactctgtcgcccaggctggagtacagtggtgcg

SEQ ID NO: 914991 - DNA, 4001 bp, Homo sapiens
tcaccaagaggaaggagcttatcctggagcccaacatcctctgctgaatgtctccacccctttggccaaactggtggaacatctgagttcttgggtcctctcctcccaggcccattcagggggttgaagggaacacattaaggtaatgtgtgatcctgcctcaaaacagaggactgattgcagtatcccctgaaggttcgcagggtactagattgtttaaggaagtttcacttgcagattgtcactcccctacccctgtcaggaagtaatctttctctaagaaatcccaagcactcatctctaggagaccagatgtcaaaacacaaccacctctggcaacatttggaattataggatgcattcccatgtaaactggcattaagaaaaacaaaattgcactaaccaaaaataacccaaatttaaggaccagaagcataagccatgaatttactatctcaggtagactgagcatttggataattctcattctccagaaatcccacaggaaggaaaaaataaataaatttatatatattcatataaagacttttatctattgtgcaaagagagggtcatctggctccccagaaggttctcaaccccatcaagactgtccattttacatctctagctccagttcttctcagagagtaaaagtgctccaaaggcctgtgatcatgggtactgattaagggctgcagactcttcagatccagttaaatccctggtgtttgagctgtgtgggagctgtggttgcttgcttcctggctttgcctgaggtcctgccgcaaaccctgcagcagctggtttaggagtgtaaggtggctgtctctgcgaggcagaggcaggggtgggaggcaattccctttatactcgatcactgccatcttggcccgatccaaactccgatttgggatctgcagcattcttgtgtagcccccagtttgatctttgtaccgaggggccagtacttgaaacagctttgggatcaaatccttctcctagagggagaattatccaagagacagcagagtcaggcaaaactgcagaggcatttaactttacaccattcccaaaggtaaggtccatccacacatagaaagacctccccctcccctcgccaatctggcatagtcagtgttacacaaaggggtcgtttataggcagttgtgcagaggtatattcacatcgacttcaactaacttaagacacagtttctaatttagttagcagcactggcccataagtgagtacccaagtttaattctgcatagttctcctttttccaacccccacccccagggagcaaagggtgggattttgaaggcagataggtcgcactcactgtgagccagaagtcagccatgcgcatggctcgttcgttagtgtctcccagcttcccatagtcgatgagctgtgaggacataacatcacggatccaaccgagcaagaaaacaaggtgccaatctaatttctctaatgccggaaggcaatccattctttccactagccaagcatctccaatctacgccacccctaactccgcagccctaaccagtcttccattagaggcgatggaggggcgggttcagcccaaggttctgggggactcagacttggggaatggtttaccaggttggtcccggtccctttccacttgcagccggctccgccccctcagaccagacccgcagagtggacaagagggccgcgctcctcaccttctccgcgtagcccctcatttcgtccacacgcgcccatggtgcctcgatgcgttcgtgccgcaccagccctgtgagcaagttccgcaacagatggatgcgggactcgggaccgaggcccatacggcgaaatacgcggccatgggagatcgctgcagcgaccgacagccgcatgtttccaacttctgcccgccccttggaggccggaactggaaactggaaggtagagccggtggcggcaatttcagggaacgcatgcgccttagctcggagcgtggtgaacgtgtttgcgcatgcgcatcagagcctgcctcgttggcaatctcgggaagggcggagaaacggtgttgagcttttccagaggcggcgagctgggcgggcttcaggcatccagagcgctctgtggcggccgaagaaccaggcgccccctagtgtgggataagcgggccatcgggttttttttggggctgcgtcagccagtggcatttagggcgatggggcgctccgccgcggagactcctgggaaagagagcgtctgaagagaaaggcacccggagggttcggggtcctgcgggctgacggccctaccgggtccagcagtggccagctggcctggttgacacctgtacgcattgtttttaacacagtgattttcagtagtaatggtgagatggataataacgatgcccggaaaagaaacgcagatagtgaaatttttcttttattgaagtaatcactccagttaaaaaaattacagcactaaagggaaaagtagtagattgtttttaattacaccagtgtgtctttttaaggggaaaaaacatacctacacatttatgtgttaatgaacaataatattatagtttgtttttgagccttaacatctgcaaattggcaatgactgtcaaaattattccttgttatgggttgaattgtgtcttccccatgattcttcccgtccccaaaaagctatgttaagtcctaacctgcagtaactcagaatgtgaccttatgtggaaatagggtcattgcagatgtcatttgttaagatgaagtcatgcaggcataggtgggcgcctaatccaaaatgcctagtgtctagctagctagatagatagacacatatatacgtacatacatatatgcaggccgggcacggtggctcactcctgtaattccagcactttgggaggccgaggcgggcggatcacctgaggtcaggaattcgagaccagcctggccaacatggcgaaaccccgtctctactaaaaacacaaaaattagccgggcgtggtggctcatgcctgtaattctagctactcgggaggctgaggcaggagaatagcttgaacccgggaggtggaggttgcagtgagctgagatcgggcactgcactctagactgggcgacagagtgaggctctatctcaaaaaaaaaaaaaaaaaaaatgcgcatgaagagagagagatggacacagggtgatgctgaccaggtaaagacagagacatacaggcagaaagccatgtgaccttgaaagcagagattatggagtcaagcagttgcaaatcaatgaatgaacaccaaggattgctggagcacacctgaagccaagggaaaggtataaaacgcattctttttcagatctgtcagagagcatgaccctgctgctaacacatcgctttcttacttctagcctccagagccacaaaacaataaatttctgttgttttaagttccacagtttgtgatagtttgttacagcagtcttaggaaatgaattcactcctctttacatgtacatattcagtagacgtatagatttgtcactttgtcagcttataggtgaccaaagaacacttctttgctaattttaattttgaaaagtttctttaatatgaaggaacaaatatgcaaataggaaaagtcatgaacatataaatacattgacagatttatacaaatcacacttcacaattaaagaaatttacaataaattacagaaattacaattaccattcatgttttgtttctttgggagcaattcttgtagttttcaattgtctttgcagttgaaaaatttcactaagatgttttcaccaggatatatatatatttttttgagacggagtttctttcttgttgcccaggctggagtgcaatggtgcggtctcggctcactgcaacctccacctcctgggttcaagcgattctcatgcctcagcctcacaagtaactgggattacaggcgcccaccaccatgcctggctaattttttttgta

SEQ ID NO: 914992 - DNA, 4001 bp, Homo sapiens
ctcctcatttcttcccatgcctgcttctcccacactcctccctctcacatgagggcaacttcatcctcccagttgctcaggccccaaacctccatcagttttgactcttctctcgcacactactcagtcaacccattggcaaatccatcccactattaaaaacttagcaggcttctgtacctaatttgcttctagctttgtttttgggtccccagggaacaaacagtctccttcctctcccacaggatttcctttaggtagtcctagagactgtgactgtgtacttccatcacgtctcctttgctcactcttcaaggccccagctgctcactgttttggtcaccttgtctctactcgcttcactgtgtgtctttctctcctaatgcgtgagtctgtacttgaacatagcattggaggggtggtttcatgtaggtaggtagaatggagtaagtcccactgcttttgtaaaaactttcctgcctacttaaacctaagttttattatggaaaatgtcaagcatacaaaagtaaagagaacagaatagtgaactctctcaattatccctttccaggttcaacagttaccaactcatggccaattttggcatctacattgcctctggcccaactctgtgattattattaatttcttaatagactttattttttagcacagttttagtttcacaccaaaattgagtggaaggtacagagagttcccatatgtcccctgtccatgtgcccacagcttcctatcaacatccctcaccagagtggtacaatctttacaattgatgaacctacattgacacatcattgttatccaaagtccatagtctacattaggggttcacccttggtagtgtacattctatggatttggacaaacttataatgacatgtatctaccattatatcatacagaatagtttcactgccctaaaaatcctctgagctccacctatttatccttttctcccccaatcctcttaccccccatgtaactttttactgtctccttagatttgccttttccagaatgtcatagtgggaaacatacaagatgtccccttttcaggttggcttcttttacttagtaacatgtatgtaagtttcctccatgtctcttcatgactcatttctttttattgctgcataatattctactgtatggatgtcctacagtttatgtaaccattcatctcctgaaggacatctgggttgcttccaagttttgggaattatggtactattcttttaatatcgtccaatatagagttagatccagttttccatttttgggggtcatggtgagacatgaaacccaggtttaaaacatacataaacactcatgcacacaaatacacactccaaccattttcaagcagagatttatagagtttttaacggacataacctttttggagcctcgtatcagcccagcgccttaaatacggctgtttcttttgcagaatgagttcagattaggcgaggatatccatcaccatttttcagaccagctcgcagcctgggggcagtggttcaagcacaggctttggagccgaaatgactgcgcctgaagtactcttcttccacttccccgctgtgtgaccctgggcacgttacctagctcctctgagcctcactcttctcccccataacatagggcctataccaaagttcaagggctattgtcagtattcaggctactaactgaaggaatcaaaatctgaacctgggttcccccgactccaaaacccgtgctatattcaccacaaatgcgatcaacacacaaggcaccaggtcggacccaggcacatacgtggcgagaccgcagggagcagcgctcgctctgcgtcctcccttcctcccatatcccaggtctcacctgctccgggccccgaaggtctcaggatgctgtggctgcacgcggacgccagccgccctaaggtgaccgtcagggaagatgctgccatggccgcagcctcggccggaaacggaaacgacgcgaaccgcgtgcgtaacgcacgggcccggcggggaacaccggtccgctgtaacaccggcccggcgcagaagcgggacgtcggcttctaggggcccaggccggcggcggcgatggcctcggcagctgtggagagcttcgtgaccaagcaactggacctgctggagcttgagagagacgcggaggtggaggagcgcaggtacgggaggccgccggcgccgctccctcgcggtcggtcccgccgtgtcccgggcagagtctccgaggggctcggcctcatagtctggggcgggaatttcgtctccgacccttcgagtcaggggcagggatcgtccgtcccctgcttggccacctcccgagttgtcagtctcatcacttcctgggcagcgcgttccgtttggggacccttaagaagcactttgatttcccgacccgagaccccccactaagcttacactcctgggccctggccccgaccccagttccacccgcagcgagttagcagccctttcccttattcattcagtaaacatggtttgcgcccattctcagtcaggccccggcagcatgagtcaggtgcactggctgcccccgatccggccagcggcgggctgggcataagcagagagtcccttcccctccagtgcgtccagggccggctgcgtgcgtgtcgcggggaaagagcctggaggaggaaggcccttccctggggagggtcatggtggcttcaaggagggagtggtgcctgaaggaaaattggagttaagctggtgggtgcggagtagggtggggagccgtcctgagaggtgtggggagccatgtgagagccgggcttgtttccgaatgggactatttacttgtccaaaacaatcagagctaacacttacgtactttccatgcgttaattcttttacacctcatcccatgccaaccctacagtgtaagtttcttttttttctttttcttttttttttttttagacagagtctctctctgtcgcccaggctggagtgcagtggcacgatctcggcttactgcagcttccatctcccgggttcaagcgattctcctgcctcagcctcctgagtggctgggactacaggcgcgccaccacgtcctgctaattttttgtatttttagtagagacagggtttcaccatgttggccaggatggtctcgatctcctgacctcgtggtctgcccgccttggcctcccaaagtgttgggattacaggcgtgagccaccgtgcccggccgcagtgtaggtttctgttactgtcattttccgtctaaggagatggagacagagaggggttaagtaacttgccccggggtgacacagtgtagcccgatttgctgtcaggcagtctgcttccagagtttgcagtcagccatatgtgggtaggatttgtctgagatgcttttgatcatggcaatggagagcttttgcagttatgttgagtttcttagaatcccagctgtttcatttatggctgtgtgactttgcaggttctgtctctgagccttacttacttcatctgtaaaactgggatgattcccacctcacaggcttgctctgagaatgaaacgatcccctgtcagtcaggtgctcagcgtggtgccaaggacagagtcagcccccatggcagtggctctttctgaggatgctgagcagactggcagggcgagcctgggaagggcctggctaaggagctagtcttctgttctgtgtatgaaggatgggccatcagcggggttaagcaggtgagggaggcgaatagctttgcattttaggaggatttcttgggtctcctgcttttgattggacgtggagaggccagaggtaaggtagttgagaggctctgtttagtccaggtgagcagtgatgtggatttgaaccggggctgtggcagccaggatgagaggcagagaagtccaggtagaaatgggaggggcctgataggacttagtgacagatgggaggagagaggggaatg

SEQ ID NO: 914993 - DNA, 4001 bp, Homo sapiens
gtgggccccagtgagaggccgagaagaaagggtgggctctggaggtggaggggcctgacttgttttacccacaggttcaggctagccatggccacccgaggggctcacacattccctctggtgaccagctgtgggactgcaggagtggagacaaagtttggggactcccagtaaacagtagaaaagagggttcaacagctcccaggccattaattttcgagtctccaggcttggggcctgaagggcacactttgctaagggtctgaagggccatgtgtgggcttgagatgagaggctggcaggggttgggccaggacgattcactgtccttgttcccacaggccgagcctctccaggctggagcgccagctgcctgtgcatggagcctgcagatctggaacaatctgcactgtcgacacccagggccccaggacagggctctaaggcctctcttttgttctcgaacccttgtgggcccaccagccctcagttccctcagtcccactctccccagggagcaccccaagcactccgcatgggatttcacaagcacctccacggtaacctatctcaagtagaactctgcactaacttcttcctcaaaacacaaaaacctggctcactgccaccagcctgcctccccacggccccacgagtgactcacccaggatcccaccctctcggcacccccaccccagctgcatccagtccacagcaagtccagtcagcgctccctgcaaaggctccctggcaacaggagtgtgtgcactgctgggcgagcgggccccgctgcctccaaggcaaccacacctgatccgtttccaggggcccaccacccttggcccttcaggaacaccccacccgggtcctctgaccctcacttcctcctcattctccagggacaggcgaagggccagcgtggaattcacgtgaggctcagggcagtgttggcctcactcagaccttttcttccttggtgctgggtgttccccaaggtcagggccacgcgcagcaccggtcccaggtgtctgctgaaggaagcctcctccactgggggtcccacctgccaccctcccctctctccccagctatgtgcaggggcctccaaagccacaccctggccccttgaccgtccctctccagaaacactgattactgttctccaaaacccacccgggagcccacatctactgattacgcctgagtcattcgttcaccaagaaatatgcagggcttcctgcttcaatttggggagggcgaagtggtgcaggacagcgccccgatggccccctgggaatccagagaacatgcagagtgggcgtggggggtctgggctgagcagaaccgggcctcccgccctgcctgccccaaagccctgagggctgcggtcagctgccctttcccactcaaacccaatctggattcccagctcctctgcctcaggccgcgcccgcgctgcggtgggggccgcccgggcctccccgcctggacccaacagccgacgtggcccccgccccgtgacgatcagaaacgtctccaaacagctccctcggccctggctgcgggaccagccccgggcctgaccccgggccaccctcccactccccacgcgggggcaccgtggcctccatgggtttggctcggaccctctgtccccagcccggccacgcccgccccctggggttgccctaaacctggcggggggctcctccgccacccgcctcgcgtgtctcaaggcatgacagggggtcccggagaaccctgcctcgcccgggccaggaggcggcccagggacgcccaccccgctccccggagtccgcgcgccctgtggggtccgtctgcttgtgacactaaggggcgccccgcgacgggggggtgacgacccctactcacaccacattccgcgccatggcggccacgcgcgcttccggggtccgcgaggcggaaggagcagcgcgcccgccccgcacggccgccgcctggcacagcgccccctcgcttccggaggccgcgccgccccccccgcacgcgccagcgcccgtgccgcgcgcccgtgccgtccccagccctgcgcccgccccgccccgcgccgccttcttctccctccctgcccccctcctgtcccgcaccccacgttcctccccgccccgacccccactccccgcgccgcagactccacaggacgcggggccgcagcagtcccgccccgcactcccggccccacagcctgaagcccgggcccgcgcccctgctgctcgcgccccgcccacgcccgcacccctcccagccccagagacctcccgccgccgtcgcactctttcgggcctgtctgccctgcctcccgggaccccggcctgcacgccccccacacccgtgcccctgccctttggcagctccaggccacagcctggccccgcaccgctgcgcttgcagctgctgggagctggaagtggagaaccggggctgtagtgctggggagggcgggtccccgggcctggggtctgaagcccctctctccatctggctgtttttacccgggagcccggaaccccagggcccctcacctcgcccttctggccagcccggttggcagcccccacgctggccacaccagccacgctgtccatcctcggtgctcccaccacgcctcctccaagagggccactggcctcttcaggccttgccgtttgctcaccccctctccacccttctggccagccccctccagcctctggcaaggccctctctacagggacccccgtccaaggcccagtcctcactcctttccttgggtagtgctggccaggagggctgctgggacccttcgggagtagagggcagcagcctccctcccctgtccccaggcctctccctcctcccctggtttcctctgcctggtggctggattcaggccacttctccatctatctctttaactgcccgtgccccccacccccaagcctggcttgttcccgcacccaacagcaccctaagtgttcttcagagcaagaggcaggggtgtcatgcttcagagcaagaagcggggccatgggtcctggttgttgctgggggcagggggcccaggcctgcaggtgggaacagggctgcgggagggcactggggttgatggaaattcaggaggaggagagggcactgtgcccctccgagggcctgggccgggtagggctggagttcctcctgatgggtgggtttgagtggaaatgactccagggggtctatctagcatgaaggcattgaagcaggatggagtgagaagtgggccagagtgggcagggaaggtggtggcagccgtccccactgttgtccaggcctgcgtgaggtggagaagctccaggctgccagtggcagggtcccaggaggctggtgaccagacaggcctttgcccagcagcaggtgcccttggccaggcccaaggagcagaccgcaggacagggatggagctggagaaggggggtcctggggccgggggtcctcaggcttccttttatgttcatgcaatgctgcctctttcggcagccacattgtgcagtgtgcttagagatatgtggctgctggaagttgggttcagagttgtgggtggccgatgtggagaggagggtgattggaggccgagctgtgggtcacgggtgggtgctgctcagatcactggggctgctggagggcggcggttgagctaggagctgaggtccttcctcagggcgaggcaggggtggggtcacaatggagcagacccctcaccactccttccatccctgtttctctgatagtctgctaatgggatcctccggaaggcatgctaagtatggggggtctctgagatgcctggggagccagtggagacctcctcttcctccttcccacctgccattgaacacaaatgccagcgcggcttccgctctgcctgcctctcctgagatcaatggtctgcacggggttgaggctgccagataaatacaggcccagttaaatctgaagttcag

SEQ ID NO: 914994 - DNA, 4001 bp, Homo sapiens
catcagtatgacattaaagtctctattatataccagacatgaggcttccatttcctcatctgttgcatctgccaggattatctcgtgatattgtgaagatcaaatgaaattgtgtaaatgaaaatttattaactatagaacaatatcaatattattatttgcatcatccttcattccttacaaaatattcctgtttacattattccctatagtctctacaattccatgtggtgggcatcatctgcattttacagataggaaacagaagcagtaaagttaaataacttgcccaaggtcataacaagagacagaactgtctgacaaatcccatgaccttccttataaatgtaaagtattaactaacactttgagacagacttacatttggcaaataatgacgaggttagctgactaaagcaactaaggagtcgggaagagaacagtggcatcagacgtcgagaggccttatatacccatgtcagatgctggccttaatgacagatttccatgggctcttttccaggagttccagaccagcctgagcaatatggtgaaacatggagaaccgaatggttggaaatagtattccttgaaaaataatccctcccttttagcccttcttggaaccaaggcaaatcaaggagtgtagtcaccagtgtgaccatctttaacaatggaattttgaaactttctgatttttttttctattatcttggcaccatatttggccaaattcttacaaactggctaaggtgaacaagtgaattgtttcataaaggatgaagtgaggcgtgggccctcacacattcaagggcagccccaaggtaaccacaggtagacccatgagctgcaacgaccatgctgacctatgaatcatggaaatatagttgccacaattaatgcctaaaacaaaattttaatataaattgctaaaatgagtcattaatctaagcagcatgatacaattgaaagagcacaaatgaaatctgttaaatctgttaagggaacgggagaaagcccaggaacacatttatagtggttcatacggttttatgacagtcacttaaataaggttttggaaacgaaaatgttgttaattattgcagggcgcggtggctcatgcctgtaatcccggcactttgggaggccgaggcgggcagatcacgtggtcaggaattcgagaccagcctggccaacacagtgaaaccccgtctctactaaaaatacaaaaattagcccggcatggtgtcccgcgcctgtagtcccagctactgaggaggctgaggcaggagaatcgcttgaacccggaaggcgaaggttgtggtgagccgggatcgcaccactgcactccagcctgggcaacagagcgaaatccgtcaaaaaaaaaaaaaaaaaaaaaagaaagaaaagaacaaaaacctagtttattactgctgtttccttattaccaggtagcttcacatcctcatcagttcagcaagtcaaaactgcattcttagaaaaaattctggaagttgataactgaatgcaaatataaaatgacctgcccaaggtcacacagttaatcgggaccgtatcctggtgtcgtgattcccatcgcagagctctcccttttccagaaactgggtggagagagtggcatgtggtgtgggcgtggcacgggtcggctcggcagagttcgccccgggtggaaaggaatctgctcagccccttcaacgccaggcagccgcatgtgctgctgggaaggaccttgggcgccccagtgtctcatccccggatgtccgcgcgccgccacctccccgctctgcaccctccgccatctcccctctctgcaccgtccgccatctccccgcgccccgcgtgcgtggaatctacgttaccttttccaaggttccgctcatcctttgctgctgcgcggcctctagctgtgcaaaccgaagaccggaccctgcagccgcgttcccagggcgtctgaaaacactgaaggaacggccttgaccaggtgcagcagcaatatcccaccgagactcactcaacttccacatcattttagttccggaagcttctgaaattcagagtctagaaattctcctgctttccaccctcactcaggttgtcacattcactgctgtttctccagaaagaattaattaccatctctgtgttaccccagtacttagcacacaattctaatttttcgcttacaatattatacactaatgatttgttaccacctcttctctgtatttgaaagttcttaaaagactgagatcctgtctgattaattcctttcagcgtctagcacagatctgacttttttgtttgtttgagacggagtctcgctctgttgcgcaggctggagtgtagtggcacgatctcagctcactgccacctccgcctctcgggttcaagcaattctgtctccaagtagctgggattacaggtgcccgccaccacgcccgcctaatttttatatttttactagagatgaggtttctccatgtttgtcaggctggtcttgaactcccgacctcaggtgatccgcccgcctcggcctcctaaagtgctgggattacaagcgtgagccaccaggcccagccaatcatctcttaaattgagtttagaagtcagatttccacgtcctgtgctagatgctggaataaattagtcaggatctcagtccttgaggaactcaatcaaaataatagcaaaaaataattagtatctagtaacaaataattagtatctagtatggtaagtgaaataccagaattgtgtgcaaagtactgaggtaacacagatacgacaattaattatgcttggaaatataatggaccaggcatacctcctccagtacagtgattgattattgcctaataaatgctattggggttttagaagtgaaattttaaataagaaaaaaaaaatcaatcaaatgctagtatgtgccaggtcggttctttatgggtgtatgggttcatttagtctttccaataaccctatgaggctgaggatcattatacccatttcacagatgaggaacagagacaggaagaaggtacctagttaacataatgttatataagtggtgagctgtttcatttccgtgcctgtgcttcatctattttatgggactgtgactataggtttgcaaaagggcaggttggcagccagagagtttctttccttgtctagtccaggtaaatacaatctaataagatacatggccgggtgcggtggctcatgcctgtaatcccagcactttgggaggccaaggcaggcggatcacaaggtcgggagtttgagaccagcctgaccaaaactgtgaaactccgtctctactaaaaatacaaaaattagctgggcgtagtggtgcatgcctgtaatcccagctactcaggagcctgaggcaggagaattgcctgaatccgggaggcagagcttgcagtgagccgagacggcgccattgcactccagcctgggcgacaacgaaactccatcccaaaaaaaaaaaaaaaaaaaagatacaaatccatctttgcattaatacactctctggggtaggtaaggtgaagggaaagggaaaaagaaggaagaaggagacggttagtcctttgtacgaagatataaggattcccaaaacaactagaattttttttttggccgggcgcagtggctcacgcctgtaatcccagcactttgggaggccgaggcgggcagatcacgaggtcaggagatcgagaccatgctggctaacacggtgaaaccccgtctccactaaaaatacaaaaaattagccgggcgtggtgatgggcgcctgtagtcccagctactcgggaggctgaggcaggagaatggtgtgaacccgggaggcagagcttgcattgagccgagatcgggccactgcactccagcctgggcgacagagcgagactctgtctcgaaaaaaaaaaaaaaatctaatccccatctacctatctagccttatttccagccttttt

SEQ ID NO: 914995 - DNA, 4001 bp, Homo sapiens
tgcaaaaaccacagccttgcacaaaggccacttcaaccttacacaaaaaaatatttctggctgggcaaggtggctcacgcctgtaatcccagcaccttggaggctgaggcaggaggatcatctaaggtcaggagttcaacaccagcctggccaacatggcgaaaccccatctctactgaaaatacaaaaattagccgggcatggtggtgcatgcctgtaatcccagctacttgggaggctgaggcaggagaattgcttgaacccaggaggtggaggttgcagtgagctaagatcgcaccattgcactccagcctcggtgacagagcgacgagactctctcaaacaaaacaaaacaaaacaaattcctgcatggccatctgtccaacaactgcctgtccaatcttgaactggcaccacccatgttattcatccttgtagccaaggataactgtctcaaaacaattatgtaatactcatttttcctttcctttatttatttttattatttttttagatagagtctcactctgtcacctaggctggagtgcagtggtgtgatctcggctcactgcaacctccgcctcccaagttcaagcaagtctcctacctcagcctcccaagtagctgggactacaggcacacgccatcacacccggctaatttttgtattttttctagagacgggtttcaccatgttggccaggcttgtctcaaactcctgactccaggtgatctacgcgccttggcctcccaaagtgctgggattacaggcgtgagccaccgtgcctggcccatttttctgttaaaaacctttgtcttcttttacctccctgataagcacatagtctatacccattcccgaataaatatccttttcttttagagtctgttatttaggttgacataagatagcaccagtctttggttttccatggtgcagggtacagatgggatggaaaggaggctcaggtactctgaatggtctgcctctcaggatttctgtgggatgcaaaagagtatatgtacacttctgaaaagtcaatcaagcctttagaaacttaaggcttaactttctgtctcggttttagaaatagatattattatattggcagcgtggccttgtttgtacctccatgattgcctggctggccttgctaacctaatcacatctgtgacgggatatagtgatgtttaatcttatgattgccttaagaattaaggcaatcagacgggttcggcggctcatgcctgtaatcccagcactttgggaggccgaggcgggcggatcacgaggtcagaagatccagtccatcctggctaacaaggtgaaaccccgtctctactaaaaatacaaaaaattagccgggcatggtggcgggagcctgtagtcccagctactcgggaggctgaggcaggaggatggcgtgaatctgggaggcggagcttgcagtgggccgagatcgcgccactgccctccagcctgggcgacagagcgagactccgtctcaaaaaaaaaaaaaaaaagaattaaggcaatcataattccccacgcacactcatatgctaggaccccgccccttacctgaaacgttgtggcttatatagacactgccaggcactgtgttaagtgctcccaaagagcaccccagtctaccattttccctctcgattctatatgtacactcgggacaagttctcctgatcgaaaacggcaaaactaaggccccaagtaggaatgccttagttttcggggttaacaatgattaacactgagcctcacacccacgcgatgccctcagctcctcgctcagcgctctcaccaacagccgtagcccgcagccccgctggacaccggttctccatccccgcagcgtagcccggaacatggtagctgccatctttacctgctacgccagccttctgtgcgcgcaactgtctggtcccgccccgtcctgcgcgagctgcctgcccaggcaggttcgccggtgcgagcgtaaaggggcggagctaggactgccttgggcggtacaaatagcagggaaccgcgcggtcgctcagcagtgacgtgacacgcagcccacggtctgtactgacgcgccctcgcttcttcctctttctcgactccatcttcgcggtagctgggaccgccgttcaggtaagaatggggccttggctggatccgaagggcttgtagcaggttggctgcggggtcagaaggcgcggggggaaccgaagaacggggcctgctccgtggccctgctccagtccctatccgaactccttgggaggcctggccttccccacgtgagccgccgcgaccaccatcccgtcgcgatcgtttctggaccgctttccactcccaaatctcctttatcccagagcatttcttggcttctcttacaagccgtcttttctttactcagtcgccaatatgcagctctttgtccgcgcccaggagctacacaccttcgaggtgaccggccaggaaacggtcgcccagatcaaggtaaggctgcttggtgcgccctgggttccattttcttgtgctcttcactctcgcggcccgagggaacgcttacgagccttatctttccctgtaggctcatgtagcctcactggagggcattgccccggaagatcaagtcgtgctcctggcaggcgcgcccctggaggatgaggccactctgggccagtgcggggtggaggccctgactaccctggaagtagcaggccgcatgcttggaggtgagtgagagaggaatgttctttgaagtaccggtaagcgtctagtgagtgtggggtgcatagtcctgacagctgagtgtcacacctatggtaatagagtacttctcactgtcttcagttcagagtgattcttcctgtttacatccctcatgttgaacacagacgtccatgggagactgagccagagtgtagttgtatttcagtcacatcacgagatcctagtctggttatcagcttccacactaaaattaggtcagaccagggcccccaaagtgctctataaaattagaagctggaagatcctgaaatgaaacttaagatttcaaggtcaaatatctgcaactttgttctcattacctattgggcgcagcttctctttaaaggcttgaattgagaaaagaggggttctgctgggtggcaccttcttgctcttacctgctggtgccttcctttcccactacaggtaaagtccatggttccctggcccgtgctggaaaagtgagaggtcagactcctaaggtgagtgagagtattagtggtcatggtgttaggactttttttcctttcacagctaaaccaagtccctgggctcttactcggtttgccttctccctccctggagatgagcctgagggaagggatgctaggtgtggaagacaggaaccagggcctgattaaccttcccttctccaggtggccaaacaggagaagaagaagaagaagacaggtcgggctaagcggcggatgcagtacaaccggcgctttgtcaacgttgtgcccacctttggcaagaagaagggccccaatgccaactcttaagtcttttgtaattctggctttctctaataaaaaagccacttagttcagtcatcgcattgtttcatctttacttgcaaggcctcagggagaggtgtgcttctcgggttggtggtatgtcccctaggagaacagtgaggcagaaaaggcagaagcctttggtatggggggaagaaatggtaaactacaagagaaatttcctgtgaagaaacagctacagatcctggggggcttcagatgtaaaattggggttattccctatcctaagtaacttgatcagtccccccaggtcattctttttcatcttctaaacagagaaggtagcaggaatcactgtggtgagaggtttgttatggaggcagcaatagaagggatgggtgggggaagaggtttgtatagaaggtgaacctggccgttccctgaacttggtaccagctgtg

SEQ ID NO: 914996 - DNA, 4001 bp, Homo sapiens
taattataaagcattgtaagcaggaagaatttaatataaaagcctgtcttcactgacagcaggggtgcatctttgctgatcttttattatcttatattttaggaatgcttttagtcttggggcagctgtttgggggagttgcccaggatttaagagctacattttgcctgagaatctgattcaagggtactaccattgttagtaaagtagaaggggccagggatggccattttcagaggagtccagggcgaggaaatagggatgctaaggagacagaggccaagaaagtcatggcctgagggtctggaagcagtcgcatttgaatgcagttgtgagtgttttgtctctcctttccttaatccccaagcttttggaacttggcaccctcagcagcaggacccactatttcccagaatgggggcctggacttgataaaaccctgggctgggctgcctgaggctgaagggctagggggttggcccactgtcacttagacattcaagggaaggacaaccccctcacccctaaggctgccaagttctgcaacatcttaatccgatgagcttgggatatgcagatacaaagggccattcttttctaagtgtttactatctaagttcccagagtcgtaatgtgtcagaaaacaaatgccatcataacatgaaaatactcactaagaatctgcccttttgtaaaaataatgctccacttatagattcttccctcacttaaaaagcgtctatcccacctggctcaggtcagtttggatgactgtccgatataacaggacaataccatttcaatgcaaatcaactgcaaagttcatgaagtcaaagaaaacagtgatggagaattttacatgcaaggtctttgaccaaggagatcagatagagcttatcaattaagtgaagaaaatacgacgaggatgatgctcaaataggttcttcaaaagggaataatttgaatatcgagggactgaaagagatccttggggaaatggatgaagcccttaagtattaaacagacgtagactcttaattaggtgctgtaaagtaaaatgtgaagagcgagttactatgtgaacagatcactttgctggtataataaataaatatacccacaccaaaatcaacattttattctttcttcaatctgaaaattagcacataacctatattttgtaatctgtatagctaaaaatagcttgttttgaatgcctcatttgtacaataaaaatcttgatgtctctttaaattaatctgctttcatcatttcctttctataataaaatttcactgaaaaccttttttgctatttactatacaattttgatctccattttaagtggattcactttaagtggccttttctcgtgcccactcacctgacataagaggttctcagtgctaatggttctcatataagtccttctccggtttcagagggagcctgcatggtttgtggtttgacttctgaggcctcagtcagacacagcctagatggttggttctatacccagaatatttggggcctcggtcaattcaaaccaactcagagtaattgattcctcagtatggaagccacacaccttctccaggtacccactgcaacctacatgagctgtcagcaaaccctctggccagcctaaaagctgtggcctcagcccagggtgcttggcttggcccccagccaggctagctgagggcagggagggggcacttacttggccggcagggctctgggctgcctgtggctctccggggggctcctcgtcctcgggaatgtggggcatggcagcctcctgctgggagtggccacgtgtgcccggaacctccgctgcgtcagccccaaagatgctccaagaggcctgggctccacaggctggggagatgccaaaaggacaagtcaaatccattcccatccctgtcccaagctgggttccatttcccggagccacaagccacagtgagagccggcttgagtttgcatcaacaccggaggtcaaaccaggctaggagagggcatttggaatttcatttcctccggctctctggctttgtttacaaagtcagaggtgaccttagagattttgcatctaatttggtctttacagtaaacacagctatcccagaagggagaaatgtgcttcgaactcctcaaagctgtagctaatggaagatactccattgagatcacattggcagttgtttaccacttactgagcacctactgggtgccaggccctgtcctaggagcatcaccatcatctgattgaatcctcaagatgacctctgatgtaggcattaatattcccattttacagatgagagaaccgccccagagagtgaaagtcacttgccccaaatcatacagagaaccaataatttgaacccagatcttcctgattttgaggctggggctttttctgctatactacacagtgttcctcagccatgtggatggggagtaagaggtgctgtttcctgacttcctccctgacacctcccctcatgctcttctgaccctcagcacaggctctctcatttgagttcagcccttatggggactacaccagccctactaaaacctgggggctcaggcagggtgaattccatgtgccctgtgcccacccctggcaaccttagattgactcccagaagccaggctatcccttccccatggtgcagcagcctgggggcactggggtcccagtgctgattgggactgcaatcagcataatctcatccacctcccacagtgactggctcagggatagacaatggacccagcctacatcgatgagcttaaagtggtgttctaggaccagatgctttctcctgctctgagtggtggagtgtgaagatatgagacctggtgctacggacactattttgcttccatgaggaaagccagacagaatctaaatgatacacacagaggagggcagagcgaagggacctgcagagaaacagaactggagccctgattaaagtgtgcctgaagcctgaacactttctggactagctggttacatgaacaattaagcctcttggtgttgaaatcactttgtgttgggtttttgttccttgtaactgaaaacatgctccactactctttcgtgcttcttgtctgtcaagatgcctaggagtatgatcctgccaacagacctgagccaatgggtctagctcctctgcttcctcttagaagaggagactagcaatgccaggtttccatagggaaaggcaggatagcaatgtagaaagaacacaggctttggaaccagatatctcggtgtgagtcctcactttgccactcactggctatgtggccttggaaagtaggcttcatctctgagtcccagttttcttgtcaaaacagataagaatgcctcccaagcaggatgctccaaggatgaaacacactcagttcacagtagttcccacagaggccacctgcacgggggtctgcagcccaggaagcttggccgaagctccaagggctctgcctggcctctccccatccttaaactccctccttcttttattagtggggtgggcaataccttcaggaatctatagaactaacaactggcctggttctgcaacttttagagattccctgaaggagctgctccactgcacagtagattaagaccaccatgcagataacatagtgaggtgacctttggctgatgggacatggtgggtgggggtggagatgaaggacactgtcatttactgagcaccaactgtgttccaggtcctctggaaggtactgctgactgctggaggctgtaggaggaagaaccggaaagccctgccacctcccataatacttggtgttcttcctgtccttcagaaagggctcggaaagcccctagagtcagggcactggagaaaaggcctgagctgccatcagcccagctctgacagaccccccagccaacacacatacctctagactcctggactgagctccttgagctaggcaaggtgtcagat

SEQ ID NO: 914997 - DNA, 4001 bp, Homo sapiens
agtgttcaatacatagtaagaaccatgtgtttgctgtttattttctttcagaaatatatttatggggataaccaatcatgtagtagcagctagcacatggttatccctccaagatgataaaggatacaggaatgcctcccttacctccaagcataaagataggtgcatccgctgtgaatataaacagccacccaccaaatatgcatgcacacacacacacatacacgcactatggaatcatggacagtacaaacatgataatgacaactgttttgtccattaggtcaaaaatcgcaagacacaattggaggcagcatcataccctggcattcacgtctgtgttgagaggcatgggcactggagttagagtcatacaaactcatacagggtttgagtcctagctccgctccatcttggtggaacgaccttaggcaagtcacttaacctgagttccctcccccatagaactgttggggtaggggagtgcagggggatgggcaactccacctgcctcactagcatgtcatcgtccctcggtgggggcaatacaatccttggcaggtcctgactcctttggacccccagcctcacagtcccaggaagcttcctccttttccctgcaaaagactctgctcagaccagatttacttccctgtgccaccccagtgagcagcctgaagagtgttcagcagctgccgagctctgggaggctggagtgctggccaggggtcccagaccccgggctgctgtttactcaaactgcagagcctctatagcctttacaactgtttcctgggcaggagggagcaagacagctgggcctctctctggcctctggcttccactggcttttcctttggaaaaagccagttcaaatggtgctcactctaggaatcgcttcaactcggagccctggaggtgagcagggccgggcacgggccgggcacatacaccccctctagggagcagggaagggcacaggccaggggaagctggagacaaaagaggagacagggacagagataaaaacagggactgtgacaagaacacaggatgggaagggcagagacagaaatagaggcaggcttaaggatctagacaggtcatgccagcccaggttcaaggcagaggggcgtagggggacagagagagagacacaggaagcacagaggggagaaagctctgcttagcagacttgccaaagctgaagaccccactgttgccacaaaggggcccacaggaaagctaggggttgcaatcgcctgtcaggacccacattttcaccctgagctgtgcacactttccaacggcaagcaaaaggagcacaatctagttaagttaggactggcaagattcacttctgatttaaaacttaagacagcaacaataaagatactcagctgaaatgccacccaacaaagccagctcccctggaaagttaaagtttagcacccccatcccagcaccctgtacctttaaggaagagaaggttccctccgcttcccagccgaagaggcaggttattctaggatataggggaggcttacctaaaactgagttattctcctttcctcctctggccagcctctcttcactctggggagcttttaccatttaaggtcaatgttacatctggctccggagctcagagccgagaagcctctggctgcagaacctcggccgcacgcctcctctgagaggggctgggacttagagccgagagctcctctgggagccccactccggcctggctcgggggataatggcagggaaagccgaccagctggcctcagggctcagggcaggctgggcctttggggcagtcgctcaccctgggcccctccgatgggtatccacacagcagatggcagtccccatggcaactcgtgccactggacactgtcctggccggacgggaacaaagggaccctgcagatctccccacccgcctggagcctccagcaagcatgtgagcctggagaagaccctgggccagcgccaagagaaactgggaatggttcctgtcctggggattcgggggcaggggctgctcccactgcgttaaactcttgggattgccagagagaatggcctgggagattcagctactcccagacttggcaccagccccagggatgtcaaccttgctcctccattaaacagcctgtggtcttaacatcgtggagcctcagtctcctcatctctaaagtggaaataataatgataatgcccgactcactaggtagtcaggggattaaatgagatgttagtcaagtgtttaacacactgccagcatctcataagagctagatcagtatgaatgagcttcctgcccctgcccaggaaatccataccctgtccatacacactcttcacctgccttgggtatagggcctacccaaggccaggatcatggagctccaagctgggggcaagccacatggggacttcagccccttctgtggttagagcagcacagagaaaccctaggtaaagttgctagataaattacaggacacccatttaaatttggatttcagataaacacaggacatacttgtattaaagactgttatttatctgaaattcaaatttaattagtcatcctctatttttgtttgataaatccgggaaccctagcttttggccatcattagccacccagaaaacattcagtagtcatggtagagagcactagggattggagctcccaggcctatggcctcaagctctcctggcaaacacagtccttatgctcagctcctggccacagatcagttgtgcagcagtggcagatgctctccactgagcctggcccactgagcctccatcccagcaccttcctcaggcatgtggttctcaggaagtcctgtctcttctgtgtggttgttgtaagagagatcactaacaggggtgcagcgcatgaagtccgctaccctcatcaataattgttttttgtaaatgaaaccagaggaggctgtcttgggtactagccatgctttctctcaagtgtccacacctgtccacatggaggtacaggctccccccacaacccccgtcccccacaaagccacatggtggtaactactagaattgcaagtatatggtctagaaggaactgaccaaactcttcagtgctgtttctccaacttcaatgtgcattagaacccccaagtgtgaagctccttgggttcctctttcagaaattctaattctatggatctgacatagacccagaaatctgcattttagtgaaggcccttgggtgattctcatgtacttggtccaaggatcccacattagggaatgtcgcttcaaaggttgatcttgtgagtccagcagcaggcactacagggacaatcaaaatcagaagttgaaatggaacttagggctggctgtgtgtgtgtgtgtgtgtgtgtgtgtgtgtgtgtgagagagagagagagagagttcaaaatcatatatcatattgagtacctactatattcctagcattagattagatgatttacataaaagcactctatcctcacaagtgtctacgcctttccttcaaaaggaaactgaggctggaagaagtaaaacaacttgcttgatgttccacagccagtaaataagtgacagcactgagatgtgaattcaggtggtctgtccctaaagctctgtcctctttatcatgctgcctccgtttcagccagggtttctgaacccagggttcacggataaccttcaggggtctctgagccaactgaaattgcatgtaagccactacgtggtttatgtttctcttgggtaaagacccacagctttcaccacacaaaggcatcaccaaataactttttaatcattgcattagcaataccattttataaaacacatgacttgtcagtgtgtaaaaatggaacaagttctatagaggacaacttagcactatcaagattataccctttgacccgattccacttctaggaatttattctataaacacactcccacacttg

SEQ ID NO: 914998 - DNA, 4001 bp, Homo sapiens
acccaagatactatttaaattccctgctttgtcacttggtggctgggtgagcttggacgagtcatttaacatcccctagccccactgtcctcacctggagcagtaaggtaaagatacatcccccatggcattctgtgagggggcatgtgaaatccctcgtggaaagcctcagatgcaccatgttgcaagggggccggtgattcccccgctgcactctgacatggggtcccaagcagacgggagctgaccatggaggtcaagagcagagcctccagagaccatggcctggggctgagcatcagctgtgcagtctctctgtgctaaagtgtcctcctctacaagaccagggtggaaagaatgacccctgctttgtagagctgtgggagtcatgagttactgtatgggaaggggaacagtgttcaatacatagtaagaaccatgtgtttgctgtttattttctttcagaaatatatttatggggataaccaatcatgtagtagcagctagcacatggttatccctccaagatgataaaggatacaggaatgcctcccttacctccaagcataaagataggtgcatccgctgtgaatataaacagccacccaccaaatatgcatgcacacacacacacatacacgcactatggaatcatggacagtacaaacatgataatgacaactgttttgtccattaggtcaaaaatcgcaagacacaattggaggcagcatcataccctggcattcacgtctgtgttgagaggcatgggcactggagttagagtcatacaaactcatacagggtttgagtcctagctccgctccatcttggtggaacgaccttaggcaagtcacttaacctgagttccctcccccatagaactgttggggtaggggagtgcagggggatgggcaactccacctgcctcactagcatgtcatcgtccctcggtgggggcaatacaatccttggcaggtcctgactcctttggacccccagcctcacagtcccaggaagcttcctccttttccctgcaaaagactctgctcagaccagatttacttccctgtgccaccccagtgagcagcctgaagagtgttcagcagctgccgagctctgggaggctggagtgctggccaggggtcccagaccccgggctgctgtttactcaaactgcagagcctctatagcctttacaactgtttcctgggcaggagggagcaagacagctgggcctctctctggcctctggcttccactggcttttcctttggaaaaagccagttcaaatggtgctcactctaggaatcgcttcaactcggagccctggaggtgagcagggccgggcacgggccgggcacatacaccccctctagggagcagggaagggcacaggccaggggaagctggagacaaaagaggagacagggacagagataaaaacagggactgtgacaagaacacaggatgggaagggcagagacagaaatagaggcaggcttaaggatctagacaggtcatgccagcccaggttcaaggcagaggggcgtagggggacagagagagagacacaggaagcacagaggggagaaagctctgcttagcagacttgccaaagctgaagaccccactgttgccacaaaggggcccacaggaaagctaggggttgcaatcgcctgtcaggacccacattttcaccctgagctgtgcacactttccaacggcaagcaaaaggagcacaatctagttaagttaggactggcaagattcacttctgatttaaaacttaagacagcaacaataaagatactcagctgaaatgccacccaacaaagccagctcccctggaaagttaaagtttagcacccccatcccagcaccctgtacctttaaggaagagaaggttccctccgcttcccagccgaagaggcaggttattctaggatataggggaggcttacctaaaactgagttattctcctttcctcctctggccagcctctcttcactctggggagcttttaccatttaaggtcaatgttacatctggctccggagctcagagccgagaagcctctggctgcagaacctcggccgcacgcctcctctgagaggggctgggacttagagccgagagctcctctgggagccccactccggcctggctcgggggataatggcagggaaagccgaccagctggcctcagggctcagggcaggctgggcctttggggcagtcgctcaccctgggcccctccgatgggtatccacacagcagatggcagtccccatggcaactcgtgccactggacactgtcctggccggacgggaacaaagggaccctgcagatctccccacccgcctggagcctccagcaagcatgtgagcctggagaagaccctgggccagcgccaagagaaactgggaatggttcctgtcctggggattcgggggcaggggctgctcccactgcgttaaactcttgggattgccagagagaatggcctgggagattcagctactcccagacttggcaccagccccagggatgtcaaccttgctcctccattaaacagcctgtggtcttaacatcgtggagcctcagtctcctcatctctaaagtggaaataataatgataatgcccgactcactaggtagtcaggggattaaatgagatgttagtcaagtgtttaacacactgccagcatctcataagagctagatcagtatgaatgagcttcctgcccctgcccaggaaatccataccctgtccatacacactcttcacctgccttgggtatagggcctacccaaggccaggatcatggagctccaagctgggggcaagccacatggggacttcagccccttctgtggttagagcagcacagagaaaccctaggtaaagttgctagataaattacaggacacccatttaaatttggatttcagataaacacaggacatacttgtattaaagactgttatttatctgaaattcaaatttaattagtcatcctctatttttgtttgataaatccgggaaccctagcttttggccatcattagccacccagaaaacattcagtagtcatggtagagagcactagggattggagctcccaggcctatggcctcaagctctcctggcaaacacagtccttatgctcagctcctggccacagatcagttgtgcagcagtggcagatgctctccactgagcctggcccactgagcctccatcccagcaccttcctcaggcatgtggttctcaggaagtcctgtctcttctgtgtggttgttgtaagagagatcactaacaggggtgcagcgcatgaagtccgctaccctcatcaataattgttttttgtaaatgaaaccagaggaggctgtcttgggtactagccatgctttctctcaagtgtccacacctgtccacatggaggtacaggctccccccacaacccccgtcccccacaaagccacatggtggtaactactagaattgcaagtatatggtctagaaggaactgaccaaactcttcagtgctgtttctccaacttcaatgtgcattagaacccccaagtgtgaagctccttgggttcctctttcagaaattctaattctatggatctgacatagacccagaaatctgcattttagtgaaggcccttgggtgattctcatgtacttggtccaaggatcccacattagggaatgtcgcttcaaaggttgatcttgtgagtccagcagcaggcactacagggacaatcaaaatcagaagttgaaatggaacttagggctggctgtgtgtgtgtgtgtgtgtgtgtgtgtgtgtgtgtgagagagagagagagagagttcaaaatcatatatcatattgagtacctactatattcctagcattagattagatgatttacataaaagcactctatcctcacaagtgtctacgcctttccttcaaaaggaaactgaggctggaagaagtaaaacaa

SEQ ID NO: 914999 - DNA, 4001 bp, Homo sapiens
ctctccacccactcacttctcaatgcttggcaactagtttccgccagtcagtggactgaaactggtctttgaggactgtgctgtgaagtcagtggtcttttctcaggcctcgtgtctcagattgttttatttgtttctcctgccacccaggcttagatagttgggaccacatttcactttagctccatcatctctcagtccatcttcatcttggctgttggtcagtcagtggccaagtcatgccatttctacctctgcaatacattttgcatgtgggtcttttttctatatccagagtcacctgtgagtttctcatttccattcatgcttttctgccttcagtctttctcttttctaatccattgtccacaaggctgctacatcaagctcccgatcactgttttgagtgatgctcttcctgagcctgaactcctttgctggcctgtcattacctgctggagaaacccttcatctaacccctcaaggcctttggaattcagccctgtatgacttcccaagctcatatcccactaccgccaccagagccactggtctatacatgtcctctaccttctttcctgaatcttctcaactttgaagtgttccttctccctccctctttactttcaatcaaactctgcattagatatgcacatcacctgagggcgttcctgctctccttgcctgattgcaaggaattcttcagagctcctagctctttgctttccttactagacatcaactactttcttcggagaatcctgtatcctactagacttgcatagggaacctgttttctatgtactatgagctcagttacattaagctgaacatcaaactcagctacttcctcagggaagcttaacaagtgctcacaatggccaggtgcagtggctcacacctgtaatcccagcactttgggaagccgaggcaggtggatcccctgaggtcgggagctcgagaccagcctggccaacatggagaaaccttgtctccactaaaaaatgaacaaacaaacaaaacacacacacaaaaatgctcacaatgctggattaaacatttctttccaccggattctcagtgagattaagccattttatgggaaacagggaaagggaatcacttatatactggattcagaaaacagtaatggcatgattaaaattaatccttgttttccttcattagagctcccccacatctgcagcgccccctcttactcttggtttcccatgtgatagatttgaggcaggatttcatgctcaacttggtgtccacaaatcccctccagaaaatgttagcctgtaaagccacctatacttctaggtatatttacatttaatgtagacaaaagcatttacaggaagacaaatggagtttttttcattatgcctatgactgattattttctcatttggtattgggaagtcctaagggattcaggattttagttccaattttcctaatgtaatgggtaccattgcccccattttatagatgaggaagctgaggctttagaggtttagtaatttgcccaaggttatattgtttgttagtggtagagctccagtttgaacccaatggtttagaaaccatgatttaatatatatgctgcaatctactacttttgtggaatgattcacagttgactgcatagggtaattgttgagagggagactgattagaggagtgagtgggcagcaagccttgatatcgtcacccctccttaagtcatagaactattaggaagtctgactagggaaactctagaattaagatcaagaacctccagtcttcaaaaccattctataccttatccatcacctcctttaagtcatttaaagaaagcaaattgattccttacctgagtctccaaggcctcaaatctcaagggctgatttggatgctagctgcggagttcagtgggtgcagtttgtttctcaagcacactgggagggtgagtggtgtagtccaggcctgaagatgaaatcgctgatagacatcaggtgacaggaaatcagtagcttctgctaccttgggcttcgctccaattactttggtttaacacttaccatagctgaaggaggtgcaaaaaaagtttctgccttaccaggtttcacttcttgaaaaagaccccaggggactgcctggcatgctcatgctaccttaattagaagaacttctgcagcccccaccctataagcaggtgtggatggtaggtccctgaggacaagaaagattctagaagttggtcaaagatgggccgttagcactgacttttaccttctggcttcacttttagggctgagtaggtgggcaggaggcatccatgcagagattcaagaatcactgaggctgtacacttggcagcactatacttaggggtccccaaatattgtcctcattggctcacacttaagtttcttatgaaccatgtatatatcttgtgtcagatttagcagaaatggcctaaaattatactttagtgccatagtacatgtacccagccactcaaagcaagaattagcctccatatttggaaatataaattgaaatagcacttttacctctgaacccacctttttcttctgtctgtcaagttcccttgtgtcccctctctttttagtctagtctggagctgcagggtcatcaagcacagtactagatcaagtagggaaatggaagaagttggtagtgtcaggagagtctaaatatttgggatgtgaatcaaagttttgcccaaagataatgtcctctctctccccctacaatattcaacttttatgttcatatgtgggatttttaattacatttttatttccctgttcattgcttcattttattagagacacagagctatagttaggtaattatttgtttatttaatctaaagggatgaaatatggcaggcagctctgttgcctaattcgaggttcattcctgtctctctctttcatctcttctctctttctctttctgcctctctttttaaatttaagatagtttggaaccatagggttagatccactgggtagaagtagttctggggaggctgattgtggtgtgatatttaaaaagatgccactctaaaaaaaaaaattgttggagccgttcattaggggaactggctaccatttcaatagagaatttacttcttcaagaatactcaagtaaagtcatgcagtcacctctcagagatgctgtagagtgaaggagagtgggaacagaagatccatcatccatttaacattctaattgagggtctatgcatatctgctgaaatgcttgagtgattggtgatgggaggacaattacctagggtctgagttgtggatgattgtgaaacctgaggtttgagtcctggatggtggggtggttagaggcatgtgccttcattttagttggcatgggaacagggtcaggacttggcaaatgtatggcagcaaaggggcttgagttgtggcagcacaacctggtcttttgcatccttttctctgtttgagccctgtatttccccagtcagtctcaggttgtttgctactttgtggccaatgagataacttaggtggctctatgtatgattcttcccaaataaacttgaatttgaatttgtatgaatgcataaacatttaccttgtctttgctcatttgaatgatcaacattttagtgcttgagtgtgttgaaattctcactacaatttggacttgtcaatagcatcttatttgatgtatcaccatcactcttcccccaaggtttgagaatattttattaggttgataacatatttaaaatatttctctttgaattaagcctattttcattatctagtgaccttgcttccaaaagacaatcttaaagtctacataaaagtatgccaacttttatttagttagtattttcctgatgtgaatttcctttttattctctgcacgtcccagcactccaatttttttaatcattgccttctatatgaaaactgtgtgctacatcataattattt

SEQ ID NO: 915000 - DNA, 4001 bp, Homo sapiens
cagctgtcctggcccacttccaggacctgtgcagggctgctaggaggtgacagtgtgctgacagagagggggcaggcagcaggctgtttggtgcataaaggaacttttttagcctttccccgcccaaccccagccccctcagccagctcaggaccacggacccagccagcttggtatcccacgggaaacccactgccactagggcctcagcgctctgcacagggccacgggatgcctgggtcccacacatattctcgttgttccttcagttctgggagtggagggaggacagggacagagctgggcaggaccctccagaaccccccagcaaagcagcagagtgggcacggccctgagcgctggaagttgtcagctagaatgggtgctccgtgcaaagtcctggctctgctccccggagctttgaccttgggccggttttttacatctcagcatctgagtctcccctcaccttctcatggggagtgccactgcctgtccctagggggtaggtggtgaggagtagctgaaacaatgcctgcaactgacagggactggcgtatagcaataaatgtcagccacagttgccactggcctgttgcgtgtctagaatcccaccagtgaggctccaccttgtcctcgtctggttctcggttaagacatggtacaccccatccctatcatctggagtggtgagtttattgcctccatctgcatcctgcttacagggggagagggctgtgagagcgaggctccaccttgtcctcgtctggttcttggttaagacatgatacaccctgtccctatcatctggagtggtgagtttattgcctccatccccatcctgcttacagggggagagggccgtgagagctctggggccctggggtgggggtagggggtcgtgagggaagaaaggcactgagtgtattgagctagtgatctgagatccaacactgtcattcgtggatttgtttgtggagtttctgcactggacactgcagggaccgaggcaggagtgagtaagatgtgtccatgggaggtctgtggctgagcaggcagaggaaacgtggcatgaataatatgaccctcatcagactgtgcagtggagccctagaggacagagagagcttctcagggtgtgtgtgtgtgtgtgtgtgtgcgtgtgtgtgtgtgtgcatgtgtgtgcatgcatgtgcatgcatgtcaaggacagaaaggcaggaattgagaggtgctgagtgacaagagtgtcacaacatgtgacaggcaggctggtgttgggggtggggtgccttagaggatcagcgtttcagtgaatgccagttagaaaaccacctacgactgtactgaaccagcctcctcctggtgcttccagacagtgtgcctggtgtaaagagagctcacccaccagcagctggaaggcctgcaggaaacagaggcctccgtccaaggagggagtcaagaatctggattctagtcctgccccctcgtggccctcgacaagtcccttctcctccctggggctctgttttcttgaactggtctctctgtgtgtatgcatttccagactgcaagaaaagtgtctggggctcctccagcaataagggtcagtaactggcagcaggatggggctccgcaggggagaggccgacggtgccccctacttcccagatcccctctgctgggtgggccacccattctccagctggtataattgttcattgctaaaggctcacatctcctcccttctgggagtttaagtaacaccgctccaaccctacagccaacaactgattggctaggggtataagaggccggtcccctggcttcaaggggggaccaggtctgtacacctgagcaaccccccaactccacatggaaacacaaaatcactcccctctgttcctgccatggggggaccactcaccccaggacctgggactgcagctctgagcttccagctgtgctttgccctcttgcgctgccggagctccccagagacagcgctgggaaatcagcacatctttacaacattcgactttggatcttctccctcctggacccacgccctgcttcatgccccggttgcatggaagctgtcaaagtccttccccctcccgccaaaccccggcaggtgaaaatcttagtgcccttctttatgtctctccttgacagttgtaaatttcctttggcaagggaaatgttgataatttaatctgttttcagggcatgactgatggagtgaaagtggttgtaatcgtcttagatcctgggagtggagtaagaagttgaaccttttgaaagagttcttttaattctggaaaatttcaagcactcacaaaagtagagagaatggttccatgacacccctgtgcccattcgcgagctacagccaccatcagcagctcttggccaatcttattctcccccagaagtaagcaaaactcagatatcttcccattttatttgtaagcattttagtatttatctctaaaagatatggactctttaaaaaaaaagtgtgaccacatgatcagaacaaaaaaattaaaaccgagtcctggtgctcactgaggtctatttacgctcagagtttaaccctgcagccccacagagctctgttgaacatttggaaactagtcttttaaagggccgggcggtggctcatgcctgcaatcccagctctttgggagaccaaagtgggaggatcacttgagccaagagcttgagaccagcctgggcaacatagcgagacctcatctctacaaaaattcaaaaattcaaaaatgagccaggtgtcttggtccctgtctatggttccagctgctcgagaggctgaggtgggagcatcacttgagtccagtgagctgtgatcacaccactgcacctcagtccgggcaacacagtgtgaccctgtctcaaaaaaaaaaaaaaaaaaaaaagaggaaaggaaaaaagaaactactttcatagagcagtggtccccaaccgttctggcactggggaccagtttcgtggaagacaatttttccatgggccggggtggggatgggggatggttctgggatgaaattagtccacctcagatcatcaggcattcgattctcatgagggtaccacttagatcccttgcatgtgcaattcataatagggcccgttctgctttgagaatctattgctgcggctgatctgacaggaggcggcactcaggtggtaggtcatgcttgcctgttgcccctcaccttctgctgtgaggcctggttcctaacaggccacagactggtatagctccatggcctgggggttggggacccctgttgtgggggacaagcttaaccctaggagtcagaaaaacctgttcttatctagtttttggtacttaccgggtatcaaataactagtcggagcttcagtttctgattatctcacaaatgtcttgttacttttgatttgttcaaatcaggatccaggatccaggcatggcccacaaattgcatctgacagaatcagttgccacatcttgtgccctgatctttccatgagcacggtgctgctctgggaagtgtgaaggtcttccgtgaggctgttctggtggaggaggtgtggagtgggctccagtgacccccagatcccatgacccccagatccagtgaccccagatccagcgacccccaggtaccacaacccccagatccagggacccccagatcccacaaccctcagatcctgtgacccccagatcccatgacccccagatcccacaacccccagatcccgtgacccccagatcctgtgactcccagatcctatgaccccagatccagtgacccccccgatccagtgacccccagatccagcaacccccagatcccacgacccccagatccaacaaaccccagatccagcaacctccagatcccacaactcccagatccagcaacccccagatcccacaactcccagatccagcaacccccagatcccacaacccccagatccaa

SEQ ID NO: 915001 - DNA, 4001 bp, Homo sapiens
gtttcttaatgaaatccctgttagttcctatgtctcaactgtaaaatgacagaaggtacctaaggaggctagtctaaagttcaaattatcctaatttatgcaaaactgttggaacagtgcctagcacatggcaagagcttaaaaaggaactattattttattattagatcccaaggtattctatcttgttttaggcagtggatgtggccataggaaaagtttataaaaggaattgaacagggtcaatttcaagagcaaagaaataggagatgggtactcagagtacagtaattaaccagaacaagaatttttttgagcttttaaaaagcatacaattaaagaattgtccacgtttctgcatgtatatgatttcattacattctcctttgctgttgatcattgctttttttttgtctcgagaaattttatgaggaaaactcaatacttttcatttatttatcaacagtttctcctttcatatctgctgtttagtttctggactaagatctgtaaatttcacatagaacccagattattcatggctaggtctatagttattaggactcagaatacatttttactgggtcaagttctggttttataaaaggaattaaagacagagccagccagttctgattctttaattattcaattgaaatgaagacaattctgtaaatgatacatgagaagggaaactaataaatagactccttttatagattccacctattgacttagtaggattgttctcttgacagttgacaaaatatttacccctagttgtcctttttttaaaaataagaattagaacaactgcaattatttttaagaacaaggaacacataaaaatattggagctctgatgagatcaaaagtataagactaaagcaattagagaaaacctcagcaatttgctctgtgattacattatttcaaataaaaatgggaaaaatttacttctttatagtttctttctacctcattttcatgctaacttcacttttgacagagtgaagatgattattattttcaagagtactttatagcataaagcaaaacatgaaaccgaatcattttcacaaaatcacccagtacatccacaggtatacacttatatcacctttcacaaaatgctgatctggtgaaaatgaatgttctttccctacctattttaattttaattgttttcttgtcagaaagaagtaccttaattaaaatgtgttacaaagccaagggctccagtattacttctgtgttctatgttgtccctgtggtagccacataatcatcaagtgcccagtggggcatggcctcgtccttttgggcccatgttcatggaatggcatacagttgaacctattattcacctttcttagcattagctttttttttttttttttttaagatggagtttcactcttgtcacccaggctggagtgcaatggagcgatctcggctcactgcaacctccgcctcccgagttcacgtgattctcctgcctcagccccccgagtagctgggattacaggcacctgccactacgcccagctaatttttgtatttttagtggagatggggtttcaccatgttaggcaggctggtctcgaactcctgacctcaggtgattctcctgcctcggcctcccaaagagctgggtttacaggtgtgagccaccgcacccagcgagcattagctttttttttctttttgcagtccgttttatctcttgtacagcaaccaacttactttttcattcctcttctgttttgtttctttcttgtttcgttcatggttttattctccctcatttttcaactggcctcaacatagagtcaagaacttgtcttcatccctccaatctagagaacagaacccacacaggtagaccagccacagtttgtgcccattgatttggaggagagataggcaagaacgtatcaatggacttactttgttcctttggcacctctatgtttcctctttctctgctccaacctgtgtgccagtatcagatatttacctggattttataggtagattttatttccgttctccaaaccaatttgtcttgtatctttatgtagttccagagtccttttatggttatttctctttcacctcaagagatgtaaatgcaactgtaaagtttggaatacgctgtgctttcacatcctcctctaatttttactgggaagcctattgtgaccctcccaaacactttagtatttattttctccagctttctaatgctcaatcattgcaatatcatactgcatttttttatttttatttttatttatttattttttttactgggattttatttttaaatttctaaacactcaaattatgtttatagtctcttttttttttttattgatcattcttgggtgtttctcacagagggggatttggcagggtcataggacaatagtgaagggaaggtcagcagataaacaagtgaacaaaggtctctggctttcctaggcagaggaccctgcggccttccgcagtgtttttgtccctgggtacttgagattagggagtggtgatgactcttaacgagcatgctgccttcaagcatctgtttaacaaagcacatcttgcaccgcccttaatccattgaaccctgagtggacacagcacatgtttcagagagcacagggttgggggtaaggtcatagatcaacagcatcccaaggcagaagaatttttcttagtacagaacaaaatgaaatctcccatgtctacttctttctacacagacacagcaacaatctgatttctctatcttttccccacctttcccccttttctattccacaaaaccgccatcgtcatcatggcccgttctcaatgagctgttgggtacacctcccagacggggtgatggccaggcagaggggctcctcacttcccagaaggggcggctgggcggaggcgccccccacctccctcccggagggggcggctggccgggcgggggctgacccccccacctccctcccggacggggcggctcgctgggcggggactggccccccaccttcctcctggacggggtggctgccaggcggagacgctcctcacttctcagacggggcggctgctgggcggaggggctcctcacttctcagacagggcggctgctgggcggaggggctcctcacttctcagactgggcggccgggcagagacactcctcacctcccagacggggtcgccactgggcagaggcgctcctcacatccttgacggggtggcagggcagaggcgctccccacatctcagacgatgggcggctgggcagagacgctcctcacttcttggacgggatggtggccgggaagaggcgctcctcacttcccagactgggcagccaggcagaggggctcctcaaatcccagacaatgggcggccaggcagagacgctcctcacttcccagacggggtggcggccgggcagaggctgtaatctcggcactttgggaggccaaggcaggcggctgggaggtggaggttgtagctagctgagatcacgccactgcactccagcctgggcaacattgagcactgagtgaacgagactccgtatacaatcccggcacctcgggaggctgaggctggtggatcactcgcggttaggagccggagaccaaaccggccaacacagcgaaaccccatctccaccaaaaaaatacgaaaaccagtcaggcgtggcgactcggcaggctgagtcaggagaatcaggcagggaggttgcagtgagccgagatggtggcagtacagtccagcttcggctcggcatcagagggaaaccgtggaaagagagggagagggagaccatggggagggggagagggagggagagggagagggagagggagagggagagggacagggagagggacagggagagggagagggagagccatactgcattttaatgccttttaaattaggtggacaaaattggaaaatgcagataataaaaaaaggag

SEQ ID NO: 915002 - DNA, 4001 bp, Homo sapiens
atttctgaatttatatgtgaactgatatttcatatatttaatcacatttttgattactctttaaaaatgacagaggacacataaattttattttcatataaacttaaacagaaagctatttaatgttttaagagttccagctctttgcaaagcaggcagtctatgaaatatataagtgcaattggctaactttaaaaaatacattttggagaagttttgttttttttttaagaaaaagtctcttttttggtaacgatcatgcatttttatagatttagaatttaacgtttccccttgcatcaaatttgcaagaatggtaattttccagaaattctttggatttgcctggagaaatatctcccactagactgcaaaatcccttagggcctggagtttttttttttttattgttttatcaccagcctctaatatggtgcccagaatagagaaggcatccagcaaatacctcttatataagcatactggtgtcaagaatagtgattccatgtgactttcccaactgttaaaaaagtaagtgagcttgaaaagtactatctctttttaaatgattgactattgttttatataaaaccatgagatagctaattagccaatgcttgttaagaactgccagtgtgtggagaaggacaagataggttttcttatttaaaaatgattcttaatctagaatcaatatgagttccaggaggtcagacccgcctaccccctgcccccagggaaaaaaaatgcgaaggattgtgacatgtacataattctggaaagaagattcagagttttcattctatgccaaaatggtctgtgaccccaaagaggttaagaacctctgctgaacagtcgtataggcgacttagataattgatctatgcaacattcaaattcagaagaaaagttcacgagtggaaatgttttctcccctttggatgtgaaaaagcatgatactcataattccttggtgttcattaagaaagctaaactgtaacttcacatgtttataacttaatagaagagacaaatttataatcatcctactgcataaatgtaagtgcagtactctcttttttccttttaaaccttacttggatttctctattatcctgtgtgtgttggtttagtctgtatccccatatctcagcacatgaaggaacatgagatcagtcaaaatttgtagaagacaatcaacatttgaaaaaaaaaaaacttttacccttttgatttaaccaagtctgtccccctttagatccaatatatccgttaaaaaaatgaaatagttcatgatcttaaatttagttagtcaaagtgaaatcttacccctaaaacgagagaatctgctgtagagatttgttaaagaacacatgccatactgccagcatttcctctagatgattttctctttaacctttggtgatgtctttattagcaaacttctacaaaacagtacaaagcacatatacattattttcttagaagaaaatacgtaagtttgatcctttccttattgttcagtcaccacctctccaaattcagaagcaatagccttctttcttctttctaggccttaatattagaggcatcaactttcatccatctgttctgaataacagccttcataactgaaaagtctctctctatgactaaaacatatcggcattttacagctatcatctctgagtagtaaatagtgcctactgtttacagagtatgatagggagaggaacaccgtaatcagcctccgtgtccctttatggcttctgacacgaaagcactccagcaaagcgacatcactaccctgcattttacttgttcaaggttccaaggagtttcggggggcgctcgtccaggacccagtccgagttctcacgccagcgcccaggcctagatgaagaggaagatcccggctggcaacgcgctcagcgccaggtccccagatctcgctgagctaccatcacagggatagccaggagcccagcacccggccggctctcaggctcctcagggagtgacggtctgcaatggcaacggtgtgctcctcttgcgcctgcgcacccactcaggaactgccggggcggaggtagtgcgtgtgcgcagactcactaggctcctggcagccatgtggtcagacacccggttaactacgttttggtgcctctaggaacggtttctgcaaacctctattctgagattgcccatattggtgcatttcttatacacccacctgctgcacagtgaccaggatcactgaggagaagtccgcccttcaccttttctgtcttcaaagaaaaattttgaccacaagagcacctttggaaggtgcactttcgagtgaagtggctaaatcaatggctcactttttttttctttaaacataagtaactgaagaaggaaattagtgatgaaagtaatacttaacaagacaccagaatgactttttgatccacttgctgaggcgggtttaccttttaggtgacacgtggtgttagttttctgtttgaggtgtagacagtagttaaaacagtgtttatgaagaggtgctttagatgagcagtacagaccatcctcttaggcagctatcatgacttactgaggcgtttaaagtacctggagaacagccactcaatggcatttctcatttattcatggaaaatttaaattgacattgtggaatagttaaaattccagcttgtagtgtaaatttttagtcaatgatagccagtgagtaaaacacgcagaaaacaagacagatttttctttcataaggaaattttctatgctttcaacacctttatttgcaaaaagctaaatcatgagtgtgtctaaaagccatcaagatcttttatagcctgaaaaatcaactgtaaattgagaatcttaatttttagtctcacagctagcttccttacattgagactccaaagtcccctcaaatcaaaggaaaaaaaaacaaaaaaaaaaagcccagcctcttctaaagtctttacattctgtattggtcagtatgtcattgaaggtaatagttttattcttaagtaatataccacttcagtttctagcattattattattttgtgagttccttgtctatgagcagacagggctccgataatattaagcattctctttgctgtagaaagaggaactgtgtcttcaacctcagggttatggattttttagaatccatagtagtaagagccagttctgatgagatggaccgctattgtaacttgctgccaagactgattgattatttgtgagagaagtgacatatttcttcatttaagctttggccaacagtctctggaaattatcatggatttggtcatttttttggactggggccaaaatgtgttttcagtataaacataggcaaaaatagaagagtgagccaaactatgagacaggcatggttccttggtacatcttatttcttctgctaatatcacagatcagtaaaagcaacattgattttctcagtacctataaactggatttggaaattcagaattcactttaattttttatcctttggttgttaaaaactgtattcttcagcaatgaagaggcaatcaatcagtcatggtttgacatccaatatgacttttatttctccatgtggatcatattgttaatttctcttgaattagttcccagtatacaaaagacattagtgaaaatgtgctggaaccacaatgcctatataatgttgttaaaaccattgttggggattattacaaggaccctgttggctgtgagccctgataaaataacttgtccagatttctttgaggaattttatttatttatacactagagaaaacagatgtttcctctgtgtaaacactagggtgttctagtaaagtaaaatggaaatctatgcaaactggggaaactaaacaattgaattcattgtagaaatgcaatgtccatacatatgtatatttatgtaaggtataatctatatgtatgtaggtatatatatatatgct

SEQ ID NO: 915003 - DNA, 4001 bp, Homo sapiens
aatttctccaaagcttctaatcgacagtactcacaataagtgctccccagaatggatatcctgtgaggacaacaaggggaagtctttgggagaaaccgatgtaattaagtgcaaatatagttccaaagcccacaatgattagagcaagcaggatctgggtagcctgtgaggagagaaatgggtacatgaggttacaagtatccaagaccctgtgggctaccccacgtccctcagggtgtgcctccatggcacacctttccctccatccaaatgccttcctctctcatttgtcaatcattctcagattgttaagagactcagttcaatgtgtttccttcccactttgcttgcctggatccttcaggttcaaatccttcacttttattctttattattttctatcttccctggtgttaccaattaatcttatatcagacagatttgagtacatgtctgactacccccagattataagcttcttgagcacagggactataaactattcacctttacatttgttttttcgtctgtctcaccagtatcctattattatcctaacagcccccacccccacattttccagcactcagtataggcttttggaattggggctcatcccagttgtctaaaaatttaaaaagtttgatgacatagagtggagaacctgggatgagcttgcatttcacctccccttcatccatggacccaactagggatgagaatagcccagtgggcctatcagcttgtaggaatctgcagggaaaagaatagcagcagtggttctcagggcgcaacttctctggcagtctagattttgtccccaggccacatctctgggctgtggcacaccaagtaatgatttttgctgttgtacaaaggatggaggctgtgcatacagctctcccctgggtgcatttgtgatgaaaaacgttttgcatgccttatcatttggttcactgtggagctttgaatatgggttttgaagcactcccaattcctttaagagcatgaaggggaagtcaaacctctccacttatggtttcttagcttcaagggaggtgccaccacaccctgaagtcacttcctcaatgagatattttaaaaagttatactagtttcttgcttccccctctgctgggattcaaagatcagtactaatttctcatgtaaggtgaagggggaaaagtagaattaactccctccctgaaaataatctctgcatatctctgcagacatacatgaataaataaacttcttttctccccttctggaagacctattgactggagaggacttacccccaagactcttggctctcccttcagaaaatccagcagagagctatgaggtctgtagggaaatgcagtcaatacagtttcgtttggttttatagtgatgacgtgagttgcccttctgtcctgggatgttgactccatgattctatggcagaactctagtaagggaaagagtgagcaaacattgccgcccaaatcatgatctacctctccaccagagtcacatggagccctcagagatgagcccttagtgatgactctactcagtagtagaatctcagaatcatagttgagtcacagagttttagaattctagagcatgctcagccccccatcttcctggtgaaaagtactgtatccagaagacttactctcttgtcaatttgcttacaaacatatggtaaacaaagaatagatggtatatacgaaacaagtccttacacatatgttcatgagttataaaggaactaaaacttatggaatattccttatgttctgggaactgtgtagaaggtgttgacatgcactaacatttattcttttaacagttctacaatactgaaactgaggaacagcaaggttatgtcacccaaagacatacaggacagggaaggggcaaactcaacttgacctgtctccaaaatctatgttttttaaactcagccacgcttctgccctcctttgaaaggagtttcttttacttgatgaattttctaacttactgtttaaccatatttctctgtattataaaaatcagtagataactttgaatttcgatttttttccatctttattgaggtatatttgacaaataaaaattatatatatttagggtgtactacatgttttgatatacatatacattccaaaatgattaccacaatccagctaattaacatatccatcacctcacgtagttatcttttttctttttttgtagtgagaacatttaagaacatttaacaattctttgcattttcaaattaaacaaaaaaaaatcagtagtaaagatgctataggaccagatggagttgcccctttataacagagaatattttagctttcataaagttaagcaaaatctaatgatagtcaaatccttcctggtttgaactacacaaatactaattaaaacaacagaaactgcctttagaaattttgcttcccatattgatcctttatattcctaaatttattacaattttaactatgagatcatgaaggtaaattgtttcataaaactaaaaccaatgtatacacataataacttgagtatttcctggtttgtagcgaccatcgatagcagggtatctcaaaatgagcactgatgacatttggactcaataattctttgttgtagaaagttataagatatatatattttaaactatgctactcctcatttatttaggaaacctcatatgcatagagagtgcaaagttaaactgcagccacactggaatttccataattgcccaagaaatcgagtttaatgcagaggctcacacagaacatattacacaaagaacagacaagataattgcagcaatgactgggaagaaagaatacgcccatgtggtacaaagtgcaggggtgatgatctgaattacaaaactgtgctatagatcaaaatagagctaatacccaaacaaagaaatagacattattcttttcagcatgagcagcatttagctccaagctagaagcagaaaacatgccagtcagagattatctgtaacttgttaagactaagatgtcttcattgactcctaccctgaaatgacagaagagaacatagtttatgtgccaacgactgaatattcttttttattttattttattcatttatttaaaataaatgaattcaaagactatatatagtctatttttatttttatttatttttttatttattttgagatggagttttgttcttgtaggccgggctggaatgcagtggtgcagtctccgctcactgcaacctccccttcccgggttcaagtgattcttctgcctcagcctcccaagtagctggaactacaggtgcgcaccaccatgcctggctaattttttgtatttttagtagagacagggtttcaccttgttggccaggctggtctcaaactcctgacctcgggtgatccgtccacctcggcctaccaaagtgctgggattacaggagtgagccaccgcgcccagccaagaaggccatttttaaacaatagaatgagcaccactggttggtgccacaggattgcagagatttggatttacatggtaagattcatgggaggcagggacatgcttgctgtgtgttgagaggtaatcctaagcacttgagaagatctctttgctgtcttccacctaatggctcatgaaaaagggcccagtagatctgtttctcagagagtgtccagggcagagtagtttaattatatatagtctttaatttttaattaaagttttcttacaatccctaatatgtaatatttaagcaatatgagtgtgaaaataatacagaaacagcctgcagagtcacgcaacttaccaaattcacactagcatgagtgcacattttcccttctgtgtatcaccttctgctcagtttacccaaagcagtttataaagtttatgaccattttggaagactggctgataacatttattgacttgggctttgaggaaattattttcaagagaaattaa

SEQ ID NO: 915004 - DNA, 4001 bp, Homo sapiens
ctattgccacactgtagctgctcttccagtttttcctaaaccatctgtaaagacagtagtggcatgaagcaagggctcagaaacaacaatagatacaaatttaacaggcacagtttgtaaaaagttcaggagcttagaggctggtaaatgaaagctgatattaccaataaagtcagctattgcgatttgccaatcaagagcacaagctagaagagtatgaaattgttttttgcttaaaggtaggaaaacagtagcagggttatttttgccatatgcctggttaggtcacaattacaatatgtggttccggtcattattgcagcaaaagtttgagtcagatgagttgtagtgcctatattttggcatgctttaataaacacactgatttcagtggcagtggcttagactggagttattgctgtctgacaatccttatttgctttttcaaaagccaattgtaacataagaagtttggtagccttaggatgggatacctgtttttcaattgcagcttgcagtcggttgataaatttaatgtatgtttctgtggcaccttgtttaactgttataaaggaaccctgggattgtcttacgggattttttttttttatgtttgtattgctagctgtgagcattgaggaaatagatggccacctgcttgaccctgagtctgagctgaagcaaaaggccctgttcccaatagcatatcaagttgtatcgggatattattatccaaattttgcaaggactgctgcatggctaaatcactgtactcactccaccacacagtatattctgcagctgaaaccaaaacatttaccaaagttttccaatcatgtggagtcatcttatagccatttcccagagcctcaatcacctccttcgtaaacggtgaatgtacactgttttcacggatacttttctttaactctttaaagacagtaaaaggcaaactctcatgccatctcctgttgctttgaacaataacagggaatgcgccaaaaagcgcctcagagtctcccttcctaagtccctcttggaggcacccctctactaagaaagtttgacgaggagttggcgttgaggacacggccacccgatcatatagatattcactgactggaggtcttatccaagaaccatctcttgggcggcctccagactcctcaagggggatgggaggcgccattgcctgaacggggccaacgaatacaggtccctttaagggtggaggaaaagagggcaatggcttttctatagggggaggaaaaggctccggtccgtcctcatgatcactagaaaaaaatatcctccttatgccctacagaagggaatgaagtagagagaggaccccccgcccgcctcccgctgtcctggttggctcctgttcttccttctcctttaaacctcctgaattcccttcaggcaaagacgggcggtctgacccactgcaatctggcagataaagaggatacaacaccgagtgtaccggcgcccaggtggtcaaaacaataacctcagtaaaatgaccttgctcacatcctgttttcaggcagtgacctacctgctccataactcaagtctaaggttccttgatcaggaaaccaagggcattcctgccgaattaagatcatagcgttgtgtagagctccaggctctgcagtgcactggttagccttaagtagctgtcgcactgtttttaaaaaacactttctgttctttggtcatttcttgacccatgataatccaacccctgatattttacgcgtgggtcccatcctcctgacgggagtcaggactgtcccttaccgggattccccgaaaattgatgagttttcctccttcaagcgtaacttcaaggcgatcacgtcggggtcaccacttgcagagcttatagcttgcagtgaacgccaagaatgagttcttagacaatttcagctgaagggggctgggagagggggtgggggcagctcttctgagagcccgcccttgtgagagcctgccctagcatctgtccgccaagtatttattgaaagggattgttaaaccacaaacatccactagatggctttttgaggtggggtcatgagacacctgcggccttgcaaaagctctcaaaccacattcttaggaggctgttttcagcgttccttatgacacacttcactccttgtcctgtttttagggccaaggagttacattcttatgcacaaataacatacacacagtgcctccgtatttttccatgccctgacctcaaatgccacgtacataagcttggatatgttgccatgtaccccaacactttaggtgtggctggcctgggcaaacactttgggaaaaaacacccattacccaggtgtcaggagatgagcttaccaggaaacaacagagtgctgaatctgccagattatacaatgagatcgaaaacagtcatccttcttgttggcatgggtgtgtgaggagtttaccagttcagtgtaagggtctgagatagaagccagggtttgaattctggctcctcttgttactgtgaggcacgggagcgagagggtcaccctctgcctcagtttccttacctgtgaaatagggataataccaatctcatagagtttggtgggaaacacacaccaacttgataaaatccatcccttacaacgtgacttgttataacacgatgcggctgagatgttttgttaaatataacatatctaagccagtgacttacaatggaccgtggatgtgcattgcttcccagtgctctgagacctactatgcatgctcgggagagcaccagcttgcagattgtgcagcagattctctgtggttctgcaagcgctcttggctgataagggctcagcctcactgttctgtgctcaaaatatgtgtgtcttcaggaagcctctgtgccatttattttgtgataggtctgacctatattggtgaacaaagggggcaagggacagcgttggaccctatgcagagaaatagagcgaaaaggacacataggctcttgagcaaggttttcagtgactggaggcacctccaaggagatggctgagaaaacacaggataagaatctgctggcattaaggggtgggggaagccatttgacatttttaagggcttactaacatggctcccttcagcctaggaggtgtgaccaacacgtgatgctcagagtggatcaccagagggattgtgctgtgacttcccaaatagcaccgtctccactgagtctctcatttccaggatctgacactaacctgattattagtagacatgacaactactcagagcagggttggcaaacttttttcaagaatcagatagtaggccgggcacggcggctcacggctgtaatcccagcactttgggaggccaagacgggtggatcacaaggtcaggagattgagaccatcctggctaatatggtgaaaccctgtctctactaaaaatacaaaaaattagccgggcgtgttggcgggtgcctgtagtctcgggaggctgaggcaggagaatggtgtgaacctgggaggcggagcttgcagtaagccgagatcgcgccactgcgctccagcctgggtgacagagcgcgactccatctcaaaagaaaaaaaaaaaaagagagaatcagatagtaaatattttgggctttggggacccatataacttcgattgcaaacacgtgactcttccattgtagtgcaaagcagacataggcaatatatacccaaatgggtgtggctgtgttccaataaaactttatttatgcctgggtgcagtggctcatgtctgtaatcccagcactttggcaggctgaggtgggcagattggttgagctcaggagtttgagaccagcctgggcaacatggtgaaacctcacccctaccaaaaaaaaatacaaaaaaatagccaggtgtggtggcacacacatgtcgcagctgctcgtgaggctgaggtgggaggatctcttgagccccggaggtcaaggctgcagt

SEQ ID NO: 915005 - DNA, 4001 bp, Homo sapiens
cccaccgttaattgtaaaaagaatcttttgttgttgttaatgagcatatctatgttatatatgctcacatataatttataattaagaattataaatatcatgttaatactgggaataaacaactggttagatctgagaaagagaaaaacctatgttcagtgttatttcagaaacaattatagatatatactcacaaatatggctccccagaatggataacctgctttaaatgatgaaaaaatgtctccctcaatgtgtgaaatatcaagtacagagcagacaactgttccaaaacaaaggcatatcatagcagtcagaatttgtgttacctatagaaaaacacatgaatttcatgaaaatcaaaaaaattttcccgagattgtatcattttttaataatagaagccaaacatgagaaactgcgttagtgtcctagactgtcctgagaaatgatccacacgtaagattttccaggataccctagccactataagaattgatacaagcactacctaatgcatggaaggccaatacttttctccatgcgcctttatgtacgtagtcatgttgaacatcagtaattgttctttacatctaagtaaagataaagattatgaatccttcactcctgttggccattctcgtcctagcaatttaaagtctttatgaggaaatgcttctctcttcccaaaaggacccagttagtgtcaactctttatctaccatgttttttaaaggacctaacacctctcatgaatccaagtgggaaaacagttgatgcaactcaatattcttttctagacccaacccttactctagtcaaagttggaggaggctcactcacccccaggaactcctgctcttttttcaaaactgtcagccatgtatgcagtggtggggatgaggccgacttcaatagtctgcctgaagatacttcctggggagatatttccaagacttcaaatgcaggcacactgtgaaatttaaaagcaattcagtcatgagaacattctgtaactccctgtgcaacattctcgacagacagaaaggggagttttgtttattttttcaaagccatcctgtaattcaaatcttcattgtaatcaccaagaaactaaagctcagagcatccaagtaactgaccaagaacacctgaacactatccaagtgattagatgggacaaaatggagcaaaatccatgccaaattttcctattcttaatccagtgttactttcaagttctttctcattcatctatgttgacaagtaaaactgaaaataaacacatttacctatgcatctcacaatccttttaacatagaaatgtatctgaatatattttgtcagtaacaaaccccaacttcatgtgcacagaatacaatgaaggaatggctttgaatagctagatgggactctattactattttcatcttcagagaagcatcccacagcttatggattataaagaccaatcaagaagcaggttactttatcaagtatttataaaagcatgtgtgaaggatatgtgtccctcagcacatgtcagacccagaagccagagatctacatacacagtatgaactctcctgtctcatacccagaaaatgagcttctaatgtgagaaaatctatttccagtttgcaagctgagtaaaaatgttcctctccagggagagagaaccacatggaaagtacagcaagtagcttcctcatacccaatatattaattaaactagatggatccatgcctaaatcaataaagtttcatctcctaagcaccgtgactatgacttcccctgccactaagtgactgagggtagaaaaaaataataccttgtacctacctggaaggctcctgtgggagagcaagatttgctctcctattactttctgtgtccattttttcattaaccgagctgtccaggaataaagaatattattatattgagacttggtggatttcctcttactgcatgctctgaataggcagttgaaatgggttacctcatgacattgatgattctctttatacataagtcatttgccagacagataagtttcttggctgattaagatcaacaggcttttacttgtgatgaatagaaaaattaagaagtctactaaataaagactaatatgaaataagaaaatttgagactcctggagcataattttgcctgagactagcaggatttacagaacctgaaaatgagacattttagtaggagttgagaaggtgagaaagaactgcagaaaagaaagagatgtgcccttcttctggaattgtccccacttgtgtcccaattcagccatttctatggcagaagttatccaattgcacctttgaaaagcttgtcttccttgtttaaggcatgcttggtttcacacatagacccaaaactgaagtgctgttgtatgtgagtgagtatgtgttagtctctaaatctccagatccatctctgactttaatatctatcatctttctctctctttccgtcttttggaaactgtttacatgattcgctgcagcagatggtcttggaaatacaacaggctgcattctaactgctgtgaaccatacctgatagtgtgtaaaagctaagaagactccattgtctgctaaattattagactgatggtgcttagatctttacagtggcaagaatgggatagtgagaacactgagagacatgaactttataacaaatcccatgagcaaatctaaacagcattggattgagtagtatgcctaaattagaattagggctaaaccatgtgatcattgaaataccataactagctagaccatagcaaaatcagtacagataaaattcagagaaggttttaatctcttttatttcagtttaattataaacataaccttgaatggctttcaataatatttaagatactaaaaatcacacctctaatcatgtgtggtttttttggtgggggtggggggtgaaaaagaaaatctttttgcaggaaactaagatatttgcataaacagagtatactaaaagacatattggtatagcttttgtatctaagtttattaactcaggtgtcatcttcccatggtgtcttcaggaattggtggacctaaacaaggtgctattggaattaaggaatagaactttctcacttatacgttcatccaaaaagaacttagtgttccatgccaggcactgcccttatcactgtgcatgcacagatgaatgccaaaatcccaggtccttctagtccacaatcaagcagaatagaacaaagataaatgatatattattacccaatatgttggaggccagaggatgttggaacacatagaagggtaaaacaattctgcctgataggggatatgtagagttcagggaaggaattcccagacaaggtaacatttgagagcagacttaaaattaaaatgatagcctcgataattttctattttctttttttttctttttttttttgagacagagtctcactctgtcacccaggctggagggcaatggctcactgcaacctccgcctcccagattcaagcaattctcctgcctcagcctcccaagtagctgggactacaggagtgtgcagcaacactgggctaatttttttgaatttttagtagagaaggggtttcaccatgttggccaggctggtcttgaactcctgtcctcaggtgactcactcacctcggcctcccaaagtgctgagattacaggagtgagccactgcgcccagccacgaattttcattttatctttctttttcttttcttttctttttttttttttttttttttttttttgacggagtttcgctcttgttgcccaagctggagtgcaatggcgcgatctcggctcaccgcaaactccacctcctggattcaagcgattcacctgcctgagtctccggagtagctgggattacaggcatgcgccaccacgcccggctgattttgtatttttagtagagatagggtttctccatgttggtcaggct

SEQ ID NO: 915006 - DNA, 4001 bp, Homo sapiens
tcaatcctctgtgctatcccccattcctgaaagacaagtcccctcaagcttcacctggataatttctgctctccttccagactgaattttttttttttttttttttttttttttttttttttgagttggagctttgctctgtctcccaggctggagtgcagaggcccgatctcagctcactgcaacctccgcctcctgggctcaagctatgatcctgcctcagcctcccaagtagctgggattacaggcgtgcaccaccacacccagctaatttttgtacttttagtagagatggggttttaccatgttggccaggctggtctcgaactcttgacctaggtgatccacccacctcagcctcccaaagtgctgggattacaggcgtgaatcaatgcgcccggcccttccagactgattttcagcccacatgtcatacttccaggatgctgtttttagtcctggccaactctggaagaagcatgcacccctttgggttgctctcaaaatttcctcaactttccttctcataccacttaatcagcctgagctttaattgcctggatacttgtctgttacctcgttgtctactcatcactgcaactccagtgcctagctcagaatcatcagatggcaagcactcagttaacacacatgttcaatcagtaaccagacttttggtccagcccaaggtagccatcctgataaatgatgatggaaaatacctctgcaagcactggagcctctcatctcaagaaactccaagagcatttctgaagagagcaaatatctaaccatattatttaacttgatttgtttcaaataatcaaaataatcagggagaattttcagcctccaggtgaaacaaactatgttttctaaaatttggttaaatcagttatttatttttaaaaaaatcagagaaatggtccgggtgcagtggctcatgcctgtaatcccagcactttgggaggcagaggcgggaggatctcaaggtcaggagattgagatcatccttgctaacatggtgaaaccctgtttctactaaaaacacataaaattagctggttgtgacagcacgcgcctgtaatcccagctactcaggaggctgaggcaggagaattgtttgaacccatgaggcggagtttgcagtgagccgaaatcgtgccattgcactccagcctgggtgacagagcgagactctgtctctctctcacacacacacacacacacacaaaatcagagaaatgtagattttctaggaaactgccagttaagttcatctctccagctcttagtatgtggcaggcatttgttctaagggctttatccatgtttactaatttagttctcacaacatcagatgaatgggtactactgctatgatcctttccatctaacagatgaagaagctgaggaacaaagaagttaagtagctttcccaagcccacacagccagcaatttgagaagctaaaaatcagaacctcaagctatcattacactccactgtcccctgagctatgctaaaatgcactttgcagaccccatacttcaggcatatcgagaccacccctcatcatcagagctggcagacaaactcaggtgcagccagtgggatttaatgtacctaagaggtgcgtgtgcatgtgtgtgtatccatacccacattttcccaaagaaattgctgtattattatgtctaacactttttatcatggctccaaaggaatcatcacatcctaaagagaagccatgttcacagttaaatgttccaaacctctacatagcaaccaaacagagacctttgcagacatccccagtagtccactgggaggcattttaacgaaagatataaaagaaaggggaatgtctatggagagggaatctataccttggaggcttcaggctttggcagacggctttcctcccaagtccaccttgtcgcaagtaggagacactcagaaaagatcactacagcatcttttcccgataacggaagcctccacagacttaacgttatctttgccttatgcaacactttagaggacttggtgaaagtgttttgcgggctgactgaccagtgtgctaatcacatctgcatttggggcctcgctgatccattgtgtttccccagggcttagtgatgattaggaaactggtgtgagggataactgtcttctggctttcagatgttgcttaacacattgctggaacaggaaacacaagcaacaatatgggtagacaagtgggaagaggttgtgggttggaggtagaacagtgttaggtgcatagcaagaagagacaaagtcacactgtaagagaagcatctggaggagggaggtggtcactcaggcacttattttacatgatgtgccagcaacggtgctatgtaccttatatgcgtgatgacattcaattcttacatgcttagagaggttaattactttgcccaatatcacagatataataataatgctaattattgtttaaatgtattaaatggttactacatacaggtcattgttctgaatgctttacatatgttaattcatctcatcctcacaataacccaggacccaggtactactattaacccgatgttatggtagagaaaactatggtatagaaatgttacccagctttcctaaaatttaactggaaaagccctgtgcaaaatctctgttttgtacaatggtgaagcccgaagtgtgcctgttatcctaatatgattgttaaaacccctcctttcagtttcttttttgttttttggtttttttaggttttttgtatttgtttgtttgtttcgtttgtttattgagatggcgtctcactctgtcatccaggctggaatgcaatggtgcaatcttggcttactgcaacctccgcctcccgggttcaagcaattctcctgttccagcctcctgaatagctgcaactacaggcatgcaccaccactcccagctaatttttgtatttttagtagagacagggtttcaccgtattggtcatgctggtctcgaactcctgacctccggtgattcacctgcctcagcctcccaaagtgctgggattacaggcatgagccatcgcgcccggcctcctttcagtttcaaaagtggccaaattatatgcttatcctaaataaatgtcctaaaataggcaatagaaagatcagagccaagtgacaaggagtaaggaagtaggtaacgtgaagattcaaaccacaatccttatgaaggtcacagggccaggcctgagagaaagaatgagggcacagcccctgatccatgccccaggggagtctgtgagacagagaagaatgttcacagcaaggaaagcgaggtcctagtcctacaaacaggagcgtcagtggggacgtgatcacaggaaagagaaagagggccagttaccaagaccaaaacatagtgtgtgggcagagattgtgaatatgaaatgagcaggggcccagttgccagaaaatttctgcacaggtgcttctgctaagagagctggcacctgagccctagggcagcggctctccagggtctacatttaggagcgaaggaagggactgatgaaagagaagacagagacagagacagaagtcagaaggaaatagccaaaaggaaggtggtaaagataagatccttccctccccgttttatccagaaccattgcaaatggaatactgaagaagaaagagatgacaagaaaatgccttcagcgaagaagagaaagaaatctgaagaaatgaaaggaaagagtggatgctttcaacatgctctttttgaatttggagctgtagaaaaagccatgaaaggaagttacttaaactctaagacttcggttctcccatttgtaagttgaagatcatagtgcccactttggggtataaagtataaatgacagaatgcatgtaaaggtcttaataactaagatcttcacatgagttcaaagtaaataataaaaatgattgagctctttcttcaattccttagagaatg

SEQ ID NO: 915007 - DNA, 4001 bp, Homo sapiens
acagcattttatagtctctatcttctctcagacactattcccccacttccccaccattgcccacatgtggattagtcagcctatgacggtaaataagggtttaagaaatgtgttatgttccttctacattgcaaaagtcaaagttatttggaaagtgactaaagatgattcttcttagtccatctaaatgtgtactttattcttctttaatgtaaaagaacctctgcctcaatctctcaggcacaccttcagactgagaatttaggacatgttgggtctgtcttatcaaacgcactggtggttctctctctgtgtttagtgcctctctggtaagactgtaagcttcctcgagggcagagcaattatatcaaaataaagcttgtaactgactcctatgctttcccataattctttggtaacataggtcaggttctggtcattcaaggctggtgctttgtcattctaagaaactctggccataaattcatataactgcctcctctttttccaccacagaaatccttgtgttaattatctacggcacatgaagtccccaagaacaaaaacgtgtttaccatccagggcttgacttctctatattcaattttttttttaactgctgagaatattggatgcatatgagggacatttcttccaggttggagaagaatttaaaccttggttttgccacatcacctatatgcatcaggctcttaagaaatacaatgtctttcccccacacccctgataaagaggtggggaaacccagaccacccttccctcttctattggccccagtcaccttgtggatcagcagcaccaccagtctcttatttcctcatttttatgtcaccatcctcctcatgggtcacaattgcaaggagagagcatgaggagagtggtacaaacagccatccgtttttcttggcaaagttgtcaaatagactagaaacccaaaatgaggcctgaatctggatggttttagaaggatgatggggatgcagaagtggtggcatgggaagggaaaagggggaaaggcccgggctaggaaccaagaattctgtttttgtttttgtttttgtttttctcccagcccttttgttaacttgtgtgattctgggtacattatttcccttttattggcttcttttacttcatctggggaaagattacaatggccacgaccacttacaagcttctttcttatcctaagaatgctaaaagtctacaaggtgtttttcattagcagattttatcatgagcagcctcagtttactgcctgggtgccccatgaatagtgccaaagaccactggagaactaggtcaggccacagcccatctaaatgtacaaggctggggaccctgcctgtgccctactccatgtacaccaaattctgcatgtgatacatctgttcttaaatcctgagttataaaaataaccagtcagacacagagaataaagaccacagaagaagggcattaacagtagatgaggtaactagtcaaaggtttaaaatgttgctttcagtgttttgatatcctgaagactcaggggacaaaagtaactaaacaaccttatccagcctccaatgtcagcctttaggaggcttttctaactcctatcgactgtagcaaaaactgttcctcatccccccaccgaatgcacatttaaaggtgcactcaacccaccccaaccctgaataccagcttgggtcatgggaagtggcctcattattcttctcattcccctcccagaaattcttaacccaggaagtgaaacaagccatcagcccgaaagcctaggaaggcaagtccctggacctacctttcttcaggcctgcaatgtctgctgtaggtctgatgcatgcagggctctgggcaagttcctcaaagttctttggtctagacccaatcaacttcccccactccacacctcactcagtttaaatctgcattcctcttctagcagatgtttggaaccttaaaggctgtgctgagaatttctgagacgcacagctagttcctcttttatatcggaagcattaactgattttgtgttcccaatatgggtgtggatgtctattttgaaatttgctgaaaaagcaggggctgcctgatacagtctttcctatgaaaataatactgctaattactgtggatatcagtggtagaggatttactgtatgccagactctcttcaaaagtcgttatataaacaagtaaatggtattttgtaaataccccctttcacagggtcacacatttccacagtactcttgtcttcctggagcactactattactattttattaggttggtgcaaaagtaattgcagtttttgccattattttatggccaaaatcacaattaacttttgcaccaaccttaatatacacaacttaaatgttttatttacatgaaattccacctttagagattcatcaggagtggccataaaatggcaacaagttggttgtatggcaataaaacaacacctttctaagtgaaggaagcagctggtatcatagaacgagctggtctttgactaagatcaaaccaatggcaaacatttcttgcatggccctgttaatctcctgaacctaagattcatttgtaaaataaaataatgcctactttacatggaggaggaaagcaaagtggtgtgcagttttcattcattcagcattttctttagaaaaactactataagccaagcagtgtgccgtgtgcttctgaaaaaatggtaaaaaataattttcactcaaagagtttatagactacttggaaaaacagaccagtaaataaatcactacaatccattactatcagttatctgcaaggtaaagtggcaatacagatgagtaaatacatcattacaacccattgtaatcagtgatctgcaaggtaaagtaggatatcctaagagagctcataggaggatcaatgaacccaacattgggtaggcagaggagacttcctagataaggggacatctaattggagacctgatgaatgagcaaaagacacacaaatggaaagggaatgaaggaaggtaatattattatttctatttttcagaagaagaaactgaaactcagagatattcgtatagctggtatagatgagattgaaatccagttttacttaattccaaaaactatgtggtctataatctgaaattacgattctcaaaattaaaatagattatatttcagaaatattgtcctggtttcagacaacaggaataaataataataaaatcagagaattaggctcaaggtagaggcagttctctagggaagggatgatggttactgaactacctgtgatgctagtgaagttggagagaatgaatggatttgaaagatgcttaggaacaagaaatgacagtacttgttggtataatggatgtgtaaatcaggagaaaaaacaggaaaggatgacactcagattctgggttaggaaactgaatgagtgatagagccattcagtaaggcaatagacatggaccaggacagaactgcaggaacaaatagtaaaattttgaacgtatttgatcagagttgtgtagggaccttcaaataaagttgacaagaagtggataactggcaggagctagggaatgagaacatggctatagaggtaaacccaacagctcttcgcccagagggatgaggtcacccaggcttgtgggtggaggcagaaaacgtcaaaccctttttctagaggatagagacagtataatcagaaataagatttcccagaggattatgaaaaagagggtaaggaagatagcaggcaaactcggaaaatgtggcattgcagaagacaagggtacagagtttcatgacttcctaagagaggttgaaattctggactaaggacaggcatcagtctctcctcccactccatatggtatgaaatgagacagtatcaggttattattagcagataacaatttcaagagaacaataacatgaaatttgacagagaaatatata

SEQ ID NO: 915008 - DNA, 4001 bp, Homo sapiens
cccctgtgtttattctccctcatcacaccctgtgttaattgtctgactcctcactcaactgagaccttgagctcaggcactgctttcttttccctgaagccattgctctgcccattctctggcactaaattaggtcctaagttaatgtttattgattgtgactacactgggtttaataaatacctctccgcagctcaaaaggtatatctgagaaacccttcccacttcacttctgtaaagaataaattgctccttcatctctgcttacataagcatttcctgcacctctgtgataacatttatcacactgacttgaagtgacctgtttacatgttttcttgctagactgagaggtctttgggggagaggcccattgcctttctctgtgtatctggcttataataaatagtaactaatttcaaatgaatgaatagccaaataaacaactgcaagcctcaaaagaagtattcccaaaggaacttcaagacctaatgatggaatatcagtgactgtgatgaactaatggggaaataatttcaacaaggttagttttttgcacttttgaaagcatgtcatacaactggatctagcttatttcattgtgaagaattccctaacatcctggttggcatggcttcaaattgaacttgattgactatactcaccaaaacagagccccagaatggatatcctgaaagaaatataaagggaaaccttggatatggttttaacaaggtgaaaaggaagataactccaaaagaaaaggtcataattccaaacaggatctggatagtctgcaaatagaggaaaaagtcatggtgaggaaaagcaaagtgatagtttcccttctgtttagaatatcttcttttggtcaaaaggatttggcaattactctctttggtaattaggggaagaataatagaagtccctttatgatgctcctgggtactttcttaattcctctatctggtatttggtgataggtaaaatgatctaaatcagtgctcctgaaaatgtggtccatggattggcaacatcaggatcacttgggagctagaaatgcgaactatcaggccctatcccatacttactgaacggtctccaggtgaggctgggaaacctgtgtcttcataagttcttcagttctttagcccataaatgtgaatgtctgagaaacactgaattctaaatgagtataccaggctggcctcaagcagaattggactgtgaggagccctgcctggagatggccaattctctgagcctcttgaggtattgtcacactctcaggcccagaggactctccatctcttcgggttttttttttttttctctccctctctgagccactcatgtgatgcactgtgacaccaagcagtggtttgacaagtgctgggaaagactaatgaggacaatatacaaaaatggaaggtatacaatatacaaaaacgtgtgagtctatgtgctctgctctcttcttctcagtccaccttctcagtctgagtaatctcatttactgccatagcaactatcactttttaagtaggtgagtcctaaatgatagcattttttgtcaagtccagacccacatgattcgttcttctcaaacatcctctctcaaatggcccaccaacactctatattcacattgtcttaaagaagaattggaataggctcctaccttcaaacatgtgccaacagataatttccctagcctttcccctgcctcagtaaaatatacataggggcaagtcttacttacccctaagattttcatttttctagcaaataatttttgcaaggggctttgagttgaaaaggtcgtggctgaaagttctgtggactcatattctgaagcagtgatttctggaggaaataccagaaacaccggactgtgtgcggtgcttgaatccatgatggtgtcggtgataatttgaaaggagatgatttagttggtacttcagtctagaccatgttcttttcttgtgctgaggctgcctggagcactggaattgtttgctttgtcttggaattatagaaccatagagtcacagagtcatagaatctcaggactgctcaagatcccaagatggctataagtaaaatgcctgggactggggatcagagaacctgacaagtagtcctggtttagttaggagtttactgtgacttttggcaagtcacatccccctctcctggtttctgattcctcatatatacattgaccaaattggactagatgatctacatataaagacattttagggaccgcgcatggtggctcgcgcctgtaatcccagcactttgggaggctgaggcgggcggatcacctgaggtcaggagttagagaccagcctggccaacatggtgaaaccccatctctactaaaaatataaaaaattagccgggtgtggtggcacgtgcctgtagtcccagctactcgggaggctgaggcatgagaatcacttgaacccaggagccggaggtttccttgagctgaaattgcaccactgcactccagcctgggcaacagagcaagactctgtctcaaaaaaaaggacattttagttaccaaatggcaactagatacacatttattccagttccatatcttcagacacaggtagaacgcaaaatctctcaggccacggaacaaattaaccacttcttgaagtatagataacatccatttttcctgtcactttgtggttttgccacctgatttaagtagctttagctgtgtaacaaatccctcaaaatgtagttagttccagcaaccaccatcggcttttgtttacacatctgtgggtcctgtgtgtggtctgtctcatctaaggctgctcagcacttctctaccaggctgtctcatgcaactgtggtcacctggtggagtgtccaattacatgaattaggatggcctcagtcatgtctctggcagttggcagactcttggttctcttccaattcacaaatacttttcaaacctctgctgagtcatgtgtgttaatgtcatattggccaatcaaatttcatagacaacccagattcgaggggtaagaaaataggccccctaatgtcttcatgggaggatctgtactttcatcttgaaaggacaagaaagaaagggaagggaacaatttgtgtctgtttttaactgtaccttgtcattttctggtgtttcctattgagatcaggtcttccttaattgaacctcatgatgtgacagcctctagccacttaccagttgccagttagaatattttaaaaggccacccctccctcacaatttcttttctctgaacgtatccatctcttgttcagttttctatggacgttgaatcataatggtgattatccttcatgaacatcatctgatgttgtgttagcattccctaagttaagcacactatgttgcaacatacttttataaaacaccatttcaccctaattactcaggttttaactttgctctataccttccccagtttttgttttttctccctctaagcatgatgactagcacagtgttataatagctatctgacaaatggcagaaatataactttaattttttattgttctttgttttttattattctttaattcatgcaatctggtgatgcagtggaagacttactctttggagaagagaaacctagaatgaaccccaagcccttttatttactatttatggggtctaggctaagttatctattaatttacatatttattaaaatattacatttcctttatgagaataaaaattgttatacagttattgtgagtaaattttaaagtacctggagtgtagtagatgctaagtaaattgtagtagtaataaaaataagagtaataagtattatttctcttattattgccatttttagcatggtgagcagatactttgtcttgctttatgtttgcactctttccaaagttcattttttgttgattctttataggttaaatgtgtttctatgagcttagctataatactggaa

SEQ ID NO: 915009 - DNA, 4001 bp, Homo sapiens
gatcccttttcacggcaccattctcaaagcacagaccgcccagtttacaaatggtctaaacacatttgaagagacaagagctctgctcccattaattacacaaccttaggtaagtgactcactgagtttatgcaattagaatacagcggacacagagttaaaaacagatactccttccatttgcccactctatttccaaaaggccctagtgtctcttaactgctgtcaaggagtttcaagttaaattactcctctaatgaggtcacggcaagggaatagtgagatgagaaaagtcttccagcattacctacctgtgcccgttggttccagctgagtcctcagaagctccaaagaggttttaactctggtttctcagtcccatcaacggtttctacttaccttcatcttctgaaagtcatcagcccttccttattccagtgtttacagctatacaggatgtgatactcacagattgtagatttgtgaaatgttcctgcacttccttttctgtaaacttctagcaacttcagtaaaaccatgaaaagagccaactaatatttgtgagagttcaggagtcatggagccttatgtgtgaattgccacttcgagacatacaagtttcctgttgttaggcaagtctgttcttgaagcttcagttttctaatctgttaaatagaggagcaataccaacactggagaattgtcataaagatgagcaaaaatatttataaaaagcctatgctgctttgaagctttcaataacatgtaactaataacagtaatagtgctagtaatcataatatagagaaagaacaatattccactgtctataactaaccataataataataatagcaataatgactacactgctttaaaggaacattcattaatatatagctaatagtaatatagaacataaaaaaacttttaaaaaattgttttttatatatatagtttgtttgtttgttttgttttatcttgcttttctaattccccaagtcttggcaggctgaaagcaacctttcaatactgattgcccaactgctgcctaccctcaagtcatcttcctcctctggctgctctttttctctaacaacagatctttgccctccagaaaggttgggcccctccagggaagcattgaaatattgaaacagagaaggaacaaatgggaaagattcagcaggacctaaatgaattcagtaaactcatatgcaggctggttttgtgaggacagaggcactgtgccccttcaaaaccttgggtggcattctttggaagctgacttcaatgtatcaggcaaggaaaccagagccagtcagggcaatggcaaagccccaccctgcaagcttccttcctcctttccttgggggagcttccagaatgaacccagaaacacaacctgaaccatcaccgtcaccacagagggccatggattctgcacttaattccacacattaactctcctgttgaagaaaggagttaagaagcaccatttagaaggctggattagttctcagcgtctgaatgacacagacattatgaaatgtaattggcttgtcttaagttctaacaataaatctgagaggaggaatggactcacacagaaagcctggggagaggggcagaatcacctccaaccttgctcacccaagctcctggcgccccttcctctttcgcagagtgccgtctgtgtttccagtgggtgccctgcatctttgtcaccctcacagcatctgtgaaacagtggaatgcagctctcctcctgagctttgattaaaaaggagcccagtctctttggtctcttcaggagcaatcacaccccctttcccttcaggggaatgtgctaataaaccagttaaagttgcctacctaagcaaaggctccctctccagtcagttttcctctctgtgctatttaatttaaaatcatttctgagttttaaggattatgtgagacaacacgtgtaaggttcctagcacagaacccttcggaatgatggcctaaaagcggtctgttgactgtcttcctcaccccccaatcctcccccctctttttttttccattttggctttagtaagcttaaaacaattctcctttctcttgtctttcagcttacactcattcagccttttacattcccagttttttccagagtctgaattctaccaacctaactacaagggagaagactggtatatcaataacacgttctgattaatgatctgggacaggtttctcaaaaaagctactaatgccactttggactgggtaattctttacagtaggtggctatcctgtgcactgtaggatgcttagcagactccctggcctatgccagcacaatcccaccctatgtgtaacaaccagaaacagtatctgatattgtcaaatgtctcctgatggagggagaacaaaatcccctcacattcatgttgagagctactgacctaggagcaaaagggtttttgtgtgttctgtgtaaaggcaggtgtgctagaaacagaacaatattttctttaaatcaatttctcaacttttatttttaaaattttaaattgtggtacaaaacacatataattcattattttaaccactttttagtgtacagaccactagtattaattttgttcacattgttgtgtaacagacctctagaactttttcatcttgcagaactgaaactctatacccattgaacaaccacccctttccttcctattcctagcccctagtaaccaccatcctactttctgttccatgtttgctctgtctctaagggaggagaccacccctcatattgtcttatgcacagtttctgcccccaaagaaagaagaagtaaaaactaaaaggcagaaatgaaatctacaggcagacagccctgtgctgcaccttgggcctcgttaaagattgacccctgacctaaccggttatgttatctatagattccagacattgtatggaaaagcactgtgaaaatccctttcctgttctgttctgttctgattactggtgcatgcagcccccagtcacataccccctgcttgctcaattgatcaagaccctctcatggggacccccttagagttgtaggcccttaaaagggacaggaattgctcacttggggagcttggtttttagagatgtgagtcttgccaaagctcctggccgaataaagcccttccttctttaactcggtgtctgaggggttttgtctgtggcttgtcctgctacatttcttggttccctgaccaggaaacaaggtgattaatggatggtcgagacagctccttaggtggcttaggcctgccctgtggagcatacctgagggggactccagccagcttgagtgaagcagatcctgagagcactcccaggtaggcaattgccccagtggaatgcctcatcagagcagtgcacagcaggcccctgtggaggatcaatgcagtggctgaacaccatgaaggaactggcacttggagtccggacatctaaaacttggtaagactggtctttggaacttgcccactccatttaagtggaagcatggcctgatcacccatggtgtgcctgtaccagcactttggtttttgattttgacttgacttggattgcttgatactttggttttggttttgacccggcttggatttcctgacactctgattttggttttgattctggtttggtgtaaactgcaaaagtgtgtgtgtgccctttttacccatttttgttttgcagtgtgagcatggtgttttgtcttcaggaagcatgggccaggcacaaagtaagaccactaggagctatgttgaaaaatttcaagaaaggatttaagggagattacagtgttactatgacaccaggaaaaactagaactttgtgtgaaatagactggccagtattggaggtgggttggccatcagaaggaagcctggacaggtcccttgtttcaaaggtgtggcacaaggtaacttgtaagccagggcacccagaccag

SEQ ID NO: 915010 - DNA, 4001 bp, Homo sapiens
tattgtaaaaatacaaagacaacaatagaaaatcaattcctcatattcagaataagggaaaatatatttttaagacaacctcttgtggaaaagttctgggacagttttctccaagtggcttctaccctaaagtccctctagcaaaattttagggtctccacactcacgacagatgtccagtcccaagacatatatcatctcttggcacttcccccaacccctctccaacacgttctgaattagatttaccccaataactttgatttctgcgtgtagatgtttcttcaggctatcctgcccctggttggtgggttcgggtttctctgcttgggagaagttgatgacatttgatgggagcactatgatggtctcattgggaacaggttgtgatgtcatgatggtgttgccaactatgtaagaaaaaatagatttagctcttaaaaagtacagagctcccaggttctgactccaaaaacagtaactcagtctttgccaattagtctaggcttggcctgtccattagagaaagaaactgatagtatggaacagtgaaaaccacacaatcttggtttcatgaggatttttccataatgtttgacacagtccattatagataataaacacatcacagggtggcagcaacatgaatcttgagaggtctcaatgtccagaggcaaatggtcacacaaaatttgcaatatgcaacaacctccctttcctctagtcctactgacaacaactgtattgccatatatttgatgaattttcagactaataaatgaactctgcttacttatttcttgtttaataatactatttattagcactcagatatgtttatcatattttaccagacacattcttaatttttaccctgcagtgcttttaatccttacaacagctctgcatgttagtaagttagtaaaaacatgtaataaataagaaaatgcaaaataaagtttaagttatgaatgcaaataatatacctattgcatatatgtgtggcccagagttaatgctgaagaaatatttgcagttacccttattgttcaccctggttcacacagccgggaagctgtaaaaccagtcttggatctcagctttcctggagtctgaagcctttgcataaatctctagatcattctacctcttcctaatttcccacctggcattgccagcctgtgtctgagtttactcaggctggagaaacagctgcatgcagtggtatgagaacaagtcttggactcataacacataggctcgcgtcgttggtcctccccactttttagcataaagaccaagtaggttgtggtatttgttgctaagctcagcttggatcccttttcacggcaccattctcaaagcacagaccgcccagtttacaaatggtctaaacacatttgaagagacaagagctctgctcccattaattacacaaccttaggtaagtgactcactgagtttatgcaattagaatacagcggacacagagttaaaaacagatactccttccatttgcccactctatttccaaaaggccctagtgtctcttaactgctgtcaaggagtttcaagttaaattactcctctaatgaggtcacggcaagggaatagtgagatgagaaaagtcttccagcattacctacctgtgcccgttggttccagctgagtcctcagaagctccaaagaggttttaactctggtttctcagtcccatcaacggtttctacttaccttcatcttctgaaagtcatcagcccttccttattccagtgtttacagctatacaggatgtgatactcacagattgtagatttgtgaaatgttcctgcacttccttttctgtaaacttctagcaacttcagtaaaaccatgaaaagagccaactaatatttgtgagagttcaggagtcatggagccttatgtgtgaattgccacttcgagacatacaagtttcctgttgttaggcaagtctgttcttgaagcttcagttttctaatctgttaaatagaggagcaataccaacactggagaattgtcataaagatgagcaaaaatatttataaaaagcctatgctgctttgaagctttcaataacatgtaactaataacagtaatagtgctagtaatcataatatagagaaagaacaatattccactgtctataactaaccataataataataatagcaataatgactacactgctttaaaggaacattcattaatatatagctaatagtaatatagaacataaaaaaacttttaaaaaattgttttttatatatatagtttgtttgtttgttttgttttatcttgcttttctaattccccaagtcttggcaggctgaaagcaacctttcaatactgattgcccaactgctgcctaccctcaagtcatcttcctcctctggctgctctttttctctaacaacagatctttgccctccagaaaggttgggcccctccagggaagcattgaaatattgaaacagagaaggaacaaatgggaaagattcagcaggacctaaatgaattcagtaaactcatatgcaggctggttttgtgaggacagaggcactgtgccccttcaaaaccttgggtggcattctttggaagctgacttcaatgtatcaggcaaggaaaccagagccagtcagggcaatggcaaagccccaccctgcaagcttccttcctcctttccttgggggagcttccagaatgaacccagaaacacaacctgaaccatcaccgtcaccacagagggccatggattctgcacttaattccacacattaactctcctgttgaagaaaggagttaagaagcaccatttagaaggctggattagttctcagcgtctgaatgacacagacattatgaaatgtaattggcttgtcttaagttctaacaataaatctgagaggaggaatggactcacacagaaagcctggggagaggggcagaatcacctccaaccttgctcacccaagctcctggcgccccttcctctttcgcagagtgccgtctgtgtttccagtgggtgccctgcatctttgtcaccctcacagcatctgtgaaacagtggaatgcagctctcctcctgagctttgattaaaaaggagcccagtctctttggtctcttcaggagcaatcacaccccctttcccttcaggggaatgtgctaataaaccagttaaagttgcctacctaagcaaaggctccctctccagtcagttttcctctctgtgctatttaatttaaaatcatttctgagttttaaggattatgtgagacaacacgtgtaaggttcctagcacagaacccttcggaatgatggcctaaaagcggtctgttgactgtcttcctcaccccccaatcctcccccctctttttttttccattttggctttagtaagcttaaaacaattctcctttctcttgtctttcagcttacactcattcagccttttacattcccagttttttccagagtctgaattctaccaacctaactacaagggagaagactggtatatcaataacacgttctgattaatgatctgggacaggtttctcaaaaaagctactaatgccactttggactgggtaattctttacagtaggtggctatcctgtgcactgtaggatgcttagcagactccctggcctatgccagcacaatcccaccctatgtgtaacaaccagaaacagtatctgatattgtcaaatgtctcctgatggagggagaacaaaatcccctcacattcatgttgagagctactgacctaggagcaaaagggtttttgtgtgttctgtgtaaaggcaggtgtgctagaaacagaacaatattttctttaaatcaatttctcaacttttatttttaaaattttaaattgtggtacaaaacacatataattcattattttaaccactttttagtgtacagaccactagtattaattttgttcacattgttgtgtaacagacctctagaactt

SEQ ID NO: 915011 - DNA, 4001 bp, Homo sapiens
gacctcagaagtgacttcctttactccaactcacacagaaaagagaactgagctcacagcattctgaaagctattgttacaggtaggtaggctccagggcacatcccacagccatacagtagagtgttatttaatcccatatgggcacttcttcttttaggaactcaccagttgatgctctgggaccccaatttcccaacataatgactgaagtgtacactcctgggcctcctagtagccagtagtagtcttgatgcctagagtctatatttcttagaataagctagatttgtcttgagatggcactcttcttcaatctcaaaaagggctggtacaatgtgtgacaagagtagaactcactaaagcctcgatgtctctggtgagtctgagcccaccccgagaccacatcctgcatccttgagcttcctgcatgttcactgtgggattgttctctggagtaagaggcccatatatttcctactaaaagtttgaaaacattactcttgtactaggctactcagtatggttgccagtagccacatgggctacttatatttgaagtaaaattaagtaaaatttaaaattcagttgcactatccatatttcacatcatcgatagccacatgtgaccgccatattgtaacagtgcagctgttgtggatttccatcatcatagaaagttacatttcatttccatcatagacagttacattgcacagcacagatctagtgttggattgtaactgagggttccaaacaataatctctaaataccaacgagggaaagaaagaactggcatttttctgggcactctctctgacttccttgctggctttgggagatttttgtagccagagcttccaaattgagtttctgtgcattagttatttttcctgatcctctccctcctcccaccctccaccctctgaaaggccccagtgtgcattgttcccttctacgtgtccatgtgttctcatcatttagaggccaccacccttagcaaactaacaaaaccaaatactgcatgttctcatgtataactgaagctctgtcttaggaggtagttttccttcctgacatccacctcagagattcacagctctattatcatttaccaagaagtttcctagaccttttgtcacctgagcctcatagaaacccatatgattgtacatgaggcaaggaaaccagtcccaccaggtcctgaaatccagtcaaacagagtgcctcacctcagatcacataagtgcagaggcaattctagaaaccaaaactctgtgtttccctcccaatccaagatagatcccttctttctctcctcccttcatgcaatacagcttctttaataaactctggatgagaggagaaacagacaaataaaaggtaaatatcatttccattctcaaaaaggtaagaagaaaacagggagaggaggtatattttttctgtaatttgcagtaagggaaaaattccttgcaaagaatcagtgtggattgttaagcatgcagttgtgaaatacagaaaaatgtatatacaatatgtcattatttaccaccattactttcgtaaaagaaaatatagagaagtactgtattgcaaaaatacaaagacaacaacagaaaatcaactcctcatattcagaataagggaaaaaacgtttctaagacaatctcctgtggaaaagttctgggacagttttctccaagtggcttctaccccaaagtccctccagcaaaacttaagggtctccacactcacaaggatgaccagtcccaaaacatacatcatctcttcccacttcccctaacccctctccaacatgttctgaattagatttaccccaataactttgacttttgcctgtagacgtttcttcaggctatcctgcccctggttggtgggttcgggtttctctgcttgggagaagttgatgacatttgatgggagcattatgatggtctcattggaaataggttgtgatgtcataatggtgttgccaactacggaagaaaaaatagatttagctcttaaaagtacagagctcccaagttctggctgcaaaactggtaagtcagtttctgccaattagtccagacttggcctgtgtgttagagaaagaaactgatattatggagcagtgaaagccacacaaccttggtatcatgaggatttttccataatgtttgacacagtccattatagataataaacacatcacagggtggcagcagcatgaatcttgagaggtcccaatatccagaggcaaagggtcacacaaaatttgcaatatgcagcaatgtccctttgcccagtcctactgacaacaactgtattgccatatatttgatgaattttttagacaaatgcactctaatcatttattttttgtctattagcatgcatcttagatatgtttatcatattttactagacatgctcttagtttttatcctgcagtgcttttaatatttgaaaaatacacccaacctcctccagtcattacagagtggcttcatacattggaagacctttattggttagcatagctagagattctaggggcccttcaagctttttatgggcttgtgtgtgtaatttcccagttaaagaggtttgcttgtttcttgtctggagcctgtaacctctttctccccctggtgtccgccttcagtactacaatctccctagtgctgaaacagggtgcttgcctttgttctcagaggcccccaacatggcatccaaactctgcactctgagtcatgtaagacagaaaccagtgccttgggcaaccccgctggaaacccagaatgctggactcatggcccactcctgttgcttccctaagggagaagctgggacttcagggttttctccagatcgagtctcactgtatcagggtgaaagaggccaggacgagtaaaatgccacgactttttctactcattttgatgcgtcttttcctggctctgcactcacctgaagtgctcccaagttcccgtggcagagctcagaaacagatatttatgtttgacaacaaaggagttggagataaattttggtgtttctctaacaatatatacaactctctgtgcacattctccataaaatatctcttgttcctgcaggtccatgggcaaaactgtctccctggcatttctagttctagggatccctccttagagaataagaaggccttaactctttggacccaaaacaactatccgagtttttgtttctcagctagccctgtttcccaggtcccatctgcatctcagctttcatctcccactctccaaccctctccttcaggaccaggggaatcttctattccctaaggacatgtgtccttctcttatttatcgtgtttccccctccattccatgatacctctcataccctgtactctaggaactcttctcttttgatatatctttctaaagcatgtatcataaactttttagtgagatattgttctttggattgctggaaaacaaaagctagaaactagtaagcaaaatctccttttccttcctccattactatattcctctaactcctccacttatctctccctttgcatatattatcttaagaaaagtactaagaaagtcttaaatgcttgggatagaaagaaaaaaattcatgtgtttgcaagacttttaatctttcttgtaatctgcattggatacattagtattgggcaacaggaagtcctcagttgaaaacacagcctggtaactattccagcattcaagggatccagagaaggaagggctaatgttcagcataagctatttcacaaaagtgactgtgatttctcatatgtaagtgagaagtttcttcctataatgaaggaaaagagggaagtgtgaaggaaagaaaggaagaaacattttcctcaaagtgacaattaagcaaaatgaagcgtgtgggctctttgtgaggaggaggaatcaacagctagaaagagtcatctggttctgactgatttatgcgggca

SEQ ID NO: 915012 - DNA, 4001 bp, Homo sapiens
cctttgttatttcttaactgtttgttctgtttgaaagagtgcataaagtaccaccattacaagggaatacagtttgaagaagaaaacaaattagctccttaactttcaactgccacccgatcactcttgtttcctatgcacatattctttacattctctcttcccatctgtcactttatctctctcctctttatatatgttcacagacattcacaattctacggaaatagtcattctatccatgccattttataactgttctttttgtactcaacattattctgtagacatctttgaccgatgaatagaaataataaaaagcctaaatttaaaagcaaatgatagattctgatacatggcacaacatggatgaaccttgaagacaatatggcaagtgaaataatccagtcacaaaaggacaaatattgtatgattctacttatgtgaggcacctagaagagtcaaattcactgaaagtagaatggtggttgccaggggctggcgggagaggggaatggaaagctattgtttaatgggcacggagttccagtttgggaagacaagaaagttctggagttgggtggtggtgatggttgcacaatggtgtgaatgtgcttaatgccactgaactgtacacctaaaaatggttaaggctgggtgcagcggctcatgcctgtaatcctagcactttgggaggccgaggcgggcagatcacctgaggtcaggaattcaagaccagcgtggccaacatggtgaaaccccgtctctactaaaaaaatacaaaaattagccaggcatgatggtgagtgcctgtaatcccagctactcaggaggctgagatgggagaatcgcttgaacctggaagacagtggttgcagtaagccgagatcacgcactctagcctgggtgactgagcaaaactctttctcaattaaaaaacaaacaaacaaacaaacaaaaaacaacaaaaaaacacatggttaaaaggctacaattattttaagcatattttactacaaccaaaaagccaaatggtatatttaaataaatggaggtctctagattcatttaatcaatcacatgttcatgactatttaggtggtttctattttttctttttgccactatgaacaatgcaataatgaacatctttgcacttttgtgatacctcctgcatttaattatctcacagtgatgtatggaagtggaattattacatttaaatctatgacacttgaatttagatacacgttgctacttttagaaggaatcctatataaccaagattctttatgtttcacaaaagtctccagactgatgctatcatctccaaacaccacagtctgagaggatgctttgtccttccacattcgccttgaggagatagactggagggacccacagctttcaagacagctctaaaatccgtgctttgaagataaatcatgacatggaggtcaacagctctgcccagcaattttctgtattacagaattagagtaggaccatggggttctaatgcaagattcagtctaattgcacagtatttgttgagagtagactctgtaagactgagtgacacaccaggagaatgcagaacattgaggaaaatcacctcaatgagggaaacctaagaatggttttacccaattttcttatttgacaagtgagtaaactgagacccaaaaaggggactgagctgacgctccaactcacacaggtggtcagaatcagagacaggatgataatccaattccctggctgtcttttcaaaagcacacaatcttccccaaaagtcatgatctaaaccaaggtgtctacctgttctcgcagcctggtcctgtgtgctgtggctggggatcagctcacctctggggagcgctcagctggaacctcccactggctgttcctgccagaacgatcttggtgctctgctctccagcctctgagacttcctgtccctttcttagagcagtatttatgattacacaggatgtgaattttgctgtagttacagacagttgatatataaaaagtgcctctgcttcctctttctaaattctgaggtctggcaaaatgacacaagatagaagtgacacatgagaaaaagacctttgtgcagactagtgatttgtacggtcccagttaaaattcattttccctactcctacatagaattatttaagtcatctagttttgcttagcctgagttttcttgtctattaaataaatggtggatggataataataattccactctgtgggtgttgggagaattaaagaaaaaagatgcaaagagtttacaaaaagtagacaataaatattgataatagtaatgttagttttgaattttggagaatctattctctcactttccaggctcttggtaagctgaaagcaacctgtggaaaattccgtgtctccttgttacttcttttgggtgtttccattctccatctttggcctcatgctcagggaagtccaggcacatcttgggaaagatgccagtggattggcctcagaggcagagtcatcaggctccacacaagctcatatttggggaagtatttgttgttgaggggacactgttgccactttcacatcccttttaaggcttcttgtagactagccattgttcagaagggtagggtttaagatggctctgggacatgcagcagctggcggcacaacatgctccatatacagtctccatttcctgaagggtggcaaggctatcccctaagagaggagcaaacctaagcctgggagatttaaataactcataaactacttggagggtattttagtccagttcttctccaaatgaggtgatattgctgaaggaatctgcccccagtcacatgtctagtctgtggaagaggcaggaatctaattcacatctcttggcactgaggtctgggcttgcttcatggcaagagtctgccatttggtcaacatctttttttttttttgagatggagttttttgctcttgttgctcaggctggagtgcaatggtgcagtctcagctcactgtaacctccacctcccaggttcaagtgattctcctgcctcagcctccccagtagctgggactatgggtgcccaccaccatgcctgtctaatttttgtatttttactagagacaggatttcaccatgttggtcaggctggtctcgaactcctgatctcaggtgatccacctgccttggcctcccaaagctgggattacaggtgtgagccactgtgcccagcttagtcaacatcttcatatccacaacaagcactgtctttgcttaagaaaacttccaggatccagaccttcctctgggtctatgacctgttttgaccaaattgttaaagaaccttggtcatttgggcttctttcacacttctgagcctcagaaggaattcgtgagaaaatcagttaaatatccagttcactttctcataaaatttgaaaaaagatttttcagaattgttgtgaggattaagtcaaataacataaaagtccccaccatagagcctgacataaatgaaccattaagaaaatctggtatttcttgtccaacatcttctcccaccccctttagagaaaagtgtattttatctctagattgatctctgatctctaagtgtaatctatgtttactctaaattcatgctcttttccattgatggaaatctcctcagccctttgcaaacagtcctggtgctctagacaggcaagtgactcacagtcctagtgcctacttcaaggatacgatctccccgccatccccaccccaagcagaccatgaagctagtaaaatggaaatgcgtcttatatgttggaggactctaacagccttggacagactaactgtattttttttctctagcagtggagatgacgggctggggctagggcacaaggtctggttatccagagagagattccttggagcagtgttcatagacccccctgatgtttgacttggttattggctccactcacggaat

SEQ ID NO: 915013 - DNA, 4001 bp, Homo sapiens
tgcccatcattcagctacacagtgaaatgggcctttctttgtccagcgcaggacagcctctcaggggttgcggtgaccatttatgttgttggttgcctaacctgctttgtttcctgttgggcaaatatttgattcgatcttattggattctgactccaccttgtggtctattttggtcttgctgggacccctttcttcagaggccacagggctgggcgtggatcctggcaacaggatcaaccttcaagcgtgctgcttttttgttgcttttctttctctttccgaaaatgcctaaatcagaaaatacaaggtctgagcagaggccgcctgtgatgttgtgcagctgagctttctaatagacctgtgcttggcaaggcgcgatcaactcagccccacttgcgggatgtagtgtttgtgtatttcccaggccttcccttccccctgccatcactccagctgtgcagtctgtggcctgcaaagggaaatctcacttacccccaaggttttgccttctttcagagctttctgcacaggctgcccattcacattcgacaccaaactaggtgggttcccaggaactaggtggacttgcggctggctgtttggatacaggggcacgtgagacataattcctggggtcacaggataaccattgtggggtgccaccaccaacacagaattggccaccggaactgctgaagtcatcgaattcatgctgccaagaaataaatgcgagagaattttccctcacatatggacttgtcctttaaaaaggacttttgcttcttctagctcattggagcatcttaaccctctacaagtttatgaatcccatgttacaaataatagatatcagttatagggcacttaagaggtgctttacaaatacatttcctttcatcctctcacccgcccagttttacagatgagaaaactaagactcaaagaggctaaaggctaccagagggcaaggggtccatcttttccatctttgtgtctctcatagtgtttattttttaatttttttttgagacagagtctggctctgtcacccaggctggagtgcagtggtacgatcttggctcactgcaacctccgcctcccaggttcaagcaattctcctgcctcagcctcctgagtatctgggattacaggcccccgccaccacacccagctaatttttgtatttttagtagagatggggtttccccctgttggccaggctggtctcgaactcctgacctcaggcgatccgcttgcctcggcctcccaaagtgctgggattacagatgtgaaccaccgcacccggcctctcatagtgtttagagtgctgctttgcatatgttagtactggctgaaagcaaaagttcagaactagaaaatctcttggacaacattgagttcaattctctcattttctggaaaaggaaacagggtgagagagtggacaagaatcctccaaggtcccaggtatgtcaatattagttaaatggagattatccttctcaagggaagccccattgccaaggcagtgtctgttcattgggtggcttccactgctcaattttctaggctacttatacattctaatgtggttttaaaaattctttttctttttgtttctcccatccccctccatgtcctatctttctctttctttctcttggagcagactcaataaagctagtacaatacactctgtctatccctcatccacactggttcgccgtaagtctcacttggtagaaaaaccttatcaccaactcccagttaccaaccaccagattaagcagactcaccttgctctgccagcagccacgtatctcttgatcctattccttttctttgctgtggggaccttgttttttttcctgagagaatgaatgtactggggccagttgggtggtagggttagaaggatccgaagtcctctatttcctggatgcaggccaggttacatgctgcttagagctcagtttcattcgtatttatttcctgttttggttaatgagccagttaaatatggtttgatttgacaagagtctatggtataatctccatggagaagaaagggttgggctggttgctctgggagacacagaaatgaactgggcacccagggtgtgctgtatttagctgtaacatgagacaggatgaaataaacaccacagaagagagataaatgtccccacaggagaacagaggagaaaatgatttgttggacttgaagagattagggaagacttcaaacagaaggtggcatatgaaatcaataaactgcagtccagaaagggatagaatcacagcgagtgaaatgagacttgtaatcaacttagatctattttcatccaagtcagagccaatagaaaatcagaagccatccatgggagggcattccacatatctatgacatacatcgtgtgaattgcacagtacaaaaacagctgcatgtaatagtccatgacagatttaccgttgaagaaggtgaacaatgaagaacaaatgaagttgatgggatggctagaacattgtaagatggtcaaaacaaaaagaacaccgttgagggtatggaaagggaaaagtcttggggaagagaaggtagagatatgttgggaatggctcacagtgaaggacattgaatgtaaaaaagatgaaaaggtagctggagtcagacttcacttttttgttgttgtttgtattttttagagacagggtcttgctcaggctggagtgcagtgatagttcactgcagcctcaaactcccaggctcaagcaatccacctgcctcagcctcctgaatagctgggactgcaggcacgcactactgtggccagctaaatcttaaaattttttgtagagacaggatttcactatgctgcccaggctggtcttcaattcctggcctcaaatgattctcctgcctcggcctcccaaagtgcagggattacaggagtgagccaccatgcctaacccaaattttacttctttacccattttttctatcagattcctggacctttgtcccttaatttttaaagagttctttacatactagggattttaggtctttgtctttggtatattctccaattttgacagtgtcttttgattttgtttagggtggttttctgtcaagaaaaattttaaaaatttttgtagtaaaatttatcagtcttatcttttattacctatgcatttgagtcattgtttgaaagcctttcctaacactaagattaaacaggaatttagctgtgttttcttctaatacttgtattgttttactttttacattttgattcttaatacatgtaaaatgtatttttttgtgaatgctatgagatgtgggtctaattttaaatttttccaaaagtctacctggctgccccagggcaatttattaaatagctcatcttctcttcagcggcatttgaaatgccacctttgtcacagcctaaatttctatatgcatttggttctaattctggtctttcttttactttctattggtctatttgtctattcatgtgttatttcaacaatgttttaattatagaggctttccagtgtacttcaatgtcctgtagggttagtctcctgtgtaatttttcctttttcattatattttatggctattcttgcatgtttgtttttccaaatgaactttagcatttgtctaactctataaagtaactcaatagctttttgtaaagacgaataacatgaaccaaactgtattgacagaaataataagaggcatctgaatgaggacatataggtggctaagccctagtgcacgtgggacattcaggaccaggtttaaccagatattgtagaagatgaaatttgtcaccttttaattgagtttatagaagtggtgccaactttctagaagggaccggagacatacaagggagattattattgtccaaacctacttcagcaaatgctgttgatgcagcatctatatccccttgatccactctggaggtcttgagacaggg

SEQ ID NO: 915014 - DNA, 4001 bp, Homo sapiens
atgacgttgaatagaacaaatgagattcagagaagagtagctttgtcctattagctactactttaatgtctttgttaaaaaaagagaaagcttaagaagtcccaaagataaatgttatcaaatacactaatttaaatttgtaatggagtaattaatgggtggcaaattccttgaacaatagtaggttttaaatatcttagtttgtggacccagttttctaagcaacaacatccccaaagaaatactactggagccaagacctggagaactttggtgcaatttccctcctttagcttactctaactcatgattgcgcctattagactttattattgctctttagtgtgatcattcttattttataattgttcttggtggtttttatcccccctcaagaagttcccagaaaaagtgccagctgtatcagaaaagaagtgcacagataataggataagtagttcagtaaaaactgggagaatcctatcacaatctttttagcagccactacgatgaggaaatgagcttaactaaaatacaactccttatctgccaataatacaaatatgaaagcctagagtcagttctagtagcaaaatcttaacctggctaagatttctagcccaaattaagcctctgcatttaaacatgcaggtacacaaggacggccagatgcacactgagagttctacttgtcaccacatccggcacagaaactgaagcagggaaaaactggctttcctgaaggagcttcctaagaaaccgcagggcctcaagccaatctaactctggaggcatcgacaatccaaattccagaccaactcttggccaagctaacttttatggtgtacactaactccgcggtaacaatacacaatctggctacaatcaagcctttccaattctccaaagcatctctagtcttactcgtccttcgtagctcaagatagaagcaaagcgactgacacaaaggccagtcgtcccaaggcgctttttctatggctccgctacggccacttattaactattcctaaactaggggctcaatgccccccccttctgcccttcctcaatcctgccccggccggtaagcctctgcctgggagcccctccgcctggaacaaagcgaggggccccggcggtgggggcaagaggcgccagcggcacggggactgccgcacggcgcacaatgagaaactaccaacttcagagcgcaggaacatctcaattggcaagaaagaggggcggcggcaggcacgcccaacttcaaactcaggaaacctacgggctggcggccatctgggaaaaagcccccttcccagggagagaagaaaaaggcggaggagatgcgaatcgcccaccgggccccggaggagagccctgccctcagaccggcccccgcccccgaggcccgcttccccgccttctctctgcctctggttcgctgccccaggccgggcggccggttaccttgatgcgctcccggcactgggacggggtccgctcgtagcccagctcggccagggcccgggacacgcgctcgtacatggctggcccgggggccttgctgccgaacaccgtgccggctccctccagctgctggtaccgcgcctccaccagccgctcgttgccccacactgcgatgagcgcgttcgtctcggctggcgtccacgacatgccccggcaggcggcggcggcggctgccgcagccccgccaccgccgccaccaggggagaaggagaccgaggacgaggcggcgctgcggccccccagccccagcccgagacccccggacgccgctgcccccgagcccgccgcactgcccggcccgagcggggaggcaccccgaggcgtggaagggtcggacagcgatggatttccgtcgctcaggccaccaggagaagccggggaaagcacctccatcttcggaatttttagcggcgagttggcgggcagctccgagccacagggcgcagccatcttccaagcggccgccgctgcaccgcccggaagtgacgcgcccgcgcatccggccaccgcggtctccggggctgccctcgggcctggctcgcccgcgggcggatggctccgggtctctgctgctgaggatgtggctgccgggcggaggtcgtccactcccctgggcctttctccgcgagccctcccacgccgcccgctcctctcccggggcgaagggcggggacgaggcgcgccgaagccccgagctgaagagaagggtgggggcatgagggcgctggagtgaggaacagattggagccttcccacttcctctccaatctcagcccccgggaggaggggtgaggccctcgagggggcccggagttaaggaggaatagaccgtttctctctctcctgtctcccccgcctctgcccgtcttccctctaagccggcctctaggtgcagaggctgacgtccaggatggggaccggggaagcctctggagggtatatccgggaaggcaccaaggctgaagtgagagcggttctggggaaggctttaaaaagcagatatggaccagggtagagttcgtacgctgtagcttttcaagaacaccgatctcattaattaaagaacagcaactatttaattccagttataaactattgttttccagttagtctgggtaggtgtggccgtttgtagaatagttagattacattagtctattgcgttggtacagttgtctatagcttgagcatataaaaactcctgagcccagcagaaaagttactttccaataccagtctccatcctccgtgctttggaagttgcatcgttttccggtttttcgtactcaaagaacactgtcaattatgacagctctgtgacctctggtaatgaattagtgtattagtcactcctgaaacgttccttaaagtgctggaacttaacagtagcacagcacatccagtacacagctgtaccgtatttccatatttttcaaagctgaaaatcttaattggatatcttggatcattaacttaaaacctcagcggatttttctttcaaagcagacataactgaggatgctgaccaatgaatgcaaataaactatgcaatattttttaaaataacaaatgtatgttagttttttttaagctgaggtcaactatgttttggggggtatgtgcttttttaaattattgttttatttcaatcgatttttgggggtaacaggtggcgtttggttacatgaataaggtttttagtggtgatttctgagattttggtgcgtccgagcaatgtacactgtatccaatgtgtagtcttttgtccctcattagccttccccttacccctgagctcccgagtccccaaagtccaatgtatcattcttattgaagacagctaaatttttaactctgagactcactggagagaatgactggttgtctttgggtgttactgaaaagccaaaggattaagcaatagggataaagtagaggaggagataattgttctcgtatgtcatatgaaaatgctaaccatagtttgtaagctaacagaagaagcctgaggaagttcccgaatttatgatatcctcttcccttttttccaaagaaagatgcagtctagcacctcagttaagaatatggactctaaagtcagactgccaggcttcaaattccagttctgcgacctcagcaaagttacttaaccaagctctcagtgccttgttttcttcatctgtaaaatgaggatgacgtcacagcattgttgagagaattaatacaggtaaagtccttagaacggtgcctggttcacagtaaacattgtgtgaggactgtaaaagaatctgaaacatctatcaaaacaaaattaactctcattcagcccagtgataaatgttttaatgtcataaggtatttggtgtgtatgaaagggagagttgtgcctaaatcatatactaaatcagagattccaaagaggggtgtgtgtgtgtgtgtgtgtgtgtgtgtgtgtgtgtgggagacagggtctc

SEQ ID NO: 915015 - DNA, 4001 bp, Homo sapiens
taaaacagactaatgagggacagaaataaaagaaagaagtatcaggaattaaagctggaaaattaggatagtgccaagcagcaaatcttactaagcgaattctggcttaataagactattatttgctaaaaatgaactgaaagagacaaatataactgtgaaagttttttgaaattcaagcaggctaccattaatatggaagaactgttactgtagtaacatataaatatataaccaatataagtatataataaaaatgattgaagttgtcgagagtccaaatttatgcagatatccaccgtaagattttgctcttagaatctgagatcaatttagaaatcgcattgttgtaaatgtattggtacatggtagaaatagcagtccttttgaagtaccactgagtcaatatatttttaaagtttgacagcagctgttgctatttgcagggcctatttttgaccaacaattcctaactccatatctctaacttacaaagtggtatcccgttgtcctgactgatctattctgaactgatgaactatttcatttaatcaaatgggctttaatacatttttaacctgactgaaattgatattgggatgcaccttagatacccagtcttggcttaattgtgtgaaaatcttcttctaaaaccttgatattttctgattaagtgcaagaaagtgccagcattgatgcatcttgagttgttgaagttctgtagatatgcttacctggataaaagccatttccagaaatgtttgtcttcctgtcctctcctttatatgccggtatccaagtaacagaagcttgggttttctaccatccattcattccccaataatttcctcaaaaaatacttactgagctcctactgtgtgaaaggcactatttttggtgctggggatataacacctcataaaatgtgaaaatatgtcattttagatgtcaaacactatcccttttctattgcctgtcatcgctctcttagcagaaaggattcaacagctgcagtctctaaaacttacaaaccttctatgcccaatcacagagaacagccattttctaaaatcccatttcacaatcgttcttcactagttggaaacaggaatgagatgtagttcacttacgtaatccttgtgaagatgatgtactgccaatggcataatataaccaggcaactttttacaagcactaaaacttgagaatgaagttcctagatacttcatgataagtcagaattaagaagtctgagaaaaaccagacggcaagttccggatcaaaaaaatttgagggtaaattagttaagcagttcaagaagaaaagcatcacaaatctacaatatcaaaccctacccaaattctctttaaagtgtggctttcccctcccctatattcttataggggattcacttccctgccaaaaagtatgttcttctctaaaactcgtggtaggtgcataacaagtatacttatgggtcgacggttatcaaagtatctttcacctccctcccgctgcctcctttgggaccgtccaaaaagagcccctgggaagaatcgagttagactgggctcccggaaggccacccaggggagcaggggcgcgcacctgcctcggccacaatgatgaggttgctgctggtaggagtcccggtgggagtcggggcaacctggaagatctcctctctctgggtattaaatgagagtcccgactgagtgcccagaaacttctgcagtcttgtttccgtggcctgggccctccccagcctccccggtcaggcgacagacgcgcgtggcacttctcccgagcgtgcagtcccgctacgtcgcagcccttggaccaaacccggcagcaagcgttgcgccaattgccgctgacccctccgggaccctacccactgcgagggcacccactggtcacggagccgccgcttccctggccgcctcctccagcatagaaccgctcacctgcgaccccggcggcacctccccacggtcgccccaaggggggtaggaaaaaagatgcttcattgatcccccgcccactaactgggcccgcccatctcccgccaccccaatggctcatatggctgccgctcatttgatgagtctcatccattggttagaatggtgtagccattctggctgagagcccgccctaggcctggcctcacaatgggaatcaagtcccaaaccggttccgggttagtgccctggaattccgccccctcgtgattcacctccctgtctgtgccccgtctgtggcgcgcagctctgtcagtcaagtggactctaggaagggattggcccctagagatccgcttgctgcgctgttccaactgattggggcactggccgctgcatctccaaactcgtctcttgtccttgaccctcacctgttaaaagggcaaagaagaagtaggaaacttgtgctgctccagtcgggttcttaggccagcatcaccttctcctcgaccagctgcgacctaattggcctcagccattcctctaaggctgcccgtgccaaaggtcgctggtgacttccttatggctaaatctaggagtcacttcttagtccttatcatactatatacttcccagaagacatttgaatttttttttttttttttttttttttttaccattcttcactgtttccccaaatatgtgcttctgctttcttctctcccagtcctcctctatattcaagtttgcagttgcttattttctgccgtctcacgttcaggtgtttgtgattagtgcacctttcttcccgctgcctctgtccaggcctctgtggactcacctgaattccatcagtagcctcctagctggtctcccaacatcctgtctgccggactgtagttcattcttcacgttgtagccaaaatgagctgcttaaagttttttagtggaatctcaccactggtgatacagtacaaactccttatcgaacctgaaaaataaggcacctacttttccctcaaccttcatctctcgacattatacccacatttcttcttccttaccccattccctttgcttctttcagttcctgaactctacagtggctactgggaagtcagtttgcattgctgtgtttcctccctgcttctccgctatgcctagcattcatttttagaaattcctttctaaaggaaggcttccaaaattatctccattcaccctccctccacttccaagtattcccttccctgtaggtttgccagataaaaacaggacgctcagttaaatttgaagttcagataaaaagcaaataatttttaatctgtccaatggaatatttggtatccatatgtttatttgctaaatttaaaaaaataaaaatttttgtttactaaatctgcaagcctacttcagcgagctctcatcacggcctttcctctgacagcacttcccacatattttatgtgggtggggcttttcttgtttactgttgtgaataacacagtgcctagaatgtaacagacaaaaaagatttggtaaataaatggtggaatattctggaggaatggtgcatccttgctggatattcttggaggaactctcccataaaataggaagtaattatgaaatatgctctttaaaatgtaatgatcagattgatcttacagattgttacttatgactttgtcagtaagtatagacatgtttgtcaaagaagcatgtctatacttttgccaaagtagatcaaaagaaacttgtaatttttggaaaaatacaagttgtattttataattttggattttgttcatggtgggtggtgtttttttgatgagtgcagtgagaaagtaagataactagctatccccatcataaccagacactatcagttctgttcagaacctgtccaccacttgactctgtttatttacctcagtaatggggacaagaatggtgaatcagtattaacaaacttttgctttcgtatcatgaactctaagctttccccaattaacctcagtctctttgctaattgaa

SEQ ID NO: 915016 - DNA, 4001 bp, Homo sapiens
agtcatcacctactgtctcaatgtaccccaaactgcccccctttagaaaaccattgtttctctaaagctcgtcctcatactctaaatgttatcatctctctcttactctcatatacaaaccatattatcgctttccttatcacaatctctccaccctgcttccaaccccaacatgtaaaaacaggcctccctcctcaggccaggcatttcccacccccaaactcacacctctgccttgggcatgctaccaggggaaatacctgcagggacatgcccaggcctcagatcatgggtaggagaaaaagaaagggaggaagatactcactggcattactatcagccaggctgttgaggctactagaaatgtccctgcgccggaaaagacagacaacctttgcctccacatttccatttgcagtctaaggggaggaaaaaaacaaaaacaaaacaacgtagcagtggaaattgatcatctgggaacagaaatgcacaaagagacaaataacagtaagtttcagagggacctaaattaaaaagcccaagaaaatatgagtaaagacttacattcaaggatagacttccaaatccctttcctttgcccccaagagacagaatagtaaagttcctgctaacctctcaatagcctttcctgaatacatccaatgaatgaatgaacgaatatgaatgggtacttagtataggatcctctcttccaccagaagttagaaacctcagaagagaccactgcgggagggagggagagggattctgctccactcaccttgttgagctcctcaatccgtctaaccaggtaaggattgctggaagagttctcaaaatagacgtaatctgtaagggaagggaggggggagaaccacgaagatcagaggagatgggagacgcagagcaccagggtaggagagaaagttggcctgagtggatcaaaaggagataaggattcaggtagaaagggcgctgagatgtgaaagtggacagactaagagaaaataaggatgtcccccatccccaccgcacctagttctaaaattagatcctttactcaaaagagagccttaaggaacaggcaagaagcaggggttcccctgcagtccccacaactcagcgatgagttgcaccccagtcgcggcgaagtaattgtccgctctagcgcagggcccctaccttttcgaatcgaggcgcacaataacgcctgggaagaggaaacctccgggcggctcccccgcggtggcaaagccgtcgccccagcccctcgcgttccctccctaccctgtcagctccttcggaaccggttccgaaggccactccgtgccccggggagcccctgacgcagccccgaaagtgccgtcggggctgcccgcagcttctctctgggagtctcggagccctgccgcgtcgcggttccccgcaccctctctcctcgtctcccggttccggttccggtccgcgctccggtccacgctgccccatacgctgcgcctcgcgccacccggtgccgagcccctcaggtccctaccccaacctctcccgccccgggccccgtatccctgcgcccggtactcacctcccacccggtacatgttggccgccatggccgttcccgccgccgcctccggccgcacaaaggggtccgggaggctcgcgggggcagggctcggctcgaggcaaagccccgaacggtgggctgccgcttcgagggagtctcactggggcccgcgcagccggcacctccgctgcctcagccgtcgcggttcatcccggcccgcgctgtcgccgccgcagctatcgcctcactcccgggacgctgaggctggcccccgtccgctcggcttcttccggaacgagctcggctcctgccaggccagagccaggctccagctacccccgcccccgcggagtcccactagtcgttgggctctgccggccgcagggaaggcttgccgggcccgcctcagggttcgcctccttccggaacaccttcggccgatccggagaacaaggcccactgctcggctcaggtcggagagcgagaccccgcagatcggctacttccggaagaagttcggctcctgtcgggcaaccgctcggctatttccgtcgcagctcggccccacccccttttccgagggcgggagaggagtcgggcttaactctgtcctcgctggagccctgcagctcctcctcgcgccccaaagactcgcgcgccttagcgcttcgccaggttatttgcaagcggctttgcctgtcatttgcataaatggtctacgctcccttaccctttccgcacgcctcttttccttcgtccccaccccacagagccccggaggcgcccggcagcgccccacaaaagcaccgggaggcgactttggttctggtttattgcccctcagcaggcagcgggagtcaaggcctaggctggggctgcccggctcagccagcgggtctaaacagtgtgtgcaggggcgccgttcgcgccctccaggaaaatgcgcgatcgggaatgtctcgaagtcagtccaggaaagagtcggcccctagtcgtgggggattgggccagggaagggcagggcggggcggggccacgccgccgggccagtcggtcccgccaggcagcgatcaaacgtcgagggaggaggcgggggacagggagggggttcgagagggcgtggcgggcgccggccccgcgcccccagcgcccagcactcgccactggaagatgctggcgtccttgccgcccagcgagacgaggtgcgagtcgtcgtgcgtgaatcggacgctggtcacgtggctgccgtggcccccgtacatgcggctcggcgcctgggccggagggaagagttgcggtggcggctgagccctcgggcccaccggtcccaccccggcgatccccgcggcctcaccttggcacgagcgcacgggtactggaagagatgcactttgcagaagtcgtcggccaccgccaccacgcgctcgttgtgggagcggcacagggagttgatgtcggtcccatcggagccgtccggccagacgcctagcacagcggccggcctcagcccgacctcctacccaccgccacccacggcccagagctacaccatttcaggcgctccggcagccgcggccacccactgccgcgttccaggcaagccttcccggtcccgaggggcctcctgggctggatcttcaggtttctggactctcacccaacgacacacgcccagcgttccaagcccaaactgggctccaccttgtcccccacccttccagcaggtttccacgcccctgctcaccgtagacgtgaaagcccagcacacaggtgtaggtagcccattcccggtctcggctctcatagcgattcttcagctgcttgcagcctccagccacgtcccctggggagagggagcccgcccagctcagctctcaccctgccctcagtagggaagatgccagggaaagccagactggaaagactggcatgaaacccggcgatggcatgtgatctggtcaccgtagtagcatcacctcctccccctgtgaaacccaccctgtgtgcgtcctgtcctgagctctggctgaagttctaacagcttccacgagttcctcctccctagataagtcaagtgctccacacttgccctgagaaacttttcccaaacaatcttttcttagcgcatttttgaactccctcaagtcaacaagacatggtgtgaaactagttgtttccaaatcacgaaatttctcctacatataattccaactccactttaaccccatctccacttccttatctaacaacacctctaacagccccccctacacaaaacccactccaattaccctctccccatgtcctgctccactgccactcacagtaaagaatctcatagtccccagaattggacatgatgaaattcccatccttggaccagtcaagatgagtgatgaagctggagtgaccctgggagcaaaggtcaagagtttta

SEQ ID NO: 915017 - DNA, 4001 bp, Homo sapiens
aaccgcctgtttcaggctcccaaagtgttgggatttacaggcgtgagccaccgtgcccggcccaagtaactatttttacaactgagcatttgggaatttcaccaaaactcctgggctacttggcaacacatagatgttgtgaaatcagaattaagaatattcaaagtttttggggcaagagctctgaacatcattagaaaaccccgtctcccagagaagtattgagtagtgggttcttttttgttttgttttgtttttttgaggctgagttttgctctgttgcccaggctggagtacaatggcgcgatctcggctcactgcaaccttcacctcccgggttcaagcgattctcctgcctcagcctcccgactagctgggattacgtgcacgcaccaccacacctggctatattttgtatttttagtagagacggggtttcaccatgttggtcagactggtctcaaacatcgacctcgtgatccgctcacctcggcctcccaaagtgctgggaaggcgtgagcgaacgcgcccggccccaagggttcttactatatactgcaacatgctgtcacctccgatgctatctagccccaaatgtgccaattctgttttggatgttacagtacattctaatcagtctttgttctaagtacaaagaatttatttgcaatagcctttaacatatggaatctgaattcacacaggtctactcagcaagaaataatttggattcccaacaactcaagaataagaaatggggccctctctagtgtcttgcctattttttacagaaaagtagacggcgagacaggggttctaaaaactgttccattcctaggcacagtgcatgaggtaattatgtcaactctcagtaaaagcataaaaaaaagaatgacctgcccattacagggatatagcaaaggaactggaaacactaagtctatcacttacttggcctacctgcatgtgaatataaaataccatgtaataattatttgacagtagattagaaactaactcccatgtttaaactcgctaaaactcagcttcactaatttccagctctgacaaatgtgattttcattgtcaggagccacatgggccgctgctggaaagcgctcaatgcatccttccgaaatctgacagagcaaccccttcattaacacttctgaatgagctccttgtgtttctctcagtatctggtgcgaaaacctcggaacagaaaagcagtagtaacagtagcataaaaagaaaaaaaaaaggaataaaaaataaaatgttggttcccacctaacttcacatttgtcttcaactgagtatttcgtgttttgcgtctgagattttggggggagtagtggtgaatgtgaatttcggaggggcgagagggagggttcggaagcctttggtggcgaccggccaggatccacctcagtgacgaagaaccaaagttcagaggatccgccgggcagggcagggccgggtggcggttggctaagggaggagagggcctcaacgctgggcggcgaggcgagggctcggcgaggcccccaagcggggccgcgggactgaggaagctgtccctgcggggaggtaaagggcagcggaggagcagcagcatctcgggagaatgaaaggcccgcaaggctgagccgatcctcaggcgccctgagcagcagcgaccgaacggggcgccgggcggggtagggagcggcgacgcctcatacctggatgagcactttcacgtacatgagcggctgggacaggatggtgagaccggagcccaggagcacctgactggccgcgtccgccatgatggcacccgcgggcggacggacagacagacggagccaccaagcgacccggtgagccggtcctaggtcacgtgccagggccgccggtttcactggcccgcccgcggcgcgcgcgcacgcacgcagcagcacgcgcctctccgcccagtccccgcccccccgtcccgccccgagaaacggcaggcgctcgcgagggggcgctgaggtcggggcggggcttaagggacagaggcgcatgcgttctgccgggggctcgcccttcaccaggaatgacggtttctcttgcacatgcgcttccaggccgcaagtgtccggaaacagaagaatgggagtgtcagtgggggagtgtgaccgtgacggcagaggcaaggtcagaggactgaaaagaaattgaaaaggattcttcattatgcttcatctctgcacttgccttttgggcatcatcaacataggattcaaaagatactcagcatcagagccgtaacagtctcgtgactgacaaactctaaataagtatagcaaataatgaatccgctagcgagtggcttttcattcatttattcgtttgattaatgttatcttttcaaaaaaaccttctctgaccattctaaaattacctcccccttttctttttctttctttttttttttttttttgagacggagtctcgctctgtcacccaggctggagtgcagtggcccgatctcagctcactgcaaccttcgcctcccaggttcaagcaatgctcctgcctcagcctccctagtagctgggattacacgcacacgccaccacgcccggctaatttttgtctatttagtagagacggggtttcacgatgttggccgggctggtctcaaactcctgacctcgtgattcacccgccttggcctcccaaagtgctgggattacaggagtgaggagccatcgcgcctggccacctccctcttattttctcccacattgtgccccgtcgtagcattatcactgaaattatgtctcctccactggaatgaaagctccatgagttcaggaaccgtgacagcctctgttcacggttgtgttttcagtgcccagcacatacgaggtgctcaataaatatttattgcacaagtgaacaaatacttcagtgcctaccagtctacaggctatcagaggcaaaagtgaaaaaggcattgtccctgctccttcagccccagctcacgtgttctatcaaacaacatttggtgaatctgagcttggagcagagtgaagtactgtaggggaaagacttggatttggatcctggcttttccactgcatccatttgtcattttagctactttaatttccagtttttgtatctaaatctaacactactgtgtatctctcagggttattatgagcattaagtgaaattatgcataggaaagggttttttttaaaaaactttatattgaaatacagatattggctgggcacggtggctcacacctgtaatcccaacactttagaaggctgaggtgggtggatcacctgaggtcgggagttcaagaccagcctgaccgacatggtgaaaccccatctgtactaaaagtacaaaaattagttgggtgtgatggcgggtgcctgtaatcccagctactcgggaggctgaggcaggagaatcgcttgaactcgggagttggaggttgcagtgagccaagattgcgccattgcactccagcctgggtgacagggcgagactcagtctcaaaagaataaataaataaaaaataaagttgtaagaaacaagttgcttctaactgaatctagaaacataaagctgagccagagagactatttagcaggggattcttttctttttttttttgagacagggtctctctttgtcacccaggctggagtgcagtggtgcaatctcggctcactgcaacctccacctcctgggctcaagcgatcctcctaccttagtctcccaattagctgggaccacaggtgtgcaccaccatgcccagctattttttttgtatttttagtagagatggggtctcgccatgttgccccaggctggtctcaaactcttgaactcaagtgatccacctgcctcccaaagtgctgggattacaggtgtgagtcaccacacctggttggattatttattcttggatttgtgcattgatggtgccaaataatattgccttgtcccac

SEQ ID NO: 915018 - DNA, 4001 bp, Homo sapiens
actcattagttttggcaagaacaaagcggaaaattatcagcggtcatctacagctagagagggcagtcggctgagagctggcaagcatttctttaggctctgatttacattgcatatgcttgaagagctattactcattagcaaagggaagatctcacatcttgacttcaaggcccggaaaatccaagtattaactctgagtccttgctgtggattccaagcctggtaaagttaaaggaaaaaaaaaatgcaagatgcaaacacgccaaccctccaccacattgcgtttgttttcacagacaatagttaccagcagacagcgggcctctctccttaagccaaggatagcaacagggcccaagggaacctacgtcctagctttccccctttttttgttgtccgccgtctgcatggttaggtcagctttggacgactggtgcagggcagaattccctccaggggaaagggcttggctgggccgatgcatgttggattaggaagacgacaaagagtatacgctctaccgagaatcagtgactccggtgggctgtgtgtggtgtcaccagggaaaatgcttgtagagggaaatcctggggtacactagcagcctcagatgggttggggaagggatggagggggagctgtgcccattccccaggcggttcttactgggatcatgcggacgcccgggtgggaggctccttccaggacccaggcgcccaggggcaacaccgccgggctgcggtgcgcgggtagcagcgaggacaggaagtgcacgttgcaggcgggcggctgcggggcctgcaggagcgcgacgtcctccagcgcgctgagctctgggatcccggggtactccccgaggagctccccgccgtcgctgtcgccccccgcgagcttcgccttgacctggcccttgcagtcggcgcccagcgcggggttgaacgcgtgcaggacgggttccttggggtccgccgggcccaggtacgcttctttgaagacgtggaactcgtcctcctcgtacttcacgggggccttcaggccgatgttctccgaagcgaacggaccctcggggcttaagagctccgtcaccatcgcatcctcggggctgggcagcccgcccggcagagggccctcctccatggcgcagggcggcggggcgggatggcgggggccgcgcacctgcaacacgcggccaggtgagaggcagccagaggagaggacgaggggaggggcggccaggaaaggggacagccaagggaggggcagccaagggaggggcggccaggggaggggaccaggtgaggggcggctaggggagggggcggcctggtgagggagggccaggtgaggggcccggggaagggcgaccaggtgagggggtcaggggaggggcgaccagatgaggggcgattaggtgaggggcggccaggtgaggggcggccaggtgaggagcgaccaggggaggcggtcaggtgagcggcgaccaggggaggggcggccggggagggggtcacgggaggggcgaccaggggaggggcggccaggggagggggccaggtgaggggcggccaggtgaggagcgaccaggggagggagtcaggggaggggcgaccaggtaaggggcggccaggagaggggccggccggggtgggggtcaggtgaggggcgcccaggggagggggccaggtgaggggcggccgaggagggggtcaggtgaggagcagccaggggagggggggccaggtgaggtgcgaccaggtgaggggcggcctcgcccacggcccgccgccctccgcccacccgcaggggcccgacccggcccggcagcccccatccccgcctgcagagccgaggcccagcccggggaccgccccgtcattcctcctcggagggacgcacctggggccgccggggctgccgcagcgtggagcgagcgggatggggcgtgggccgggcctcaggcgcaggcggccgttggcggttggagaagggggaagggtgagggacaggaacctggggggaggggaagaggcgcccgggcagtgggcggggcctgggcgtggggcggagtcgaggtcggggcggggaggtaaaggcggggccagggaggtgtggtgggcgtggtctggggcgggaggagacagagtcgcgaggggcggggcctggactgccgctgttgccagagcgggtcaggggaggcactcccaggttcagccgatccaggctcaggtggggaaactgaggtccccatcaactcgggcagcgctaagtgggactgcctagcttggcttctgaccttgggcttcagttatatttttctggccaggcgtggttgctcacgcctgtagtcccagcactttgggaggccgaggcaggcggattacttgaggtcaggagttcaaaaccagcctgggcaacatggtgaaaccccgtctctactaaaaatacaaaaattagctggccgtggtggcacgcgcctgtaatcccagctacttggaaggctgaggcaggagaatcgcttgagcccgggaggtggaggttgcagtgagccgagatcccgccactgcactccagcctgtgccacagagctagactccgtctcaaaaaaataaataaaataaaataaaacatttttctacactcgagctctcaagacagatcccggcctgggacgctgcgggtggacagagggcaggggcttgcaccgcacgttcccagccttgcacccactcccggtccttggtgacgcagcttacaggtgcaactgatggagttggtcccgaaatagaagtaacaaatacggctgggcgtggtggctcacgtctgtaatcccagcactttgggaggccgaggcgggtggatcacctgaggtcaggagttcgagaccagcctggccaacatatagtgaaactccgtctctactaaaaaatacaaaaactagctgggcgtagtggcgcacgcctgtagtcccagctacatagaaggctgaggcttgaacctgggagatgggggttgcagtgagctgagattgtgtcactgtactccagcctgaccaacagagaaaggctccctctcagaaaaaaaaaaaaaaactcacaaatacaatgaaagtctcaaattttgggtggggaatgagctatttcatctttaaggagtcaatagatatcactgtttaatcaagaggaggtgaaagtttaattcaagtgatggcgaaaactgcaaagggtgtagagggactggtgggagtgggtgctggggagacagcctcaggtactgtctactcaggtactgttttggtaaaaataaagaatgtaaaacatcagctttctaatctcacttttaaaaattaaatacttttctaaatttttaaagggtagtacccaaggcacagcaacaccgtgtactatttagttgtacatttaacattcaaaaatcaagaaaattttgcctggggctgggcgtggtggctcatgcctgtaatcccagcactctgggaggccaaggtggtcagatcacttaaagtcaggagttcaagaccagcctgactaacatggtgaaaccctgtctctactaaaaatacaaaattagctaggcatggtggtgcacacctgcaatcccagctatttgtgaggctgaggcaggagaattgcttgaacctgggaggcggaggttgcagtgagctgagattgcaccattgtactttagcctgggcaaaaagattgaaactccatctcaaaaatcaaacaaacaaaaacaacaacaacaaaaaacactcacagaagcagaaaaaataataaaaataataaatcgaagagcccaagaattatgcatagcttgagtggcccaagcgagagagtaacccacaaggttgcaccgttcattcgtttactaatcagaatcagacgtctactgagtagcatcatgccaggcatacacagccacctgtgggggtcacccacgggttgcaatcaagcctggaggctctgcacctgctgctccta

SEQ ID NO: 915019 - DNA, 4001 bp, Homo sapiens
gctagctcagccagagacttcagcatgggagcttcctaacttccagtacttccttctttctaacatactgtgctgcttcatgtggttctaacttctctgccttggatgagagtactggttgcctcttatgctattctgaggcatagttgtcatttgtaactttcccataaaattcgaattttccaacctgttttctgaatgaattacacaactgaacatgttaatcctcagctttccaaatttcaaagcaataaatacagaattcaaaaaatacttgattcaaacgtgcaatatatataatcaaactgcaaagaaaaatcctcctttcctggataattcaggctacaaattcgaaaaaaaaaaaaccatttagtgagcacctatcacatgctgagactatgttaagtgctggagatatgaagatgattaagattgccctcaagtataatagcttataacctggtagaaaaggcactttaagccaacaattatagtgtgcttattaaagactctgaaaaacgactgtgcagggagctatgagtgcatatggcaatgtagaatgacgggatcagacagtggttccccagtgaggtgctgaacatcaacaggaaaaaaggcaataactacccatatttagcagaatccaaaatgaattataatagagccacttcaactgattgaaggagaaaatgaaaattgtgtgttttcacacagcagttatcgaatcactctctaataacaattagactattattcagtggaaaagaaccagatttcatcgtggctgcataaaaagcaaatacaggtcttatattattttttaaaaaatttttaaatcattattttaaaatcaaagaaaaagactgcatccaaaacgcgtctagttaatattcataaaagctctctgcaaagctgcataaagtcctcctcaaaattccaggataaaattcccatctgttacaagagaaatgacaacgtggagaaccagtagcccaagaaggaagaaaactaccactcattttgttttcttaaacctatcactggggataaaaaccactcagattccttgatactgactttcagctggaagatttagaaaagagaagcacaggagacatttttatttacatatttaagcaaaaagggaggcgagaagaaaatcagagtgtagagaaaagcatgaaagaaattaagaaggtgaagccatgaaaagagagaaaagggctgggcaagaacccaaaaaccaaagacataagaaggggtggaggaggaaagactgactttaggatggttttggaaaaagtgacagagaaagacaggaaatgtggggaaaagaatgggggcggggggaactgtcttaaaaaaggtttgagagggaatgaaagacaggagaaagtaattaactgggaccacctccatcggggagaaaacgagatcggaatatgaaaggtagaggaatcgataaagaagcagcgagttttaacctccttttcctcagcctccacgccccagggagggaggcagaagtggttcccaagtcccggggaaggaattccggcgtagccttcagaaaccagaatccgcgaattggggcaacaatccagcaggtccccggcccctctccatccccttcggacgctgggcggggccctgggcgtcctggttacctggacaaggagtccacgctgggcggccgagccgccgccggctgggagccaagactctcgcagctcgagctcttctccatcgcgcggcaggggcagcacagggaaaggctgaagcagtcttcgcggctacagggcgggagaagcggagggcggagtgctacggaccggggccgcagtcaggccagcgccggcccgggagggagaccggaagcggccatgttcccccagagtgcaccgcgcctgtaggctgctgggcagcgggaagaccccactgcgcagctcagacgccggcatcgactctccgtgctggctgtgtccggccgcgcgacatctggtcttggggaaagggaggtggcggctcccagggtgagggggtctggtgaagcgggagggatgaaggaccagacccttatggaaggaggagaaatcctaggtgtaagaggaatgagggaacactaaacatgagggtctcaggaaggcgataaggacctgaggccaggaggatgatttagacaggaatgtgggggtcaaggaaaacaagaggaccggataatgagagaaaagtgagaaagaggtatgggagagggattggggaggatctgatatacatgcaaaaagaattatatactactggatgcggtggtgttggattacccaagtagaagacaaactttcaccgatttttccctgccctttcaaattcccgtgcctagcaggaagggagtgtggaggaatagaactgtgataagagaacaggaactgggtaaaggggaaatgcttctgctaggatttttctgttaggatacaggaaagccataaggacaccataaagggatttttctgattgagattgaatcctaatcatctcatgtatggggtgtaaaattatgcaaagattattcctgtaaaaaaaaaatcagaccatccttaaaaaacttccttgctaggataaattgaattatattgatttaaactagatttaatttataatgtacaactgatgtcttttaaaaaaccttatagttgcagtgcagtattaacttgcaagtacattcccaagaagaacaacctagcttagttatgttcagtgtaaggtagaatagttactgatgagtatgtgtttaagcacaaaaggcttagccttttttgagtttggcgaggacagacagcgaccgattgtttttatttccataatttttaagataccttaactggactctgtaggcaaagggagtaggtagtcaaaaacattttttaacaagcttaaatatctatcatgactcatagaagaatttccttatttcttcaccatctctacctgccttccaaaatgctgactcactgtcagctactttgacttaaatttccttagtgaaggctgatgaacccttgaatgggagacctatgtactttcttccacccagttcattcgtagcactttgttaatagaaccctcgaaaccttctgcctgatgtaacaatatgtgtatggttctatctagtgattaataaagaacagtgtagtaaaagtgtagagactttggaaccagacagatcttcatcggaatcccggttctgtctctacacttgctctgtgctgtggttaagttgtttcacatctctaaaatgggaataaaatgggaataaaaatatctacgtaataggttgtttttctctgtgcagagtcggttgcacagtacggtctcactaagtagatttattattacttgtttttccactgaacttactgcttgacttctaacctgactggtaaaatggtaacttctcagagtgaaaacacaagcaaagaatatcagctggaaattaattagtgaactctaattaattaatgaactctaagaaaatgaaaaaacatggttaacttgggacctcaccaaaagttattaatttttcaatttataatctgggctgttttttctcaaactatctgcaagaaggaacagtgttttgtttttaattttcaaaccatcaccaaccaaaacttttttaaaatataagaaaaattaatcacagttggttccatatcctcagattcaaccaaccacagattgaaaaatttgtaaaaattgtaaaaaacaaaataatacaaatagaagacaatacagtataacaactatttacataacatttacattgtattagatattataagtaatctagagttgatttaaagtatacaggagggtatgcataggttatatgtagacactaatgccattttatttaagagacttgagcatctttagcttttactatccttgggggtcctgaaaccaataacctgcagatactaagggataactgcactaggaaa

SEQ ID NO: 915020 - DNA, 4001 bp, Homo sapiens
aagtcagggacagaaggggccaatgtcagaaccaggaggacccatttctcccccatagagccaggagttgtctcccttttgcttccctgtgctggaaatgaatgtttatgatggctgcaagggacaatgtgtcaaaaatattaaatgcagttttctaatcataacctgtttttccctaatatataagcttttcttcaaaggacacaatattttgaacaatgtattccagaaaacagccaccactactgaagtgagttagaaagtttacttcttcttaataatgttatgtttcccatatgatggctggatactcacagttggaggagtttcttgtttgtttttttagctaaaaatcctagagttggccgggcgcagtggctcatgcctgtaattccagcactttgggaggccgaggcgggtggatcacttgaggtcaggagttcgagaccagcctggccaacatggtgaaatactgtgtctaccaaaaatataaaaaattacctgggtgtagtggcgagcgcctgtaatcccagctactcgggaggctgaggcaagagaatcccttgaacctgggaggcagaggttgcagtgagcctagaccatgccactgcactccagcctgggtgacagagtgagagactccatctcaaaaaaaaaaaatttctagagtcacaggccacaccaaatacatattactatttgctaaaaatggtctgactccttagaaaagcatttttaagctatatggttgttttactgctgctatctttccattttaattcactctaatatttgaatttgctcccaaggcccaacttgaagaaactgcaaaattaacaaacaggtgactgagctccttcctaagctgaagtggtcatcatgccccatgacctgtgagggctagagttcagatactgccccccactctggttttgtttctttgaagacctgactaggggaatattgaaatgagagtggattgaaataggaaaaatattttcaggattacaacacgatttagccaaatcattgctttaattttcacagttaatcccaggaattcccagtcttcggaaaagaccacaatatttcaaagcaatttagttcagtccaagcagaatctgcaatttctgcatttactctccgtcaactggaattgggtcttcagatgacctggagataagtttttgacacaaaacctactgaaatgcttccattgattaactcattttttcagcaaggattttctaagcgactactacataaagctacagtgcttggcaaggaaggaagtgggatgtcaagtacaggtggtgagatttctgtggcctgatgtgggcacctctggaaagacacgcattggagcgcgacggggtagcgatggcatccagcagcgtgggttcccacagcgccggcgcccggccaaaaagcgcgccagtaaaactttccgcaattccctctgtgccaagcgcgtcctgggcagccgcacttcggaggggcaaaactcaccctaacttttgagtgcagagtcaaacttaaggaataggttagagtgaagggaaaggggagcccgggctgaggagggaaaaggcagcgcatatcccggggtcagggacaagatcagaagacaaggaagggcccgatgccagcacccagcatcaggaatggtgctcacctgcgttccggagcttgcggttcctgagcacggagaggatcaccaggaggttgcccacgacgtccacggcggtggtgacgatgagcaccgcggacagcgctggagccacccagggaggtcgaggggtcctggagggccgcgcgctgccagcccccgaccagcccgggcgcactgcccacccgcccgcctcgcagcagttggcgaaggagccgttctctgacatcgcagactctcccgcgctgtgctttggccaccgcgcggccccggacagccgcagggcgcgcgcagtactgagccgggcgctctcttccctgcccagctcgcgtgtgcaagggaggaggccagtggggaggggtctggaggagataactaattaagcgtgggcaggggatggagaaaaatataggaatgggaggaggacttggggtgcagccgttgtagaagggagtgcgtccctcagcggtgcgctcaggaacagctgggaccgcacagctgtctctgccaccccgagcccagcaggtgcctggcccacctcaggctgcggagcgcgtctagcttctgtccctgagtatatagccacacccgagaccccgatttcctccacagcgtccccaagagaagctgtgtctaggtagggacgtccaacccaggttgatagactggagaaggtgctgatggtagggacctcccatcagttgtcaagaaaggcaaggtttgacgtcccatagggctgtgcagcccgaaagagaatgcaactcctaagatgtggggacagagcccagaacaaagtagggtagactgttatattctagggagctgcagaaaaatacgaacctagccattttccaagcactcgctgggtattgtggggggcattgatgatgtctctactgggtcctctttataaagccaatactttaacatatttaccaacatatatttacacataatacttaaatagatgtatggccaatattgggggttatgatgtggtttttggaggggttaggacaagaagaagattgaggcatgattacaataaagaaggaactcaggtgccctttattaaaaatgtttgagtcgtgatctggtgataataataatagataacttctaatgggggctaatcttatgaccccaaagcacttttcacacccattagaatcactaaaatcaaaatgactgattatcctatatttgtggaggaagttaagcaaccagaaccctcatacactgcttttatgagaatgcaaaatggtatagccactttgaagagctgtctgttagctcctaataaagttaaatatacacctattctatgaccagaagttccaaatgaaaaggaaagtatatttccaccaaaagacctgtacaagaatgtccagagcagccttgtttataggagctcaaatctggtaacacctgcaatttccaccaacagaagaatggataagcaaattatggtatgaccttgcaatggaatactactcagcaataaagatgattgacctacacaacagcatggattaatcacaaatatgttgtattgaacaaaagaagccagataccaaaaaatatataccatattattccagttataggaagtccaaaatcagggaaaattaatctattttctaatagaaatcagaaaagtggttacatttgagggtgggtattgagaaacaaacaccaaaaaatttctggattgttatttttacatatgttattttacgtaagttatattgcccctctcctttaaaggggggaaaaaaagaaggaaggatgcagtggagacggaggggctgatgatgcagaggcatgagtggatgttgaagggaagggagagggaagggagaggtgaagtgagctcatccttgaagtgagctaatccagaactccttaaagtgagctcatccaaaacccaaggaagaaatattatttgttaggagagggaggctttctttcttgtagtagaaaggaatcagaagccagatgcaaattcagatgcacttctaaactggtgtgaggaaagaagagaactcttgtctggcttctgtattctcagggagatagaggctacccattagccaggattcaggggaacagtgtaggagatttgaagacaaaaaaaagatatgaaggagcacttcagaaagtggaaacattaactagtaaagtataacaggcgtgtcaggagcatgaatgtccccctgcagcttgagatgatggcttcaaatgatgccactcagcctggccagtggttgttaatcagcaacttggagctactcaggacaggcatggagaaggcagagtgaatttcagtcag

SEQ ID NO: 915021 - DNA, 4001 bp, Homo sapiens
aggctgctcaaggaccttcctatctatttctgtggtcaaattcagactacaggaggtctttttgaatcattatagttagaagaagaatccagtttctgcctgtgaacttatttgactttagattgtctcatcttgtgactttataatgcctgtcccctccactggtcaattcagcatatggaagtataaatgcagtctttttactaggcagatatatatgctatcttacagctaattatgaaattgaatgaaaatccattgttatcttagggattagttttgaaaagcccccgtttatatacatttgccctaacataggaagtattgtgtagtttctcattgtcattttatctgtatcaagtatctttttttaaattgttaaataaagtcagctaggactgtggctcaatagtttaaaactatttaaagataatcatatttaaagcaaatgttaaagatttttactcttaagattgggcaccatgaaaagctatcaataataatagctaatttatcttttactaagactccgacatgaatgacattcactaggaaaactcaaaattttcaaactgaagctcaccagacccagaagataaatcttcctttgttattttctctaacttctaccctgttatagttcatgagcaaagctatacatgttcctttccttttcccggggtattattttagtctgtccagctaacaccttgttgatatggactctagaataggattgcgctgttatccctagggtaacttgttccgttggtcaagttattggatcaattaaacgtggtaattcgctttgactggtgaagtctcggcatgtgttgctcggaggtcggattgtgctccgaggtcgccccaaccgaaatttttcacgcaggtttgatagtttagggcctgtggacttgttaagtgttgtttgcgttaatgaattaaagctccatagggtcttctcgtcttgttatactatgcccgcctcttcacgggcaggtcaatttcactggttgaaagtaagagacagctgaaccctcgtggagccattcatacaagtccctatttaaggaacaagtgattatgctacctttgcacagttagggtaccgcggccgttaaacgcatgtcactgggcaggcggtgcctctaatactgagaatgctagaggtgatgtttttggtaaacaggcggggtaagatttgccgagttccttttactttttttaacctttccttgtgggcatgcctgtgttgggttaacagtgggggtaataatggcttgttggttggttatagatattgggctgttaattgtcagtttaatattttggtctgatgtaggcttatgcggaggagaatgttttcatgttacttatactaacattagctcttctatagggtaatagattggtccaattgggtgcaaggagttcagttatgtgtttgggattttttagatgacaggtgtcgagcttgaacgctttcttaattggtggctgcttttaggcctactgtgggtattaaattttttactctctttacaaggttttttcctagtgtccaaagagctgttcctctttggactaacagttaaatttacagggggatttggagggttctgtgggtaaatttaaagttgaactaagattctgtcttggacaaccagctatcaccagactcggtaggtttgtcgcctctacctacgaatcttcccactattttgctacatagacgggtgtgctcttttagctgttcttaggtagctcgtctggtttcgggggtcttagctttggttctctttgcaaagttatttctagttaattcattatgcagaaggtacagggattagtccttgctgtattatgcttggttgcaatttttcatctttcccttgcggtactatatctattgcgccgatttacaatttctatcgcctatactttatttgggtaaatgatttggttaaagctgttcggtagtaaggtggaatgggtttggggctaggtttggctcagagcggtcaagttgagttgaaatctcctaagtgtaagttgggtgctttgtgttaagctacactctggttcgtccaagtgcactttccagtacacttaccatgttacgacttatctcctctatataaatgcgtaggggttttagttaagtgtcctttgaagtatacttgaggagggtgacgggcggtgtgtacgcgcttcagggccctgttcaactaagcactctactcttagtttactgctaaatccaccttcgacccttaaatttcatcagggttatcgtagttttctgaagtagaaaatgtagcccatttcttgccacctcatgggctacaccttgacctaacgtctttacgtgggtacttgcgcttactttgcggccttcgtcagggtttgctgaaggtggcggtatataggctgagcaagaggtggtgaggttgatcggggtttatcgattacagaacaggctcctctagagggatatgaagcaccgccaggtcctttgagttttaagctgtggctcgtagtgttctggcgagcagttttgttaatttaactgttgaagtttagggctaagcatagtggggtatctaatcccagtttgggtcttagttattctgtgttcagatgcattaaagccactttcgtagtttattttgtatcaactggagttttttacaactcacatgaattttagctttattgaggggaattgatctaaaacactctttatgccggtttctattgacttgggttaatcgtgtgaccgcggtggctggcacgaaattgaccaaccctggggttagtatggcttagttaaactttggtttattgctaaaggtttatcactgctgtctcccgtggaggtgtggctaggctaagcgttttgagctgcgttgctgcgtgcttgatacctgttccttttgatcgtggtgatttagagggtgactcactggggcggggatgcttgcatgtgtaatcctactaagagctaatagaaaggctaggaccaaacctatttgtttatggggtgatatgagcccgtcgaaacattttcagtgtattgctttggggaagtaagctacataaactgtatggggtgtctttggggtttggttggctcggggtatggggctagcagcggtgtcctgcaagcttttctgacatcttttctatagcactttgtgcttttattacattgctatacttaattggccttttgggggacaaatccctactttcctttgtgtttgcaactggaataagaggcaattaattgtatactggcttaggtttctaaagcaacagtttttgaggcagttatcccttctttatccttaagggctcaagttcactttatgtgttacttcaaattgtaccgctgaaaccgatcgacatcattgctctttgcctcgtgaaaacaaatcacagctcctgggttgtgatttttcacggcctcttggattaaacaagagccgaaagcacttttctcttgctttctctttacttctgagtgttggtgaaacaatattcttcatttcctgcgtttgagacatgactgaaggtgatatacccaaatactctgcctgaactatgatcattataaagaacaagtgtaactaggggaatactaaccagataaacagttccttggaaatttttgcaattagtaagatagaagatgacagagagtaagactataaacagctgcaagcgtgtcaaaacctatctctgcaaaggcttttatgtattttgacagtaaaatgtgcatttctccacagtatgatgatacagtcaatttaactaccaactgccactcattcttatgtccttgcacttttcagcactaagattctacgatgtttctctaattacattcttatattttggaaatgattttacaaggtaaacaaactacaatagggttgagcattttatttttgctgtctgttggggtaggggtccacaacccctgggctgtggacagt

SEQ ID NO: 915022 - DNA, 4001 bp, Homo sapiens
ttattacttttgtatggagggctgcagaaagtgatgagaaaaaacaaaaacaaaaaacacctctggccagtaagggaagcaaacccacattcactgtccatatttttgcttccttttaaatgcataaagtcattattctgtccaggctctctgttgaaatcgtgggtcatacttattttataccaagctttggaaataaggagatgtcctggtttatgtcaggtaattaacccatataagggcaaagaaatgctactcattctaaacagaatcaaaatcagaaattctaaatagaatcatcagttcaggtatactgcaggcataatataaaaacatgtttctatagtaaaatcactgacgactatacattgggctgccttttctccaagttgtgtttgatcatttcttctcacagatgttaggctacaaattaagacagatgggttttgtttgtctctcaaagaaaactctgtctgctatgtagctaacatctcaggaagaacttgagtgttactctgagtgactttttccaatgttggacagtatttttagtttcctaaattcaagagcaacaataaatgaggacataagacatccttctaaaaatgcctcttttatgagagggttttggaagcgtaaccaactagaaaaaggattgtgactgagaaacttaggcctctcattttacttttatgtgatgtaaaaagaaagaaaaaataaaaaagaaaagactggctttctttcaagaaaaaaacaaatttcagaagtttgagaacattattctggctaaaagacttaggctatgtaactacaggaaaaatgtagagtttgtcatatgacctgctaccttgggagttttcagtcataaaattcagtacttaactaattagtgatgagtgtcaagcttagaaagaaagaaagtttctccgaaaggaaagttctagatcaaaattttcaagcatagggtttccagccttctgtatcatactgtaatgtctataggagcagcctctacagactaaatagaaagtagataaatggaaatcagcatccttttaataaaaaaagaggcttatatagccacaaaatgaaaataattttaagaaattttaccacattttcatttcataggatgttttctgtagtaactgatgtaaccttttagatttccagtgaaagttagacatgtacacatatcatgctaaataattatatgtactgtacaacagtttcccaactttttaattaagaaaatctttgaaaaagatttatagaagcttctaatctattttattagaagattttttccaaaactattctaatacttaaagcaaaaacctctaatacttaaagcaaaaacctttcagcacaaatgcataatttaaatctaagattcaatttatattcatgctgccacttccactttaaacattttgaaacctttactaagatctgacttaagaaaattctatttcatagtcacgtatgttttaaataaggcttttatttaactcttctgctggttctgtaatctagcaaatttggcagtaatttttaaagctaactcatttaggagtgcaaatactcatttggaaggtcattacttaataaaacaactacttgtctctgcaaggattgccgtagctacttgccaggctgttctgtcaaagttgagaccactgcgattctctttggtaaataatcaaggaagagagagagtagagagtgaaagagagaaagcgagagacctaagtgacccaacgcacacttaccttcaggcttaggaggtatttacaatcaggaactgaaatatcacagttgtcctgtctgaaaggaatctgtcgtgcattagagaaaacagatgggttaagtgtgacaatgtcgcactgagcaggagggtgccagggaaacaaaattaggtggggctggctgtatcttgcttgtgtaacagagcgcccaggaacctgactgacctgcttctcagctgtaagcattaagatatcacctcattcaggcctttaacaacaacaacaaaagcccaaccctccagttttcataggttgatcgttttagctttgggacaaggtattactctcgtcagtggtagcaaaacacgggtcatcaattttttttttcaccctaagtgaaaaaaaggacaaagattttggcaaagtcatctggtatagcaggaatttctgacatgtgctgggccccctgctccttgcaggtgaggaatccaaacaagtcatgccctgcacttgttgctctatgccagccgcacattctctgaaatcataaacaatttttctgtactctagtagattgccctatttgtgtacttaaagcctaagtagagaaaatgtagtggggtcagtagtgaggcgtctattctgaggtccactgaaattgtttttttaagaaactcctacttaacacaaagtgaattagtagcatatattgggatccctgagaacgctgtgaggtgttacatgaaaaataatcatcatgactgagattcggtttcttgctgactttcaggagtttggagaggaactggggcctgagaatggccatgtgatcctcacttatcctaggagccttctcgattaagtagtttccaccctgtgttctctctggtttactctcactttagaagctggagaatttcagaagtgcccaggtaatgcttgattaaatactagagttgaataacaacttggcatacttcctacacttcctttcagagcttatgaaagggagaagagtgaaactgggatcttccgcacatcagcgtttggggatggcgccaagggccgttcagctcaatatgcctgaggttcatacttggtttctgctgcacaaggagataggttttcaactgctgagcgagaaacgaaactttagctaaaatgcaggagctagtaagcttcaaatggaatgcaaagaatctgcccagttaattggcccgaggaaagaacaaggtaattctatagttttaaattttctgaagcccaaaggccccttcagagtttgattagaaattaaaccaaccccgaaaaaatattgtctcaaaagatatttaagctgtctctactgtggtacgaagaaaagcaggttaaatttaatcaaacagttagttactgaacagtggcttaatagaattcaatggcttattttcagattagccactttttaggtaaaaatccaactaaatatattttctgtttgtagttagagaactgaacatgattgggcaggactgggtgcaccttttccctaggccttttctgcaatatgtgtgggaatatcattatccccttctgccttaaccatagtaattatggcttataccaggcataaacattgcaatgcacttttgctatagctctccgttttcactgccataaaagtcccgctaatttctcatgttgctttttcctgaagaccctttctgtgggcccagaatcctattcatcattgccctccttacaatcataatcaattgattagacctcaccctagagataaaccttacctaccctcactgtcttgagcacatctggaaataaacttataaaatgtaaactgtacgtaaatttaatgcctcagttgttacttagctcacttagttgttatcagaaacctttgtttactcatggagttggagttaaaaagtaatttctagccaaacaaacaagtttcactgagatacagtcctaggttctaggtaagaccaatcccactttagacctcctttctccagaggaactccacaatgagagataattacctgcaatttcatcagcaaacccagctgagatgacacactgtgcagtgcttgtataattttttttggtacttacccactatggtgcctttcatctggcactcaccaattgctttacactcattaattacgtttcacaatacatactgggaggaagaaaaacctcttcctagtctgcaatgatagaaccactcacaagtggagtttccagaac

SEQ ID NO: 915023 - DNA, 4001 bp, Homo sapiens
cacccacctgccaacacccatgcctgagggcccctacccacccacccgcctgcgcccatgcctgagggcctctacccacccacctgtgccatgcctgagggcctctacccacccacccacctgcgcccacacctgaggacctctacccacccgcccgcacctacgcctgacggcctctatccacccacccgcgcccacgcctgagggcctctacccacccacccgcctgcacccatgcctgagggcctctacccacccacccgcgcccacacctgacggcctctacccacccacctgcccatgcccacacctgaggacctctacccacccgcctgcacccatgcctgacggcttctatccacccacccgcccgcactcacgcctgagggcctctacccacccgcctgcccatgcccatgcctgagggcctccacccgcctgcccatgcccatgctggggcgccttgcaggaaactaaatccccaggcagaagaggggcaggcgctggatgggaacgcacttacagggcctcattgttctggagacaataggggagcaatagctggggatggggaagggggtcccacagccccctgcaccggcttctgtaactctagcctggggagggcacacacggccactccatgcacaggaccagagacatgcagcctccaggggtgccaagtctgtccggagcctggtgggctccgaggggaggggctgtcagggacacacaggcaaagggataactgaaaccccttgcctatggggggaatggtgggggctcatcagtgtttgttgaatgaattagtgacctgaacccaaacctcaaggctgttctcctgagctgtgtgctggggcggaaggggtcttctagggctacaaggaatatccctttgggaaacatcagcccccgttgctaggatgtgggaggggtgccaccgaccacactcacacggccccgttaagcacagccaggtggcgggtgaggtagatggtgtcatccttgatggtcagcaggatggactccaccccggcgggggcctcagcctggcccggaccccgcttcaggtgcacagcaaattccttgtaggagcctcggcagtcggaggcgaagttgtagtcgcaggggccggggaagcggaagacgtccccgtcgaaggtcttgtagtggaagttgccccaggtgctgcagacgttgtggccgtggtttcgggttctgccctctgagggagcagcggggaatgaggggtgagtggccccggagggggaaggctgcccaagctaccctcgagagaaggcccctgaagaagcacctggaagcagcttcgagcccagcacagggcccctggccgggaaaggttccttcctatcctcgggccctctgctgggccttggtcaccccaccacaggggtctcagggcttctacccccggcctggtgaggagtgcggccgggtgccaagcgggatgtaggagagggcattctgggcaccccgctccccagcaagggctgtgctgccccaactcttcaagggtctctgccacctgagaatggggccttctggtgggatcctggccaccccttcctcccctatggacaatgacccagttcactggggcctgacctgctgtttccacctggtgctggccccaagacccacactgtcgtcgggcagtcaaccccaaaggaatagcaggggagccccgaccttccagctccttgaaagtcagcagggccgggggcttccagggaccaacccgggccaggagcctcagcagagccgcgcaggctgcactctgggaccagctcctcctcccagacgcgacttgcccgcccgcctcgccctgcccccaggacactctgccaggccccagacccctgtgtctgctctctcacctgtctggagctccgagccccctgccaaagacagggccaggcacacagccgccaggcgggctagtggcagccccatggtggctggcaggggcggtgtgggttgcgcccgggggcaggggtctggtccttatatgtcctggcaggagggtaggagggcaggaaggcaggggagggccaagggtgggtgtggcatctgccagatgatcaagaagacagctgcgggggcccgagccccaatggggaaatattgattcaggttatcggaggtcatctctttatggctccctgggtaaacgcagccttcttcaggatgaggcagccctgtagcctgaatgccaacacacacccggggaacacatgcagctactagaggggcgagcccagggtggccgggggaggggtgtcctgccagaagcaagtctggtcaggctccttagcccgccatgggcccccagacacccgctgagcaggtccccaggcctgatcaggctcacgttacgctgggaggaccaacccattcctggggcccaagctctggggcagcttccaggcctgaccccagaaaggggcctccccgagggcagggaggatgtgggatccttcagggtccgggggggccactgacttgtgtgggactcttggccgggctcatggagctgtgtcagaggccccagcccccaaccaccccctatgcccatccttttcccaggctgagcccttctctgcagttacatgtaattagaacttggggagtacatgcccagccaggggacatgttacggaatcaggcacacagggagctggctggtggccggaagtggccgtctgccccttctcctggggaccacatgaggacctcgggcctgacagctgaggaggtgacagcctgcccaggctccccagaactacctctgactcatggtggggatcctgcccccaaggctgtgcctttgatgagccttggtctcgcccaccaatcccagcagttgtctggaaaaaagcctggagaaccggaactcacaccgaccccagactacgagaccactgggcccaccactgcttgccccggcccgggagggcacaggcaggcacccctgtgtcgccagtgggtaaactgaggtctgggggccctcccctctctctacaattttctcctcctgaaaatagagaggggccctgagttgagttcctggctttggcctgaacatgccagggacatgccggcagcatgatggcagtggggagggactcaccccaacagttatagagactcggggcccaaagcaccaagcctgtttccctggctgacctgctgcccagacccagggcctgggacgaagcccctcccgccctcctgcggtgcccgccagcaccaggccccagggtctgcgctccctgccaggacctgggcacgtggaggaagctcagtgtgtggcccctgccaggaggaccggggattaggaaaccagagccagctgggcgaggccagaggagatcattgttcacttcctggtgtgggcctccgcacactggcactgagccctggggaaacccaaggacggccccaactgcagtcccctgaccctgacatgccccaggcgggcctcaggacagagattttccaggccaggctccccctgccctggggggattggaggaatcctagcggagcacaagctgcccagcacagcccctccagccctgaagcctgaggtaggtcccctagatctgaccctgtgtcccctctggacgggcagtggtggttcccaggctcaggggtctgaccccaacacccctcttggcccatggcaaggtcccaggtaggagccctgtctgaggttacaggcagccctgcatggggcagggtgcagagagctgaaccccattcctaacggggaaagggagctgttctggggaagaggacagtgagggctccatcaggccggggcgactatggagtcactggcacccccaaagcgagagtgtccccagcctctttgcctccaagcctcagccggtccccactgccagattcgcagcatctactgtggtggtggaggcgatgggggccaggcagttccacagcactgcatcccctctctc

SEQ ID NO: 915024 - DNA, 4001 bp, Homo sapiens
caggctgaccaccgcctccgggcaaggcctcacccaccaaccccatggaggctgggaggaggcagctccaacccacaggactctgaggacccccggccattgtctgcccagtttgggttggggcgcccccttcacaggaccccagagctcctccctggatcctgatctgagactctctgtggggaggtgggaggtgaggccccagcccccacagcatggtcagggctcagcgaggggccggccctgtggttcgcactctggcctggccctgcctggcttttccagccaggtcctgctgacatctgggaaccaccacaggggccgcctccagagatccaggttgactgcctttcccagaaagccagccgatccctgagtcctccaccccgacccacagctcacagccctgcccctgtgtgccagcccaaccagccactcccacgccccggctcccgccgcaggcagcccctccccaccccagcagcccctccccagccccaggcagcccctccctggccctacagcccctcccccgccccaggcagctcctcccctgccccagacagcccctccccaacccaggcaacccctcccccccaggcagcccctcccctgcccaggctgactgcccttggttatctgctccgtgcagtgccctccttgggctggaccacctgggcctccatcttgtagccagagaagtgcccaccaccagccaccccatcactttggggtgtgtcccctaacatgaagctgctctgtgcagggctgccttccccggccacaggacgtgcatctggtgactaaagcacagtccctgccaagggcttgatctccccaacttggacgtgcgtggaggacaggaggacgggtgggctgagagtccctaggccctgcctgctcaggtgaggggagccaaggctgcatggcccggaagaatcagatgcaaggaggtggctattctggtcaaaccagcccccaaaccttgcagccagacgcagctccccccgggcccaggctgggagccactgggggaagccccctgcctccagccctgctgaccacccagcctcccttccacagatggagagagaccccagggagcctcacctgcccagcccagaccccaagcttgggagggggtggagggcggggcagggaggggctgcagcagcctcatggccagcccggctgggtgtctcccggtggcccctggggctgcatctttctctattgacagtaagtattaatgctgcggctctggccaagagacagcagacgagggaaaacgctcggctgagagccaggcagcccgtgcggcatgagatgcccacagatgggccgtgggagtcgagcgtgggttgaggccggggctcttgcggctggctgtgcaacccttgagggtggtaccctcacctgccctgccagctgtgatccccagggaggtcgtgaagggtagagccggtcctggacaggggtccacgctaagcctgcccctgctcactctgatgcctgggcctcatggggctccagagagacccccagctgtgaccccctcccccattgcccactcctgtcccacccccaagaccaagaccctttcggtggtctcccaggggccttgccctgcggtcaggggcccaccttctcctggacaccccatccaagccagcccctgagtttcctgacactgtgagcccgtggggccccagagccctgtgttggggacgggtagggtcccatccaggacactcagggagtcgtagggggatctgcccgtgcactctgcaggagaagctcccaggcaagcgacctgcagagacccccgccgtgaagacagcatcgagagggggcggagtggggggctcttacctgcctgcggcaccacgagcatggccgccagagccaacaccagcgtccggcacgcgctcggggcacccatcctgggggctggcacgggtggggggacggggacgggcagggagggagccgggccgggtgcttgctcccctgggggccccagcttatgtagcagggagccttggccccaagccaggccaggccacgcagggcaccatgctcttccccgctccagccacgtgtgtttgctctcggggaggggctgtggcaggggagaggcctggatcaggaaggatttgcagctctgtgccctgaggcccaggacgcccccacccccagcagcttctgagaatcggaagggagagaagggcctaccccacctggcacccgtcctagatggcaaagccgctggaaggcagggctggccttggacgcagggtccatggaaacagtggtcagccagcctgcctcacactcagccccactgcggctcctgctggaagggaatcccagcctctgggcagcacccccagccactgaccatgggtccccgaggcccggggagggcccacgaggctggagctcccctcccaccactgcttagcccacggggaggccgggaggctcctgctgagctcaggcatgcacatggccaggatgctcagtctgggtggcttgtgggggtccctggaggaggctctatttccagagaccccagcccagctgaccagagccccttgaagaccgtgggaggtctctgggctgatctgtttcaaggttcacattcaaggggaaactgaggcccagagtgtctcctggccatgcacatcgggagtcagctgcgcttgtccaatgccagccctgatccagccaggccagaggctccggccctgagtcccatttggcctccacctcactctggggcctcctcattaaccctggcagggttgaggaagcagctgctccggggggtcctggacctgcccggggtcctccgcctgccccaggtgggagccgcagaagcctagcacctccggctggtgtcgggtgggcttcctgggggctatgtggtaaacctccttgacgagcgtcatctacaggacagacagcgtcatctgcaggacactccgtccgcgctgcaatacctcttgcaaacacctcctgcccgtgtgacctgcacctcagatgctcccacctcctggctccctggtcaccagcgtcctgaatgctccgtggcgcagacgccaggcaggaagcaccaggtcgggtggtgtggcctcgtccggccccatggggaccctagggtggtgtccaggtctgttgttttatttacgtcacagtccccgtcacgggccctgcaccagctcccccgcgtttgtctttctgaagttaaattcttagaggtgggatttctgggacaagacgaaagcccatcttcaaagcttctgacctgtctcacgctcaataggatggcggggatcaagaaacacaggaagtaggaagtgttggcagagacgtggggacccggagccctgtgccctgctggtgggggtgaccagcaactccactctgggtctgtccccagaagaactgaaggcgggtcctgagggacatttgcacacccatgtccacagcagcatcactgacaaagggcagaagctgcccatgtgtccctgggcggaggactgggtcagcatcgtgaggctgatccgtgcggtggaatacggttcagccgtgaaaaggagaggctggcccaggctgctccatgggggaagctggggacactgtgcagagtgaggcaggtggacacagaggacaaaggcaggaggggccactcgtgtgctgcccctggagtcatgaaacccgcagagacggagtgtggacggtgggcgccaggggctggcagaggggatggtgagctggtgttgcatggggacagggtttcagcttgggaatgtgagaacgttctggagatggagggcggagacagctgcacagcgacgtgaacggagctggcccgttttgccacctgtcacccctcatggctgaggcccccaggtggctcctcagagcgcgagggctgtggtggaggctggaacccgccttctccctttgttctttgtgacggtttctttaactca

SEQ ID NO: 915025 - DNA, 4001 bp, Homo sapiens
gatggggggtggcacttgggggccgtccccgctgtagcacagacacctcgggcctgtgtttcggtgccctcagccctgccaggctggcttcactgccccgggtgggtgcctcattgctgcaccccctgcgccccccgccgccctcgccctgccccacccgcaggaggttccccgagtccactggctccaagtcggctgcctccagctctgaagtccagcgggagactcctgcgttcctgcccagactggctgtgcttcccctcggctgatcccttggccaggcgcatgggcatctgggcgggttggtccgccacccccggcctctcagcccctggacgagcacgaggcggcaggtgcgcactgttccttctgcacgcttggcggccgcccacccctgcctcccggcccaccgcggcccaggcctgcagcccgtctgtccgaccccacactctgctggctgaggcccctcccatgttggcagagatggcgctcagagattatttgctggggtgacgggtggacacccccacttggccctccaccctctgcactgcccacagcccagacctccagcctctctgggcctcaccacacctccctccctggctccagggtggtggcccgagggactaggggtcgcactctgctgcaagtttagccccacttcctggcacttgtccccaagctgtgccaggtgtgcaggtaggggctggggtcccaagcagagggcaccgctgggagggctcagagacccccacatctcccacggttgaagggtggtgcccggcgtggtagggagcgggctcagagacccccatatctcctacagttgaagggtggtgcccggcgtggtggggagcgagctcagagacccccacatctcccacggttgaagggtggtgcccggcgtggtggggaaggggcttcaaaggagagaaggggtggggtgggcttgggtcgccctacagtgggacacccctgggggggtcccactgtgctctgagcccgaggcgcccaggttggcagcagctccgagggcgagctctgtcacgccagcgtccaccccagggggctcccggctgtggaggagggtcgggccagcttggagaggaaggaggagcacggaacacagaggcccttgggctggtgccttggtcggcaagaggggtctccccaggtctcaggctgcggccacagagggaccccttggggctggctccttctgggggcctggggagggactgatggtcacctgcagcagccgcagggcaggcggttggcagaggatccaggatgtcagtccctcctggatcctgcccgagctgggtaggggagcgcgggggagagggcaggctgcctgcggcggttctgagcccaggatggccgtacaccttcccccctcttccccccacggcggccacaccaggggaggcagcgtcccccacttctgtagactaggaaacgaggcccagggcccagcagagactgtgcctctgtcccccacactccagagacctctcaggactcaggaccccactcggggagggagagcgccagggctgggcaccagcacacctgcccactgttcccgcgggagtgccggaccccactccagctgagcgtcctcccccgctggctgctgtgccagctcacaggagggcgtccctgcccaggccccatggggtccctgaccccaattggcagagcccagcaccgcggctgctggggggacccgggcctggcagcgggggctggtcacggagccgagctggggcctcccgtccatcagcgtccatgtgggccagccgagttgtcgaggcgagaaggcccagagacccccgcacacagggcccctctgagggcaccgcagtgtctggcgcccctcgacctcactcaccagcgctgagcagggctccgcagcaggacagcagcagccaccgctggaccatggtgcacagtggagaggagctcgcgctgggcccggcaggcctgctgctgccatccatgcggctccaacggccggtcctgggtgccttatataggctggcgggccctcccccgccgcacctgcctgcgccccgcggtccagccccttaatcaccactgccggcgggcgccgcggtggccaaacaggatctgggcctgctttatcaggactcggctttctttggaaaatcctgcaggcagcggccccattatcacccattcccagcggggggctgacgcacgcacgcccccaaaggtcctgcaaacaccccctgcatgggggccatcctggcccgggccctccccgctgctgggtcaacgtggcactgtcagccacacgcctggtggccgggatggacctgttgggggaggtcgggggccctggggcacctgctctgccccttccggggagcccagtgctgacccagcttggggggaaccctgctgcacctgaatcccaggaccccctgaggggcactgggcccacccctcaccctgaatcccagcaccccctgaagggccctgggcccacccctgagttccctgcccaacaggaaagatcacccagcgggagggaccttgccagggggtgttggggagcaggggctccgccgtctgggacaggcagcggccttggggcttagacaggctgccctggaggcctgaggagctaccgtgtctctgcagcccgccaggtcccaggcttgctcctgaagacccctccacagctgttttcttcccccttcgagcgctgttggcagccatcttgaggacaggaactcgggggctgctcgtctgctggggcatctctgcggggctgtggggtcgccggtatgctcctgaccccttcaggcagaggggcagggactgggatgaccagggggccttgcctgtggaggcacgtgccacgtctgaggggccggggacagggcaaggtctggtgacatcggggtggtgccggtggctggcgggggggagggaggtggaggtctgagtggtcaccaggattgccccagcttcgtttggcagcccagggacccctcccaaaggggattttggtccccgactccgacaggagccctcgctggcctcggggctgctcccaccacacgtcagcatcccggcctgagccaggagggactccgaggccgcctggtctccctgggccgggctccccacatggggctgcacccccatcccacaggtgagctgagcctgctggctgggacccgggcctgccacctctgtcccacctgtgcccacacgcccgggagctgccccacctgcccccggaagaggccccagggccacgcgtgccatacacagtaggtgtcgcgtgtttcacttaaatcagcttcagttttgtggaacgttgcttgaagttacaataagttgcttttgtaggaaattgcagtacgtgtgctgccccccaccaggagccccacaccaggcattctgggtgttctactctcatctgttcttctttttaatttttcggttttgtagggacgaggtctcactttgttgtccaggctggccttgaactcccggactcaagagatcctcctgcctcagcctcccagagtgctgagatgacaggcgtgagccaccgtgtccagccttggctgtcccttcttaacacgctcagtggtccctgtggttcaggtgagaagctgaggcacaggagtgaggcccttgccctgtcatgctgagaggttggatggacgcagggctcacagctggccctcgttctgagctggggcctctcagcccgggctcgaggtggggacgatgaggggcagagatcttagggcctccttccctgggtgggtcactgcaccagggcagctggtgccaaaagggacctcatgggcaggtgtcatggctgggagccctgtggccatgtcagcccggcggttgtgcttgtctgaccacctgtctgggcttgtgagaaccgagctcaggttctcaggagggatcctatgaagctttgaatgtaggggcaggggtgggtt

SEQ ID NO: 915026 - DNA, 4001 bp, Homo sapiens
ccacaagtccatgttccctgtgtccccagccatgggccacacatgggcccactgcaagaaaaggcagtctttggtgggccccagagccacttgggcctgtcctccctgatccctgtgctcaccctgggggacttctgagcacacctctgcagcagctcctccttggttaagaagtggtgaccattaggattctgaaaccaaggtagaaaagacagggtaggctcagtgccagggcccctcctcatcccgctcaggtggctgggataatctttgcctgccctgcctgggccaggcccctcggggaacctcccaccccactgccatggttccgcctcccggtgtagcccagtgctcaccaggtgctcccggtagagcaccagcagtatcactcgggctcctgagtgccgagctggccagtagctgccagagcctcccgctttgggctgggcaggaacctgaaaggtacagaggagttctgaacatgaaagccagccagtcatctttgaataagtccccagcaggctttgtggccctgggtaagtcactcagttgtctctcagtttccttctctgtaaaatgggccaggtgatgggatgatccgctgcaaatctgggataaaacagcaggcagtttcggggcagtgggtgggggtgtctgcccagcctggcctcacttctaccatgcgctgcaggacaggtgtaattagacaggaaaactcaataatggtgaccccgtaactaactgagctgggatccttaagtagcttgatcatggaattctctcattggctgttaccaatatttctattcacaggttaaaatactaagtcgaaaagaggataagtcatttgctcaaggccaggcatcactggtgagatttggactcaggcttgccaaatcccccaagccagaaaatcatactcccgcactcccactttgccttccactccccttgccccttcctcactggcatggaagagtcctggacttccgcaagtcgcccctgcggggctggactgttctctccagatggtgagtccggggcatggtcacctgcgggagagaaaagagttaactccacactccacgaatccggcagctgcgaggatctgggatgcaacctactcagatggttacgtgagaccggtgagggaggctcagggagcgccagccactagccctaggccgaacggcaactgggacaggagtggggagcttaaaagccaagggctcccaggagagtacggaggctccacctgggggaggtgggggatcaccgacccctttccgaggcgctcaccgcccgatgttcggtgccgctgcagccgctcgtccagcatccggcagagcccgtctccgaagtgctgtaggatcttagcttccttcccgctgcgcagcggcagtgggtaccgtcggagggaacgcagcgcctggccgggcaggggtagggtacctggtcagggcaggcctgacctggccagcagcttttcccatcgggccacgccaggacccaccttctgaaatacgaagcgcgtgcggcgcctgctgcgggtcgcctcgtcccgccactcggtcagccagcgaacgaagagcgggttgggacaggcaggcagcgggcgcttccggcccaggcggaccggggccgccatgagcccgagggcgggtcctccggcgctccacgcccgcgggactgggacgccgccagttctggagtcgggattcgaacacctggcccagggcggggcgggggaagagggagaccgagggcaggaccgttgagatcacggggccccaaacacagggggcactaacgagaggagagcctgcggccgccctcccacccctgcgctgctctaagtggttggtcaggggcgctgtctctaacgatcttttcccttggctccactccagccagcctttgagacgcgccctttcccagcccccggagcctggaccggctccttcctgtcaccccagattcgagagcggggtctttgtgtaggcgagaggaaggcggacagcgccccctgtgacggggaggactggctgggcggcgcttaacggactaacctgagcttggcggctctaaggtctcttaagattgtcagcttcagcctcaagcttgaaggaggctggagatggagactggtcttgaaaagagtccaggagaggcgggggctaggagacaaacgggtgcaaacgtattggtgggagggacacccagaaatgggtgccggggatgaggacacaaaggtaaggcaggaggagctgcaggacccttggaggaaatggtgatcctcatccccgggatacagggcaaagagtgtgtggtggagaggaagtcggggacgtgccgagaaggcccaaaatagaactcggaatgtcgggggtcagaggcctagaggaaggaggactgtaagtaagaggtgcttgggcatcctggcagttggggaggcctgagatgggcacgcggttgggtttgggagcggaggagcaggctgcgggttaagaagcccagacacaggtagaggggagaacacttcgtcatttttgtggctaatcggaagtgggagaccctcagggaggttgaagatggaaaccctacaaagggcttcaacctgagaagcctgaaagacacgtatagctgagttggacacaggcgacccgccagggtttgaagcagcacccggcctctagctgctatgccggaagtcgcaacacgcaggtctccagcctgcgaggaagggagaggtgggcgccagagctccagtcccgcccctcaggactgtgcctagcccacggcgcagtagccccagccaagctaaattggaccaatgggctccggctcccgcctcccgcccgccgcggccttataaggagcctcaagccggctgtcgggctggccccgccccctcgagtctcttgtcctaataaggacatctagggcatcccgcggctgggggcgggcgagagcgcgtctccagggtaactgcgaagcccccctctctctccccgttgctcttggaaactctaaggctcagaaaagggggcgctagcctcatattcatgtagggtcgctcgcgggaggcggggtcaagctgctgtctccacctggagcgccgggagtccgggcgggggcggtgctgtggaatgtccccgactacaacccccggtatgctctgcaaggtaccccactcccaggcatcgctctccgtttacacccttaattccgtttataggattagggcccccagttccctttctgggtttgcctctgacttgtttgcgacccagtcttttcctgcagagtgtgaggctgtggtcactgttctagaacaacaaaatcatcccggagtcccccgctcgtttctttttttttttaaggcatatactaccacagaacttgtctcagttttgcggatgttagaataaccatgtacctggctatcaactcgagagctgggttcaagtctggtttaatatctatttcttctcattggcacgtaaaggcatgtaaagaagccttgaattgaatgcacaaaccctcgtctttaccctttaacgcctcatgactttgccaaacatctttaaacaagaacaaagctctcagagatttccttgtacctttcccctgtgccttttcctcctattcttgttttactgacgttggacatggccttttttcaggagacgagagtggctttacacatgcagagtactagtgtttatccgactgacgacgccttcatacttgtgatttcctttgctttaggtcgggattccaggctaatcaatagttgcttcgattcagaaatgcaaaaccctaacctcactcaaaaatttcaggccaagggatccagataataccagatgggtcttaagaaagccgttttgctgtgggataaagagccgcttagtcggggatcgttttcgggtcattttactgagcgccgcctcgccgggctcagagcggttcctgggaaattggaccaatgggctcgc

SEQ ID NO: 915027 - DNA, 4001 bp, Homo sapiens
cgctgtggatgaggaaagtctgccatggctgtcctcccgctgcctgggcccctcagaggcagctcatgctgagctggagagccagcctgcctctcacattctcctccccgtcccaggccatcagttcccatgtcctctgcatctgccctgaacagctccaggtccatccctgctctgccccagccttagagcagcccctcagactgggctgcactcccctcatccacagctcctggggcttcccggccgtctgtgcagggtcatctccccagggaggtctgcagggggagagtggggttgtgtcttgttcatctctcccacctaccccatggctggaacaagccaggatggcacatgggggtactcagagaggtcatgtgcagaaaagggggaaagggcgttcctggcggggggcacagccacagcaaaggcaagaaagtgtgaaagcacctcctgttccctggatggatggagagtcgctgggctgcccctcccccagcagcccaaacctcagggaaggctgatcaggatcttacctgcctctatgaccttgaggtcgaacttgaccttggaggagccagcaatgactgcgtaagatccctggtcggcagggcccacttcccgcactgtcagcgtatgccgtgtgccctctgtggccaggccgtacttgttgctggcgctgatgtcactgcctccgcgctgccagcgcaccttcactcctgcccgctctgtctcggcctcgaacacggcagggctgcctgcggccacttccactgaccgtggcttcttgctaaaagctgagactgaagggccaggtggaggctacagcggcccctggttggagcgtgcaccccgcccctgcagcccctctcagtaaatactgtgctagcactttctatgcatcccctcacgtaatactctaccagttctctgaggtagttgcagttattctgttcatttctcagaggaggacactgaggctcagagaagctaagcggctcctccaagatcacacagctagcagtcgggagagccagggctgtggtcctgacctcccaacaagactttttctgcatgtgtccactttccctgcttggagacacccgtgatgaacccagctccctttcccccaaccatttcgggcccttggcagggggcggggaagtctgcctacttggaatgtggccaaatttgtcctccaaggacctcaggctgggtatcagcaactgagataaagctggcctgggagggcgctgggggatggggacctggatctctgccctggacaaccttcataagggcacagcccaggcccaggtccctgggctgtgattttccctgcccttggcctgggttcaggggctcctgactgtcctctctcagagaagaggggctgtgtcaccctcaacatgggggccacaccgtacaggctcatgaagcagataatgtcacagccaggaggaaccaacccaatgccaccaccacccccggcaccccaggttgggagactgagacccatagtgggtagagactggtctgaaggcatgccgtgagcctggctcagctccatactaaacgtgggctctgtccgcggggaaccttgctgtggaaggtgaaggcaatgggacagggaaggggtccctttgcattctcagaatgggttgaccccgggtgcttcctgtcttggctgtgtcccctctctgcgtccctgaccttgggtttaccttcacctctcatcagagggatgggaaaaagaaaccgagaatcaaaaaaggaccctggaggactggctgcccctgtcctggggctcagaggccacgtcctcgtcaaccccctcaagaactccctcctagccctgctccccaattgtagacacccccctgctcccacacttagacccaaccccagtcctaaagctacctggcttcttccccggctcaggcatcctgagagacgtcacaccaggcacgaagcaggcacaggtcacccaaagagggactgagtggggtcctgtccttcccactatatatggggacctcccccctccccaggctctgcttatctgcctcctgtccagccacctgctaaatatagatgaattccagagagctgaggtctctccagggagaaggtagggccacattgtccctggctggctcctgtcccttcccccctcaccccccgcagcacaattctgcctccccaacctttggcaagcctcaggggtactccaagccccgtgtgtgtccctcttacagcaaattgtacggtgggagcatgctgggcccataaccctaaggctaacgggtcaggagcatcctcgcaggcagttcaggcagtggtcatgtccacagaccctggggccagggtgtctctgagtcctagcactgccatctctttaatctcaaagcacctggtttcctcatctgtaaagcggggtgggtgaaagcagcacccactgcacaggattgtcacacgtatgaagtgggtttataattttaaaaatgttaggccgggtgtggtggctcatctgtaatcccagcactttgggaggccgaggcaggcagattatttgaggccaggagtttgagaccagcctgggcaacatggcaaaaccccatctctactaaaaaaataaaaaataaaataaatacacacacacacacaaattagccaggtgtggtggtgtggacctgtagtatcagctacccaggaggctgaggtgggaggatcgcttgagtccaaggagttccgggctgcagtgagccaaaatcgcaccactgcactgcagcctgggtgacagagtgataataataataaaaatattatttattattattttttattattaatatctcaaagaataataataaaaaaataaaaatgggctgggcgaagtggctcacacctgtaatcccagcactttgggaggctgaggcgggcagatcacttgagctcaggagttcgagaccagcctgggcaacatgatgaaaccccatctgtacaaaaaatacaaaaatcagtcaggcatgtgacgcacacctgtagtcccagatgctcgggaggctgaggcaggagaatcacttgagcccggggggtcagggctgcagtgagccatgttcgtgccactgcactccagcctgggcaacaaagtaagaccctgtctcaaaaaaaaaaaaataaaaatagaagaatgaagacacaacaccattttgccttctcttgtggccctgcagtaggactagggagctgcagggttgggctgcagtgagccctctggggttgaggaggtgtggggcgggtatttgtccctacgataatggccccagaatctgggttccctaaggtctttgacagcgttgggaagtccctcactcccaggctgtctactgccactacttgctaccgtctggaggaaaacacaggacttacaggcttctccgctcagcttggtctgtttctcccctgctgtggctaggagctagaaagcaaatagaacctgggggtcccaccagggattcacttgggtctaaagtcctgctgggcgtgcagctcgtgagaaccctttgcggcccacaggagctttggggcttaattcctgtcctcggaatgctgaagagtatcctcttccagataagcaaggcctcccactccatgttgacgtgtcgggacagacctggagtgtgatccaacttggccactcaacggctgtgaccttggggaaataatttgacctctacaagcctcagtttcccattctataaaatggagtgatattagactccacatctcaaggttggcagatactaattgaccagaatatcaaatgttgttgctggtcatggtcatcatcatcatcatcatcatcatcatgagttcaaacctcatcaaggcttaaaaacaacaactatcaggagtagagagcttttaaataggatctgctctcctaatcacaattgaggacttgttctttccaccaaactctaactcctgttcaggcg

SEQ ID NO: 915028 - DNA, 4001 bp, Homo sapiens
catagtcagggcagctcgattctgccagggtcatgcagagtgccccggcaccggccagaagtcctcgcccaggtgagcgcagagccacatccattcgcgcccacataatttccatggagagcccatgccgcccatgcacctcctcagggcacgagctaatggcctgctcaacgcccactctaaaggcttctcccaggtgagcaacgcccaccacccttgcagactgactcccagaattcctgttcccagtgccacacagagtgccttgtggtgcatctgtgaccctcctggcccgggacacgtccacgtcttctgcctcctggctgagccccgcacctgtctgggcacccttgtctcccttgtttctctcccggtcaccagctccagcagcaaaccacagagacacaaatgctcctctcaccgcaacacgcagggcctgggagagacagaggcggccccgggatctgccggctttggagccctccacgaagtgtccagcctgccgggtgaacatgagcaacgagtccctgtccccaagggggacagactacagacaagaaaaccgatgaataaatcagacatcagcaggtggcattcacccacccaagagaagaggttactggggtcagggaagtgtcggcacctggtggaggtggaaggtcaggaaggacacaccacggagacaatgacaccaggagggagactgttccaggcagaggcaacagcgagtgcagagacctatcgggagagctggggtgtatgtgacgcagattctgagggccatgagccgagggaaggagccagacgctgtcctaagtgccaggggaagttgttagaggtgttaagcgtggcatgacgtggctggatttagggtctgagatgaactttcctgctcctgaatggactctgaggagaaggaagatactaccatccgtaatccaccccgggaaggcactgacctccttgaccatggggaggatgagaggccgccgctctgtgcctgggtccccatggcctctagggtcccttcacgttttcacctcatgatcctggaagctgggacctgcccaaatccaccgggtggccccagcctccccatctctggggcagggggtgggcagccttctcctcctggtttatagccacagatgactccaggcacagtggtcctcaaccgcctctagggaccatggggacggctgccctctgtgtgtgacggtggctgggcagaagccagctgggctgtcgtgggtagggcctggaggcctctggctgtatggtggtctagctttggcaccaccttggggggctccgggtaggaggtgtccaccagaggggacctgggcagctcagcagaggcttggtcactcccgagccgtctgtgggtcccactggtctgtaccctcaaccccactgacctgcactggtcatgcccagctctcacaggatgatggccccagccttgtaatgagtcacctgctgccctcctgcccctccagctggtcccccacccagcagccacagggctttccttaaaacataagaaagaccctgcttcttacctgctcagatcccaccaagaaccggccacctcactccagataaactccagactcttcactgagcccaaaggcaacgagcagaagtgtccagaaatcacacagagctcagcaggtggtgaggcacctggacccgagtcacccagcagctgaacaggccatccctgaggccatgcacgccccggccctgcaggtgtgacggccgaggcttccacgacggggggtgagtgggagctaatatggctggtgaaagcactgggttcagtggggatggcatctcccgccctctgtccaaggtggggaaaaagtcagcttcaggtgagggagaccctggacgcctggctttgggctgattccccactcacttggcctctcccaagcatactttcctgctttgtagggatgtgggttcgcgggacagtaacaggagaatcaaggcaagaactcagagggggatagccaaggtaggcggagctgcctggtgggtgggactaacccaggtgggtggggctgcttgtgagtggggctagcccaggtgggtggggctgcctggtgggcagggctttcttccccgtcaacatttccctctctcggttaaggccagggcagagcccacacatgggtgtgcccaaccttaaggcctgccctgggtgagttaagactccccagctcacctaggtcctacctgaggggaacctacacggccaacctcctcaaggatcctgaagccacccagaagacagtggggctagggtgccattcattcattcatttattcattcacctattcatttatttactcgcttcaccaccctttcctgggtaatattaagaataacagtgggcctaggaatatagaacattcttaggggtttcttgcaggccaggcaccctaagaaaaagttatgtaacccacgtggcctcgctgtgagggggacgactgctgtcctcacttaatagatgaggagctgagccatggaggcctcacagctgggcagctgggggtggaccccatagactggagggggatgggcaggggcaaggagttctgctggccccaggcctcttgtacacatcttgggaagtactaaaaatgagtacttgctcaagtccctctcttcattgagcacagggagctcttggcccttccctcctcctccctttaccctcaccgcccaattccacacgggtgtactgagcacttgctaagggccaagaccagcactaggtggagcacacagtaggaacccaaggcagccctccctgcccagctctccaggacactgtcgtcaatgccagcgggaagcatagagaggccagggaaagacgggcagtcaggaggaaggagccagcggaggggagagagggccggcagctcagtgcacctggaccgtggtggatgctggactatgaccagagacagggctgcagcccagagctagccccagacccacagggcctcagggggcttcacaggctttgtcaggggtttggactttctcccgagggctggggaccctgcaagttgcagaaactgggctatatttggcattttagaagcctcccccagctgtagtggaggggaattggagggagtgggagaggaggttcccattctcactcaggtgggagatggtggtgggatggagggtgaccctgattgataggactcagggacaaattaaaggtgagggccagggagagggttatccagacagctcccaggaagatggcagtgggatggagggtgaccctgatgggactcagggacaaattaaaggtgagggccagggagagggttatccagacagctcccaggaagatggtgacaccagtgaggtggggagataggatggcatttggttcccactgagctggagatgcctgtacaaagcttctaagatacccaaggcagaatctgcagctcctgcaaagacaagagctctgctctgcctccagggaatcaggggaggtctccccagtgccctactgggacctccagagaccctatgcgagcctcccccaacccaaccaccagcccatcagcgccacctaccggctgctcagggcaggcactcagcaacttgctgagggcagatcctgatgtgtccccgttttacagatgaggaaactgaggccaggagacaagatgacgcctgtttgaggttacgtagaggtggaggtggcataagacctcagttcttcctggcagatcctctccaaagagccccgtctgagagcagatggaaggaggtggtgtcaggagataccttatcttacttttgtctgctgtcagcattccaacaaccctagattattttggcaccccgcagtgtcactcagtctcaccatagcctcactctaattatcaaagctcatcttttgggctgatatctgcttctgggactcccagtagcccacctgggtcctgctggggaggac

SEQ ID NO: 915029 - DNA, 4001 bp, Homo sapiens
gggtcacacagctagccagagcaaatttaggactaggacttaatctccggcactcagcttagggactgccccaggaatgtgggtgacaaggacaagcctgactgagcagaaggtcaagggctgggcatgacctgctcacagcacaccctgcctgaaacctctcaagagcacccactgccctcaggatggctctgtgcagagcactggctgctgacggggaggcagggtcattggggtctgtctctggctgtgctgctgaatgcaccgcacctgggcctgggcccgggcccgggcccgccccgctaggcccagcacaatctggcccctgctgatgcctcggtcttttctctcactgctcactccctttcctacccttatacttggacatcctcagtgactcactgttcctgaaatacgccagctcttgccatctcctggccttcacacactggcccttctacctgaaattttgactagtgaatttccacttatggttcatggctcagttcagatgatacctcctccaggaagccttccctgaccactcccaagctgccaagagcctctatattcccctttatcccattttgactatatgcattatgttgtcagggtaagggtcagtcccacctctgcccccaaagttggcgagttgatccagggcaggatgtggccaatgggagagggtctgagacattgccttgtctccagccttgtccagcacagggccagacccagagacggcctcaggaaggagcttaaaaggcagccccagcctacagaccctggtatgaggcccctctggctcccaacctgtctcctagaatgcgcatcaatttttcacaagggcccattcagagccgccggggcattcgatcctctgcccatgacactgcccgacatccgagccctgacccctgccctggagctctgggacacagcaaacccacagtccttccagagacctgaactagtctggatgcctggtggagatgtggattcaacagggccagcaggcagttgccaccgggcacttgtctgaagatggtgcccaggctgtggagcaggcgccctatgccagcatgagccatgagggctgggggcagagccagtgctttcactagagacatggggctccaagggatgggggagagtggtgagggcgtgaaatttaagggccacattttaaaatgaccagacagacatttcatttctaaaaatgagaactagaccaccttcaagttaatttcttttccaactgacaacagggggcatagactgtatttgtatttctatgtctatacctgattttacctcttccccactacaaccctggctgttggggcttcatactcccatttcacagatgggatatttggggcatagaggaaggaagtgacttatccaaaaacggagataaagagtgtcagagagaaagcaaaggagacagagagaacggactcttctctctgccaccacagcatgtctattcccctggccccaggatgccactaaccccagccccagctcagagaagattcgatggacaacatgctccttggctcttccctcctccaggggacacacatccatcttcccaggctcgggacagtttcattcagtggctgtggtggctgagccctcaagggtggcaggaagcccagtcccaggagcaagtggctgtggggcagaggctctagaggtagctcaagtccatgactcctccacatccaaacccctcccaatgcccaggacagtgggcagcccatccttacctggggcccagctgcccactctcagtgacctgccagcctggtacagctgccacctgcacggaggactcaggaagctgggtcacgggcccagccagtctgcaaacacacgtcccctcttcctctgtctggctccaagtctcgttctaggcgtccctctgggtctttcccttcctcgccgtctctctgtgtgtgtctcttgtctctccctctctctcctgcccagagcagctgtccagccagcactgctgccctcccctcctcactccagagccttctcccaggaggcggagccggagggggcctccaaggtctgggtgcggtgacatcagcgtgggggacgggccgtgctggggctgggactaatgtccagaggctgctcagggctctgtgcagagcactggctgccgacagggaggcggggtcattggggtctgtctctggctgtgctgctgaatgcaccgcacctgggcgtgggccccccaggctagcttcaggtgcctcctgttgtttgcaggacaccgcctgctgtctcagcacctgagcaggaaaccgcacctgatcctgacttaatcactgatgtgctggggtctcagccccatttcttcctcctctacctggctgtttgggactcagagagggaacggtcaggcagagcatggcaggagggagagtgctgagctaaagccctgccttctgcgccttctccctcctgcacacccacccttgcctctgatgtgtgttctctgacgctggtcaatgcaacattgcccccacaacctgctctgcgggttggggacacatgttattccgtaatcatccagaaactttgccaaaccagctgactgggagccaccccacgtgtgacagcgacacagataaactgaagtgaaatctgtgatttaaaggagtggggggaaccaagcaaagaggagcacacgtctttgttattagcgttgtcgaggatggagacctcgcgcggccctatcgggacatgacagtttctcctttccgccctcggcagccacgcagctgtcggcggccccatagtgcacctcgccagggcagctctgggtggcagaaggatgtctcttttgggtccctagcccccataactggggtgtctgcagggaagctgcccagaaggtggggtgggggcccaaaggggcgctatagctcgccagcgccgcctgctggtcacaggccccactgcccagctgcttccgtcaggcgggctgagcaccgctgggaagtgaccgtgacaggagtcagcttctgctagggcctgggtcccctcagacccgacgaccctgtcccaggaagaccccaggatgccgtctgccccttagcctgctggcctaacaggagtccaggagtccctggaacacagtccccacctgggatttgcacctgctgccgaaacccagtactggccactcctcaagtcccccctctccatcctcccaggctgggcggggccagtggcgtcagccctacacggatggggaaatgagaccccgggggagcacaggagagcccatggcacacgactggcagcagggacaaaatgcagtgagctgtgggaatggggcagagaggtgggcaggttatgggggacagggcggcctccaaacaccaggatgacagctacattgtgttcagccatgctatgaaccaggcactatgctaagcagatcacacgatttgcaatacccatttctcagtcccatgaagaaagcgaggcatctcggttcactttgccctcacactgcactcaccccgtctcccaagtcgtttttcattgagtcgtccactctgctttcagtcatcccaaccctgcttctccccaccaccacaccagcttcctggccctagatgcctgcatctgccctcagcagcctccgctctggtccccccacaccttcctgtgccccgaaggcccatctcctcttcccagcccttcatgcacagatcagggagtaggccgtctctaacccagcaggcccacactgccccatcagtaatgtgcggggtagtgtctgtcatgaccagagtatgtctttgttctcgctgctcgtttgtagactgtcccagagcagggattgctatgcctggttccccacatcccaggtgcccggggcaggccttggcacaaagccagccccgtacagatctactgaataaaggaatgactgaatgatccccacaatctcagctcacaggtgcacc

SEQ ID NO: 915030 - DNA, 4001 bp, Homo sapiens
tgcccagggtcacacagctagccagagcaaatttaggactaggacttaatctccggcactcagcttagggactgccccaggaatgtgggtgacaaggacaagcctgactgagcagaaggtcaagggctgggcatgacctgctcacagcacaccctgcctgaaacctctcaagagcacccactgccctcaggatggctctgtgcagagcactggctgctgacggggaggcagggtcattggggtctgtctctggctgtgctgctgaatgcaccgcacctgggcctgggcccgggcccgggcccgccccgctaggcccagcacaatctggcccctgctgatgcctcggtcttttctctcactgctcactccctttcctacccttatacttggacatcctcagtgactcactgttcctgaaatacgccagctcttgccatctcctggccttcacacactggcccttctacctgaaattttgactagtgaatttccacttatggttcatggctcagttcagatgatacctcctccaggaagccttccctgaccactcccaagctgccaagagcctctatattcccctttatcccattttgactatatgcattatgttgtcagggtaagggtcagtcccacctctgcccccaaagttggcgagttgatccagggcaggatgtggccaatgggagagggtctgagacattgccttgtctccagccttgtccagcacagggccagacccagagacggcctcaggaaggagcttaaaaggcagccccagcctacagaccctggtatgaggcccctctggctcccaacctgtctcctagaatgcgcatcaatttttcacaagggcccattcagagccgccggggcattcgatcctctgcccatgacactgcccgacatccgagccctgacccctgccctggagctctgggacacagcaaacccacagtccttccagagacctgaactagtctggatgcctggtggagatgtggattcaacagggccagcaggcagttgccaccgggcacttgtctgaagatggtgcccaggctgtggagcaggcgccctatgccagcatgagccatgagggctgggggcagagccagtgctttcactagagacatggggctccaagggatgggggagagtggtgagggcgtgaaatttaagggccacattttaaaatgaccagacagacatttcatttctaaaaatgagaactagaccaccttcaagttaatttcttttccaactgacaacagggggcatagactgtatttgtatttctatgtctatacctgattttacctcttccccactacaaccctggctgttggggcttcatactcccatttcacagatgggatatttggggcatagaggaaggaagtgacttatccaaaaacggagataaagagtgtcagagagaaagcaaaggagacagagagaacggactcttctctctgccaccacagcatgtctattcccctggccccaggatgccactaaccccagccccagctcagagaagattcgatggacaacatgctccttggctcttccctcctccaggggacacacatccatcttcccaggctcgggacagtttcattcagtggctgtggtggctgagccctcaagggtggcaggaagcccagtcccaggagcaagtggctgtggggcagaggctctagaggtagctcaagtccatgactcctccacatccaaacccctcccaatgcccaggacagtgggcagcccatccttacctggggcccagctgcccactctcagtgacctgccagcctggtacagctgccacctgcacggaggactcaggaagctgggtcacgggcccagccagtctgcaaacacacgtcccctcttcctctgtctggctccaagtctcgttctaggcgtccctctgggtctttcccttcctcgccgtctctctgtgtgtgtctcttgtctctccctctctctcctgcccagagcagctgtccagccagcactgctgccctcccctcctcactccagagccttctcccaggaggcggagccggagggggcctccaaggtctgggtgcggtgacatcagcgtgggggacgggccgtgctggggctgggactaatgtccagaggctgctcagggctctgtgcagagcactggctgccgacagggaggcggggtcattggggtctgtctctggctgtgctgctgaatgcaccgcacctgggcgtgggccccccaggctagcttcaggtgcctcctgttgtttgcaggacaccgcctgctgtctcagcacctgagcaggaaaccgcacctgatcctgacttaatcactgatgtgctggggtctcagccccatttcttcctcctctacctggctgtttgggactcagagagggaacggtcaggcagagcatggcaggagggagagtgctgagctaaagccctgccttctgcgccttctccctcctgcacacccacccttgcctctgatgtgtgttctctgacgctggtcaatgcaacattgcccccacaacctgctctgcgggttggggacacatgttattccgtaatcatccagaaactttgccaaaccagctgactgggagccaccccacgtgtgacagcgacacagataaactgaagtgaaatctgtgatttaaaggagtggggggaaccaagcaaagaggagcacacgtctttgttattagcgttgtcgaggatggagacctcgcgcggccctatcgggacatgacagtttctcctttccgccctcggcagccacgcagctgtcggcggccccatagtgcacctcgccagggcagctctgggtggcagaaggatgtctcttttgggtccctagcccccataactggggtgtctgcagggaagctgcccagaaggtggggtgggggcccaaaggggcgctatagctcgccagcgccgcctgctggtcacaggccccactgcccagctgcttccgtcaggcgggctgagcaccgctgggaagtgaccgtgacaggagtcagcttctgctagggcctgggtcccctcagacccgacgaccctgtcccaggaagaccccaggatgccgtctgccccttagcctgctggcctaacaggagtccaggagtccctggaacacagtccccacctgggatttgcacctgctgccgaaacccagtactggccactcctcaagtcccccctctccatcctcccaggctgggcggggccagtggcgtcagccctacacggatggggaaatgagaccccgggggagcacaggagagcccatggcacacgactggcagcagggacaaaatgcagtgagctgtgggaatggggcagagaggtgggcaggttatgggggacagggcggcctccaaacaccaggatgacagctacattgtgttcagccatgctatgaaccaggcactatgctaagcagatcacacgatttgcaatacccatttctcagtcccatgaagaaagcgaggcatctcggttcactttgccctcacactgcactcaccccgtctcccaagtcgtttttcattgagtcgtccactctgctttcagtcatcccaaccctgcttctccccaccaccacaccagcttcctggccctagatgcctgcatctgccctcagcagcctccgctctggtccccccacaccttcctgtgccccgaaggcccatctcctcttcccagcccttcatgcacagatcagggagtaggccgtctctaacccagcaggcccacactgccccatcagtaatgtgcggggtagtgtctgtcatgaccagagtatgtctttgttctcgctgctcgtttgtagactgtcccagagcagggattgctatgcctggttccccacatcccaggtgcccggggcaggccttggcacaaagccagccccgtacagatctactgaataaaggaatgactgaatgatccccacaatctcagctcacagg

SEQ ID NO: 915031 - DNA, 4001 bp, Homo sapiens
gcgcgagggaccctaggggcaccatccctcgggcgggtgggcggccaccatcccctcagagcacctggtatatcgggttggggttcgcacccgcagggcactgcggggcggcgtccggtgactgggtggggtcgccgctgctctctccctcgctgggggcggcagcctcttgcctgcgcggaggcgactcagaaggcacgtccgccagcaggagggcgggcgccgcagggctctcggtggagatgcgctccacgatgctggacaggcagtctaggctcgacaccgccgcactcttcccgggcctgggttctgcgcggggagggctcggttagtaagcaggggtggggccgcgacaagcctcccacccccgggcccagtactttgagacagattggaaactgaggactttagttagagtccgggacaatccaaaagacagggagctacttgcttagtatttcatctcctgcaccacttcccaggacataggcgtgtgtgagtgggggtgggagcgtcctagatagaggccaggacagctccatgaaggaggaggagcgagcagggagaggcccggaatacccaccgctgggcgcctcgttgtagtaggcgccttcgtagcagttccgccgccgggcgccgctcggggggccgctgtagtccatctgcaaacagcaagggcgactgagtcaggcccgcgggacggctcgaggcccgaacaccaattcctgtagccgccccctccctaactctagcctaaggctctagttccgggcccagacctgtcctggttgggggggtaattacgggtgggtaggagatgaggtctgcaacatgcagggccaaaccaagggcggacagtcaccaaggggcgcaaatttacattttggaagtagggataagtagagaaaaagatcttcacgttcgcgctgcagtgttctaatagcgcccccaatggggcagctcgaacgcttgcccgcacacttccaaaacaggctaccccagtgacagctgcccaggacaagggggtcctctctctcgggaaggatcctggcccaaacctcccgcaaggccagctccccgccctcggaaacgcgtccctgatatcccgagcgccgccctaacttcctcacttcctggggtcccggccttaccatgccgtcggagcagttggagcgcgggctggacgcgtcggagtcgccgctgtagtgctcgccgccgcggcccgggggcagcgggcccggcgcatagaaggcggctgcggcgccagggggcgcggcgtcctggtcgcgcagcagagcctgcaggccctcgatatagcggatggcgttgcgcaggatctccaccttgggcaaccgctggtttggattgctcgacgtgcagcgcttgagtgtctcaaaggcctcatttactttgctcaggcggcgccgctcgcgcatggtggcggccttgcggcggtcggcgttggtggtcttgcgcttgcacgccttgcaggcccacagtaggcagcggcccgcctggtggtgcccgctgggcgcgcgcacatgctcgtcctcacgtgcgcccggggccgggtgcaccgccgcggggaagtgcgagtgctcttcgggtttcaggagcgcgcccacgtgcatcaggcgcgggtccaggtcttcgaagaagcgcaggtccggggagtcgaaacacgggtcgtcatagaagtcgtccgttgtggcaaaggagcagagagagccgtcgggggccgtcaggtctacgtcgcggagcggtggcgacagtagctccatatcctggcggtggcgcggcacggtcctggcttcgcccaacccaagcggcagagagtggccggaactttctgccgctcgggagccccggctgtagatagcaaagtgctggcagtctgaatgcccacccactgtcccccacccctccctctcctgtccggcctgatttgtggttaaggaaagcggcggcagcgccccagggcttcctcacccctagcttctcgccaggcgccctgggctatttatccgtagtagcctaaacgccccggagcccaggcgggcagctgggggagggggagtccgaggccaataggaacactgcggggcggggcttgggggggtccccggggtggccgcaggggcccgcagactggccagccagcccgcccctccacactggcgtgcgcgctaggtcccctaccgggcagggagggagggagcgaccggcagccctaggcggctgcacttggctctccggcacgccctttccaaacctctccaacacccgactgctgtatccgcgggaaacgctggctgcgcgcgctcacctctgagctgactttcaatactcctctgtcccctgatttgtgggggacccatgggtagagcggctgtagaaatcaggtcgtgagagatttggagagaggcaaggcattgggggcacagagctgaggagtgagaccgtgaaagagggaccgaaagaggctgagagacacgcagaaagcagaaagcttagagcgtcaggggcagagaaacgcacgagtgcaacaacaggcggagagaccccgagagttgaagtgggcgagcccgagacaaacgggtcgtagaggctctgatattccgccagtccccgacctgggagttgctcagcaggtcgtgggcccagtccttcttccctagacgcttagaaacccagctatggttgtacaggaatcggagattgctgctaaagcttcgcgccaatctctccaaactcggatcctgcccaggttaggaatcccctccatctaaatctgcacgtttccacagcaggggtgtccagtgccatgcctggggtctaggctgagctgcctcttcagctgggaagaaaacccttctgctcggggcttggctccgcctcactcgcggtgctgagtcaaggaaagtgcatttcgccaaggtgtcaaacttcaggacctggcctgagaacctgacctcatctcacctgaagtctccgagagtgcggtttgcagaccagttgagtgcagactccagagtttcccaactgtgtgattttgtggaagtcatgtctccttcctgagcctcagtttccagttatagatttggggatgacagtaatttcttggagtaattgtggtggggatgacagtctgaagagaccaaggatatggaagccctcaggcggtgatgtagggttattcgagcaaggggctttcagagttggatgctgtgtcccgcaggcttacaactcatctgtggtaccatgccctgacggagtgccacgagtctccaggccttagctgtgtctctttcctgcagcctcactggaaaggctggaaacaggaggaggcaaccaccccatgggatgtgggatatctggctcccatacaagcctcagcataccggccacccccatgggggtctctcagcctcttcctgaatctgcagttcacacagtcctctcagcactctggctaggaatctccgttggccatacatccctgcctggatctcccctcctggaaaccagaaatttaagcaggagtgatctttgtgcctttcccactaacttctggaaggcattctagctggccgttctgggccctaagaagtcctcccttcccacaaaactcagagggctctgttggggtcctaacttcttcacttctctgctgctggtagtggtgctgaaggtctcccttcatgaagtactcacctcgctttactccatagggcccacctgtatttgttcattcagtaaagtctacatcatggagcagcagtgacagtaactctaaatcctggcagaggcagcaaagtcctggcctcaccccacccaagctgcagggggtcacccggaaatccacatattgttaggtatccattatgtggcaggtaccagtccaagtgtggggctagagcaatgaacaaaaccaagactctgcttacatggcacttacattgtcaatgtaagcagggtgatagacaatgaacaaataagca

SEQ ID NO: 915032 - DNA, 4001 bp, Homo sapiens
caggagggagccagggagtccaggccagccaggcccacccctctgctctctgtcagggcccagcgtcctggggcaggcagtgtggaggtcaagggagcctggcctgcgggtcctctgggtacctagcaggctcaaggcactccagacagtaacccaagcaagcacgaatgtctggtcccctcttccctgaaggtctcaaaccgcgtcaggcccctcgagagctcctatggatcaacagtgtctggggagagccagagccccgggacagatgcagggctgcctaagaccctcagatggcccacctgatgcagagtcaaccattcaatctagtccaagcctgaactcttgggttctgggtctgtggggtgtccagaatcctggagtgggatgactgaggcttaggggtgcccctgcctgggctgctcagccagcaggtgtgaacaagggttcctgcctcccaagtcacagagggagagaaactgaggcaccggaagacctgcttctctcctccacaggactccacaggaatctggggcttgaaacttgggccttggttccctgccctgtagccctgataggttcacacatgaagggaaggttctcaatgcaccaaggagcaggatgtggccttagggactagagggagctcggggcaggggctgggctcgctgcattggtagacaggggcacaaaagggggccagagggtctggctagatgttccagggaggttctgagaagcggagtgggctgggaggcagtcagccagaacttcccctccccctcccactgcggtcccatccctccagaacccagcaccaggaggagtggtggccctgcaggaggggcaggggtcgtccaggaaaagacagggagttggttagatggaggagcagacctccaaaaccaatgtaggggtgggggcagaagaagatattatggggtgtatgtcaattccaccccagagggctcctttcggtcaagtgggggtgaggtcactctttgagggggcgaggtcagagaggcacagctccagggttggggggacatagtgctgaggagcctcagagggctggtgggatgcagttcacagcactagaagggtctcagagagcagaggtgaccggtggcagggatgtcagcttcaagaaggttccagccccaggagagcatgctagggaggggggtcccagccccaaacaggagagcagtcactaggcagcattgtggaaagcaggtggcagtctccaaggggatccaggctcgaaagtggtcctaccctcatggaagcacagtggggaggtcccagctcctagaagtcatgggggatggcgccaaccagaagggcacacagggggtcttggtctctaggcgggggtcacagattctgggaagcaggctggggtccagcctcaagaggtacggaaggtcctagaaggcacaccgggggtctgggccttgaatggggttgtatcccgcttggggttctggggaagcaaagtagagggtccccagactcgggaagtttgctgggggcgagagtgtcacaatttagggaaagttccgggtcctggaaggctcaaaggagtccggacctggaaggggacacagtcccaaggaagctgcgagttgaggagcggggagggggagcccaacttcagcggcggtgggtggtaaccgctgggggactcccagccccgggagcctgtcttggcgggctggtgccagcctgaaggagggtcccagccagaggaggcggaaacacagcgaggagccccagttcccggggagatcagccgggggttcccagcgccagagggtcgccgccgccagcccgcggtctctcaccttcgaagaagcgctgcagcgcctccgtctcgtccaccacctccatgtcccgcctgcccggcgcacactccagccgcggccccgctacagcccggcccgggggcgcggcatcgccggcgcggcccgcgcgacagtcccggctgggctccggctacggtcccgcccggtccgccgccgcgcttgccccccgcgcgtccctggcccggcccctgcccgccccacgcgccccgcccgccgcgcccagcgccccctgccggcccgcgccgcgcccagcccggccgcgggcaccacgctcccgactcctgcaggcggcgctcagcgctgggcagtcctaggcttgcggggcgcggggccgtcccgggtcgggggacgcgagaccgtcccaggcttgaggggcgcggggccttcccgggtcggggtgggggcgaagggccgcttggcctctgtggggtcgggactggaagggtgtgccctcgccgtcctcgccttcgtcttgcacgggacaagatgtcacgattccgaatccaaacctcagagacagcccccatccctctcgttagccacccacacaccccgctcagcaacaataacaacctgcatttagggaacgtgtgttatgtgccaggccacacaggcattatctcatgtactcctcacaggcaccttatcaaggagatgctgttgttacctgcattttacagatggggaaactgaggctcaatgcattaaggactgccaggaagccctgtcctgtggctgtgatgatggaaatgttccctgtgttgttcagtatggtagtcactggccacaagtgagcactggaaatgtgcctattgagactgaggaactgattttttcattttgtttaattgtaattaaacagttacgtgtggctgtggtattggacaatgcaggtctaaaagctccttttttttttgagatggagttcggctctgtcgcccaggctggagtgcaatggcgcgatctcagctcactgcaacatctgcctcctcggttcaagcgattctcctgcctcagcctccccagtaactgggattacaggcgccaccacgctgggctaacttgtatttttagtagagacggggtttcctcatgttggccaggctggtctcgaactcctgaccttaggtgatcagcccacgttggcctcccaaactgctgggattacaggcatgagccaccgctccccgccctgcctaagagtttcaaggtcattaaagttcagagccaaatcctggctgccccgggaatccgaactctcctttgccgtggccctgtctggtataatgaaacctggaggttctaactcgatataagtccaggataaagcggttgtccttgtgcccctgccttcacccttatgactgactgcctccacatctctgtcctgcccaacttgcacagcctctcgtctcactgatatccccttcagttctcccaaatcaccctttctgaaacatacatccgatcatgtcattcctttgcaaaactaagtttccctttgcactcaaaacaatatctgaatgtcttgctctggtttctcaggccccgcctctaccactggcctcagctcttcccctctctccattgctcactgaataacagccaccaagacctccttgccattgctcaaacatgcaaggcctacacctgccacagggccttggcacatgctattccatctgtttacaatgcttgtctccacatggctacttctttgtagcagttggtctcagctcaaatgtcatgtccccaaccagcctacctaaagcagttctccctacctaggcctttcttgctcaccatgtaaaagattcctatttagtttctgttattatccttcttgctctagaatggaagccctacgagggcaagatatttttctgtatcggtcactgctatagcttcaacaccaagaacatgacctggcacacagtaggtgctcaataaatgtgttgaatgaatgtatggtggcatcttcaaactaccgaatccagtcaggctccagtggctcacacctgtaatcccagcactttgggaggttgaggcaggaggattgcttgaggccaggagttcgagaccagcctgggcaacatggcaagaccctgtctctacaaaaaattaaaaaattaa

SEQ ID NO: 915033 - DNA, 4001 bp, Homo sapiens
attacaactgcactcccgttttacagatgagaaagcggaggcacagcggtgccctgatacggccaagagaagcactgtgggtaagcaggagagctaggaacagaccccagctgccctcgctggcgaatgcacagaaccattacatcatcctaccccgagacccaaccaagaggtacccacaccccgtggcagccggggctgaaggcctggagataggagaggaggccccacatactccagcacccaaggcaatgagagaaactgaggcccaggaaggtgctaggtccgtgaagaggaaggtgggaaggtaaggcaggctgcctgggtagggcggggccacccagttaatgattcagttaataatttctgctcccagttccttatcagggagggcaaagtccaagggtggcagccaatgagcagctctgctgggctgttacccagcagcctctgctgccagggccctccagtctgtaaccccttgggagttggtaattggggagtcaggcccccagggaaaaggccattctgccctcaaatgccctccttggctctacttaagaccccaaggagcactctgtccagccttccagtctcaggagagtccctgaggccaaagggttggtaactgcctgtttctcacccctgcactgaccccaggccctccagagaggtgctttctggggtgcgtcccccacccccgccgcctctgttcacatacccattgttgtcaccattgacccggagagcacttcctgcccaccccccacccctgccctgcactgggtgctggggacatggggatgagtcagaccccctactaccatttcctcccctgcctgggctcaggaaaccctgtgcctggccacccctcccatctacttactccctgggtgcaccagggacagacagagacaggctgacacgggccacagtgccacccccatcacgaagcccagctcagcccccggattcctgtccaggtgggagtcctctcttccaaatcatcaggtagtctctacctgggacctcctcctgccctctggaggcagagatgttggtccctgacaggtagccccctcaaccccaaggtactggtggcagagtagggagctgggggctaggtgtccactctggctaactctggccaactcccttctctctgagcctcagccagcgccattcccctccccttacccatcccacagccgggaagggtggctttcaaaccagtatcctggtgcttcaggggctgtgaggagcccagcccccattatccactgtatctgtcctatcaggagactatgagtttgtttgatggttaaaaaatcacattggaagcccctgctctggtccaacccacttacttaccctgggaggggaatgaggccagagaaggaagtcaccagtccagccacccatcagcttcagaaggggcgaaatcccaggcctccctcctccagccctggtggggctccagaggccgggcagaggcccactaaactccaagtggtctttccagcacctgctggaaggcgacttccctccatcctccaaggctccctgcacacccacctgctttctgggggacactggttgctcactcgagcctcatgtgcccctagaatctagggccagcaggcaccccttccaggctcggccattcatactctaacatgtctctccttcccagggctgggcagtgagcttcttcagagctgaggttcttctctgccaccccctcctgtcttgcaggtgaggaaaaaggacttaaagagggcaagagctctttgggggttccctgccaggcacagacggtcaccccactctcagtggtccagcctgcaccagaactctgaggtcctggcaggattctcagacactgccctgtcccgtgcctgccctggctctggagtccaaagcccccttataccatggcccggttacctgctggaagccagtgcatcctgcccggtgggtcccctctctgcaggccctgtgcccgccgatctgggctgccttgcctctctctaggggattagccgggcggtcacgggggcccggctgtaccagcctcgagggggccgctctgtcccggcctcccacctgaggtccaaagcgccttagcccccagcccaccaccggcacagggcaggacccagcacctatgcttggtgtgtgcccagggagggggaccacgtcaggtgagggggcgcgctgtgctgcagccccttcggtaaaaccctttcccagtctcccagcccagagccgagagcacagggactgctacccactgtccagagggatgaccaaggccaagtggggaccaggatgagagctcaggtgtccccagccccagccccgagtgtgacagcactcaagagtgacgcagccacggctcaaaagcacaacttcccgctccctcgcacttcacacactcacaagcacaccaggccctgccactcccaggccttctctcacacctacagtgggtcccccacatgggccttcccctcccaagtggcctggagaccctaggcctcaggggccacccacaccttcccccatcgcaggggctgggagctgtttccagcccagccctcctagacgggcagcctcacacccctcccctgctccccacagacattcttgagtctcctcttatctctctggagggagtagcgcagcctccccccgccaggccgctgcatggctaagccgtggcgtcagcccccaccccccaacccatggtcaggagggagccagggagtccaggccagccaggcccacccctctgctctctgtcagggcccagcgtcctggggcaggcagtgtggaggtcaagggagcctggcctgcgggtcctctgggtacctagcaggctcaaggcactccagacagtaacccaagcaagcacgaatgtctggtcccctcttccctgaaggtctcaaaccgcgtcaggcccctcgagagctcctatggatcaacagtgtctggggagagccagagccccgggacagatgcagggctgcctaagaccctcagatggcccacctgatgcagagtcaaccattcaatctagtccaagcctgaactcttgggttctgggtctgtggggtgtccagaatcctggagtgggatgactgaggcttaggggtgcccctgcctgggctgctcagccagcaggtgtgaacaagggttcctgcctcccaagtcacagagggagagaaactgaggcaccggaagacctgcttctctcctccacaggactccacaggaatctggggcttgaaacttgggccttggttccctgccctgtagccctgataggttcacacatgaagggaaggttctcaatgcaccaaggagcaggatgtggccttagggactagagggagctcggggcaggggctgggctcgctgcattggtagacaggggcacaaaagggggccagagggtctggctagatgttccagggaggttctgagaagcggagtgggctgggaggcagtcagccagaacttcccctccccctcccactgcggtcccatccctccagaacccagcaccaggaggagtggtggccctgcaggaggggcaggggtcgtccaggaaaagacagggagttggttagatggaggagcagacctccaaaaccaatgtaggggtgggggcagaagaagatattatggggtgtatgtcaattccaccccagagggctcctttcggtcaagtgggggtgaggtcactctttgagggggcgaggtcagagaggcacagctccagggttggggggacatagtgctgaggagcctcagagggctggtgggatgcagttcacagcactagaagggtctcagagagcagaggtgaccggtggcagggatgtcagcttcaagaaggttccagccccaggagagcatgctagggaggggggtcccagccccaaacaggagagcagtcactaggcagcattgtggaaagcaggtggcagtctcca

SEQ ID NO: 915034 - DNA, 4001 bp, Homo sapiens
atctgaagcctcactcagcctgaggccaggctctgccacagggtaactacaaggaatgatgacttccccagcacccacagttgtggaatgagggtgatgagacggttccagctgtttcagggaggagaattcaagtctctcttactgtcaattttaggccagaagagactttgtagggtctcatgtgagaaacacatctgtaaagtataagattgaggccctaaaggaagcaaggatcgcagaatctctggggcatatttcttttttccttcaccctgtcttatggtgttgagggcctgctatttcagtccaaccaacgaggaagtgttgaactagaacggcatgttacacttcttgttttctgcttaatccgcagtggctgcttctggttagacagttactaagggacacaggtttcatttagtttcaacaatggctgtgtctaggacctttcaccaaaatttaggttaaatatgcctaaggtctctagacttggttttctacatatgaagtacgtaatacccaaaactatttgttaaaacacgatgactgttttgacacggattagacaactatttttgtctaataagttgatttgttcagtcgataaatagtggagtgacgggaaaaaaaaaaactaggttaacaacagtagggacaaacccaatgggttaaaaatagcacaaatccattttagatcagtaaagttaaggctgaggatacagacaaaaataacagccactacttaggagacacctccttagcaatctacatccattatctcacttaatcttcactactaccctaagggggaggtattagcatcccaattacagaggtgaggaaattcaaacacataaaggccaactcactggcacactattataccaccagcagcgaagacggggctggaagtgaggtacctcgggctccaaagtcagggttcccttaaggtgatggaaattccatgtaaatactaatataggcctgtgtggtggctcacgcctgtaatcccagcactttgggaggcctaggcgggtgaatcacgaggtcaggagttcgagaccagcctggccaacgtggtgaaaccctgtctctactaaaaatacaaaaatgagccgggcatagtagcgggcgcctgtaatcccagctgctggggaggctgaggcaggagaaccgcttgaacccagaagaaggaggatgcagtgagccgagatcgcgccattgcactccagcttcggcgacaagagcaaaactccatatcaaaaaaaaaaaaaaaaaaaaaaaaaaagaatacagccaatactaggaaaagcgttatctttttaggagggtgactgatactgctgtaattgagacttagtaaggtgaacgcacagaaacttgcaaataacttctgccctaccctatatcccgggaaagtaaactaaaatgcacctccaggctgccggcacggaacaagtggtcaatatccatccgcggctgggccgccgcccccgcctccccgcatcttccccgcacacctgcacagccctccccttgcaaaaaacacctgcactaccaaaacccctaacaacccaagcggtcgtaagaaccatttcattgcaaccaggaggcgtcgaaggcaggagtctatgggaaaggaaggctgtgtttatcaggagcagcaggaacctggtggagaggtttcgaaagagtgtaggggaaccggcttcgctgagactcgagtaacgggaagggcagtggactgggattcgggaggcccaaggtggggtctgacgcccccgacaatatgaccttggctaggcgccttctttcctctgggcctcaattccctccaagccagggttgacctcggatgtgaaaagcgacgaagctggtgacagccaggtgatgagtgaccctgggggagcgggaagctaaccccagggtccccgcgggggacggtggtggggaggccagtaacgggtccgcgaagcaggaaggggcgggcgtgacgctgggggcgccgagggggtggggccccggaccaggggctctccagaggattcccgggctaggcctagcgtagggacccttagaatgggggagtcgggtcatgtgggggtcaggggtcacgtgaggctggagggggtcggggtcacgtgagaggggggtttaagaacaaagggggcgagggtagcgaggagcgcccctggacctcccatctcctctctctgcctcactcacccccatagcggcggcgacaacgctcagcttcttcttcacacacttgccggcagggaggcggcaacggcggtggctgcaacagcggcggcagcagagcggacggccctgcaacgcgcatgcgcctcgcagcttccccccccccccccgcccaaccgcgcgccctcgtaccgcgccggcgcagaaccggcgcagggcagcggtgagccggcgcgcaggtggagcgcccgctaggctggccgagggtctccgaccaggaggaggcgggagcgcggaggagcgtcgcgccgggaatgacgtgcggccagagcccgccccctcgcagggctgcgtctgtaactatggcaacggcggcgccaggcctggctgctcacccaggccgtgagtcgcgcgccgctgggggccgggtggttggcagcacctcccctgcggccagcgactccttggccccgcgcgtagcagccggcggcacagccaccttcccaggcggccaatcgcgtctcgacctctaaagtacctgcccctccagagccctagcgcgcgtagcggaagtctttggaaactttcccaccttccagatcttgactcttgaaattccttttctaaccagagtcctgttactcattcattcgtcttctaaccattcattccccctcattcattcacgttctcaataaaaattaactcgcatctacgcggtgctgagcccagggggcacagagaggagcgaggtgccatctcagcgccacacctcagggtttagaggggagacgggcacgtaagcactgtttaggagagagtggacagtgctgttagcgtgaacaccaggcatcccggaaagttttaatttcaacccatccccagcacaccggagtgacccgcacgtgacccgaatccaaaccgccgggggcgcttccgcagtgtgcacacctctgccaacctcccccagaatctccaggggtggagccagagtcttcacttcctagtgctccccaggtagggagcgaaaattagtgaaatgcttcaagacgaaaattagtgaaatgctgcccaacacttaagcttcatggactttttcaggttttgctcattattccatctttttgtttttttaagagacagggtctcgcggtcgcccaggctggagtgcagtggtgcaatcacagctcactgcagcctcgacctcctgggctcaagcgatcctcccgcctcagcctcctgagtagctgggactacaggtgtgcactaccatacgcagctcaatttttatttattttttgttgagatggggtctcactgtgttacacagactggtcccaaactcctgggcccaagcgatcctcccactttggcctcccaaagtgctaggattacaggcgtcagccactgtgcttagcctcattattccaactttagtgctcagtacagtggtggcctcaacaacatttatccagtgcctactgtatgctaggcactgttccaagcagcaaggaaaacaacaataagaaacagaataggcaccacccttgtatcctagaaggaggagaccgataatagatgaaataaataggtaatatacatagttagttaaatgatacaggctcggccgggcgcggtggctcacgcctgtaatcccagcactttgggaggtagaggcgggcggatcacgaggtcaggagatcgagaccatcctggctaacacagcgaaaccccgtctctactaaaaaaatacaaaaaattagccgggcagggtggcgggcacctgtagtcccagc

SEQ ID NO: 915035 - DNA, 4001 bp, Homo sapiens
ctgcttaatccgcagtggctgcttctggttagacagttactaagggacacaggtttcatttagtttcaacaatggctgtgtctaggacctttcaccaaaatttaggttaaatatgcctaaggtctctagacttggttttctacatatgaagtacgtaatacccaaaactatttgttaaaacacgatgactgttttgacacggattagacaactatttttgtctaataagttgatttgttcagtcgataaatagtggagtgacgggaaaaaaaaaaactaggttaacaacagtagggacaaacccaatgggttaaaaatagcacaaatccattttagatcagtaaagttaaggctgaggatacagacaaaaataacagccactacttaggagacacctccttagcaatctacatccattatctcacttaatcttcactactaccctaagggggaggtattagcatcccaattacagaggtgaggaaattcaaacacataaaggccaactcactggcacactattataccaccagcagcgaagacggggctggaagtgaggtacctcgggctccaaagtcagggttcccttaaggtgatggaaattccatgtaaatactaatataggcctgtgtggtggctcacgcctgtaatcccagcactttgggaggcctaggcgggtgaatcacgaggtcaggagttcgagaccagcctggccaacgtggtgaaaccctgtctctactaaaaatacaaaaatgagccgggcatagtagcgggcgcctgtaatcccagctgctggggaggctgaggcaggagaaccgcttgaacccagaagaaggaggatgcagtgagccgagatcgcgccattgcactccagcttcggcgacaagagcaaaactccatatcaaaaaaaaaaaaaaaaaaaaaaaaaaagaatacagccaatactaggaaaagcgttatctttttaggagggtgactgatactgctgtaattgagacttagtaaggtgaacgcacagaaacttgcaaataacttctgccctaccctatatcccgggaaagtaaactaaaatgcacctccaggctgccggcacggaacaagtggtcaatatccatccgcggctgggccgccgcccccgcctccccgcatcttccccgcacacctgcacagccctccccttgcaaaaaacacctgcactaccaaaacccctaacaacccaagcggtcgtaagaaccatttcattgcaaccaggaggcgtcgaaggcaggagtctatgggaaaggaaggctgtgtttatcaggagcagcaggaacctggtggagaggtttcgaaagagtgtaggggaaccggcttcgctgagactcgagtaacgggaagggcagtggactgggattcgggaggcccaaggtggggtctgacgcccccgacaatatgaccttggctaggcgccttctttcctctgggcctcaattccctccaagccagggttgacctcggatgtgaaaagcgacgaagctggtgacagccaggtgatgagtgaccctgggggagcgggaagctaaccccagggtccccgcgggggacggtggtggggaggccagtaacgggtccgcgaagcaggaaggggcgggcgtgacgctgggggcgccgagggggtggggccccggaccaggggctctccagaggattcccgggctaggcctagcgtagggacccttagaatgggggagtcgggtcatgtgggggtcaggggtcacgtgaggctggagggggtcggggtcacgtgagaggggggtttaagaacaaagggggcgagggtagcgaggagcgcccctggacctcccatctcctctctctgcctcactcacccccatagcggcggcgacaacgctcagcttcttcttcacacacttgccggcagggaggcggcaacggcggtggctgcaacagcggcggcagcagagcggacggccctgcaacgcgcatgcgcctcgcagcttccccccccccccccgcccaaccgcgcgccctcgtaccgcgccggcgcagaaccggcgcagggcagcggtgagccggcgcgcaggtggagcgcccgctaggctggccgagggtctccgaccaggaggaggcgggagcgcggaggagcgtcgcgccgggaatgacgtgcggccagagcccgccccctcgcagggctgcgtctgtaactatggcaacggcggcgccaggcctggctgctcacccaggccgtgagtcgcgcgccgctgggggccgggtggttggcagcacctcccctgcggccagcgactccttggccccgcgcgtagcagccggcggcacagccaccttcccaggcggccaatcgcgtctcgacctctaaagtacctgcccctccagagccctagcgcgcgtagcggaagtctttggaaactttcccaccttccagatcttgactcttgaaattccttttctaaccagagtcctgttactcattcattcgtcttctaaccattcattccccctcattcattcacgttctcaataaaaattaactcgcatctacgcggtgctgagcccagggggcacagagaggagcgaggtgccatctcagcgccacacctcagggtttagaggggagacgggcacgtaagcactgtttaggagagagtggacagtgctgttagcgtgaacaccaggcatcccggaaagttttaatttcaacccatccccagcacaccggagtgacccgcacgtgacccgaatccaaaccgccgggggcgcttccgcagtgtgcacacctctgccaacctcccccagaatctccaggggtggagccagagtcttcacttcctagtgctccccaggtagggagcgaaaattagtgaaatgcttcaagacgaaaattagtgaaatgctgcccaacacttaagcttcatggactttttcaggttttgctcattattccatctttttgtttttttaagagacagggtctcgcggtcgcccaggctggagtgcagtggtgcaatcacagctcactgcagcctcgacctcctgggctcaagcgatcctcccgcctcagcctcctgagtagctgggactacaggtgtgcactaccatacgcagctcaatttttatttattttttgttgagatggggtctcactgtgttacacagactggtcccaaactcctgggcccaagcgatcctcccactttggcctcccaaagtgctaggattacaggcgtcagccactgtgcttagcctcattattccaactttagtgctcagtacagtggtggcctcaacaacatttatccagtgcctactgtatgctaggcactgttccaagcagcaaggaaaacaacaataagaaacagaataggcaccacccttgtatcctagaaggaggagaccgataatagatgaaataaataggtaatatacatagttagttaaatgatacaggctcggccgggcgcggtggctcacgcctgtaatcccagcactttgggaggtagaggcgggcggatcacgaggtcaggagatcgagaccatcctggctaacacagcgaaaccccgtctctactaaaaaaatacaaaaaattagccgggcagggtggcgggcacctgtagtcccagctactcgggaggctgaggcaggagaatggcgtgaacccgggaggcggagcttgcagtgagccgagattgtgccactgcactccagcctgggcgacagagagagtctcaaaaaaaaaaaaaaatgatacaggctctagaaggaagaaaaagcagggagagagcacagggaaggtcaagatttatagttgtggcctggcgcagtgcctcacacctgtaatcccaacactttaggaggctgagatgggcggactgcttgagctcacgactttgagaccagcctgggcaacagagtaagatcctgtctctgcaaaaaaatttaaaaataaaaaaaaattagccaggcgtggtggcgtgtacttgtg

SEQ ID NO: 915036 - DNA, 4001 bp, Homo sapiens
tggaattctagtctgcaataaaaataatgaactactaatgcatgcaacaatctagatgaatctcaaaatcattattctgagtaaaagaagctagatacaaaagaacatatactatatgattccatttaaataagattctagaaaatgcaaatgaatctccagtgatataaaattggttagtgattgcccagtgacagagatggagggggatggggaataaactgcaaagggcataatggaatatttttgtagcatgatggaggaggtggtttgttcagcatagcatacgtctgtcataactctcaaattgtaggctttatagggatgcagtttattttatgtaaattatacttcactaaagctgattttaaaaaataacacccatttgaaagagtctgaatacagaaataaataccatggccattgttcttaaggagtttatgatcactcccccaatttccactgtttttcatggttagaagctggaggaatggcaatgattctttttggtttcattttgtcttatttgtaaaaaacaaatttatacctgcaagatgggataaaggtttaacttttggcagacagaatcagacactttgatcacttttccactaaatcacttagtcaaccatcatctaactttccctgacagaatatggtatctaagaaaattgctgattaaaacccaggcactgatgaacaaagaataacattcagttagatccaaagttacatgaagttgaaacatctctcaataagccaaccagatactttttgttacataaagttagggaagaaagacctactttttcaccccaagactggtgtaaagagacattaaaaaaaaaaaaaaagttgatgactaatatgtaatttcacacagagaagactgtcctcatgcatataaccaggtataatatgcttctcactgtgatattttaaacatgatttttaagatcaaatacgtaaaataaacttaccgaagaaatgatttgatgttttcagctttcatttcggataccagtttccaccgtatactttgatgatagcgcacagaagtggtcgtttctttgagaggcttaataaaccagcctaaggaaaaaaaatacacaaacatgcacacatacacacaaaatcactttgactttattaaaactagaagccacccctctgtccttccccccaaaaagcctttatctgacaagtagatcatggtgagctttaaaaaataatgtttatattaaatgcagaaaacctgtaaattctgatatgtaatataatttttagatgcttaaaaggagttttatttaagagaagctctttcattttctcacgttatgcatgaaggcatggcttttgttgttcttccctggatctctagtccctgacacatagggaacattccacaaatatttatttacgtatagagcagggttttgttttgctttgtttcgttttgctttgtttttaatgctgcccgtattagttgaaagttttgactcactaatgttgcttggaaataaaacgattttttttcatccctgcagacagtgacagctgtaggttgtctttagtgaactcagtgaacatttaataaatttgaatttcaagcacactttatctattagcaagcccaaaatacattccatctggtttctagttttgctgaaatgtgcagagtttatcatatctagcccagccggccagggctagcgcacagcccaatcccttccagctccaggatttctccctttatctctgcagagaatcacgagccccggagtcggggtagagtgttttgttcacttacccaccataaatcccatcaggaaagatgccagcgcagcagccaagcacatccaaaggtacagacggcccctggattccgccatggcttcttgaggaccgagcttggggcgcctgctacattcgcgagcttcggggctgcagagaaacagagagcgcgctggcaggaggctgtgagctctgggtggcctccgctgaccttcgcaaggccacgcctccgccctacccgctggggacctgtggtccccaggggccctcgatgggggaaaggaagccctgcagagggaggagacattcttcctgttggcgggcaacttccattctgtggatcccgcagtaacccggacatagtaggtggcgggagctgctgaaaacgtccctaattttttcctaaagaactctactgctgtttgccatgcccatcccccaaaatgcccagtttcggctcagaagtgaatttaagtattgcttttcctgatctattggttattcttcttccagattctctgctgtaatttcccactcgtcagactcggaaatgatttctggtcctgggtgctccgctgttaaagctgttaacatcactaataccgcaatcactgtcagcatcaaaatcgatgggattgcgtttttttgttcccctttacttaaacaaaactccacatttctgtaattctgtttccactcatttaactgaggtttttacctacctcactggaatgttttaggttcacattagtaaaagtaatcactgaaaggaccttgcactgccagtagttactgagagtctgttcttaatgctaaagctcagacaccaatttcccaaaatatggtgctttgacatgctaaaccgaagaagccagggggtctctctgaccatacccctctcttccagctcctctctctcaatcctttgtctctcccatagcacagaataaagctgttctctaaagttcccttatctgcctaaagtccagaactactaaaggcaaaaacaaacaaacaaaaaaaaaaagagtttctttcctgagttttcattaaccgaactaatatctcaggaagaaggactgcagtctgtcaatacaactggcagccttctgttacaaactctcgtctgccctgtagggccaacagactttgtcccaggccattgcatattcttcaagcccattgaatttccctaaaattcatttactaccctcttaaaattatacacacattctcatcttcctttcctctaaaaagatgggtatattatcatctgtacctcattggttattgggtaatcattctactacgattcccttatgctatgttattcataaatttgtaagccttttttttttctaatagtctgccttttgtgagttgattttccagcaaaacttcagagggtgaaggggaagctttccattgacccctacattagcaatggtccctgtcattcccctgtcctcaccatgctacattcatgaagcatttctctttaaagatgggtttgcaaaatagtggccattgtaaatagccttcatccaaccatctcatctcagagaaaaattttaggaatttatgattggcttcacgtatctaaccaaaagtagttttttcagccaaagcaaaactgctatgttgatttcaaagatggtagtatatctaggataaacttcacagcattgtctgcagccctgatagctttaggtaatgcacctttgctcctaacaagtgactggaagagtgaaatttatttttctgggacataacttttttttgtccttgtatttcaatggctatcaattgaacataattgttgataggtatgcctaataacttatttcttgaaacttttgtagcatacctggtacttaactttgaagcaaacctccttaatgaactgttgatttctaaatgtttgcatgcaatttaagtcccaactaacttcagctttttcagctactagcctgttagacattccttgactgactcctccagtgttttttattttagagagaaacatctttcaaaaaacattttcataacaaagtgagtttgttcccccttatatgcatacacacaacaccaaatatagggaattagaatagaattattcaaaaggttcaatatccagtgaagtaactaaacccctcaaatatggcttaagaaacattttccaagagcactcagaattatttttatgt

SEQ ID NO: 915037 - DNA, 4001 bp, Homo sapiens
tacaggtgcacgctgccacacccagctaatttttgtttttttgtattttagtagagatggggtttcaccgtgttgcccaggctggtcttgaactcctgaactcaggcaatccgcctgccttggccccgcaaagtgctaggattacaagcgtgagccaccacgcccatgcccagcctttttttttttttttttttttttaaatcagagtctcgatgtctcccaggctggagagtgcagtggtgcaatctcagctcactaccatctctgcctcccaggttcaagcagttcatctgcctgagcctccccagtagctgggattacaggcatgcaccaccatgtgtggctaattttgtattttgagtagagatggagtttcaccatgttggccaggctggccttgatctcctgacctcaggtgatctgcccacttcggcctcccaaagtgctgggattataggcgtgagccacagcgcccggcccctagtcagaatttttgatggaaaagaaatggcagggagagggccaacaggagggacttaagttgaatattcaaaactatttcacaggaggacttagacttctggaataccaaacctgaaaattgtactcaacccctttatttcctacagctcagagagggtcagggaggcatccgaggccacacagcccattggtgggacaacccgaaaacaccttgcctttcctgccccaccctggggcttggttccccactcaacactgcctcttctccttccccttcccctcacttcctccagtccactgcccagccccttcctcaccgaggcctcctgcactgggggactgccactcaccttggccccacgccctacacccccatatcgagtcagggcaatggtgccttcaagtttgatgccctgagtctgtagctccttaaagtcttcttccgcgccccggttggcatagacgaggaggccctagtcccaagagggggtgatccttagagctgggcccagcgaagtgtgggtggggaaggggggtggaagtttgcatggcaggagggagaatttagattctgttcccccacctcacccagagcttgtaagctccccaagaacagtcacccctcatttcctccatgtctgggtgccctgtaacagacctggccttgagcagagccactagtgtttgttgaatgactgatggaggaaaggagcagcgatggagtgtcccggtgagtaaattccggagggcgcgctgtgccccagttgaggcacgttccctgggtcagggtggggagaaccctgggtggaaccaagggagctgggccagagcagtagggggggttctgggcccacctgtggggttccagaaggagcataggcagcatagggttgtaccacatctggccccccttgctccccggtcacgttctcctcagtccggtggcaggagtggatgatgcccccagtggggcccactgttggaggggtggcagtatcatggctgggcccagcagctccccacccccgggcattcccaagactgggcaggacctcaccgatgtccacgacgttgggctgctcctggctagggaaggacagcagcacttcgtacgtggaggcctcggccgagtccaggcctgactctgggtccttccagcgctgcagcagcagctgcaccaggtcctcatcccgagggctggaggccaggtgtggctccctggagagttctctgcagggtgggcagagggaggggcagggccagcatcagggagggggcctctggcaaacggaggagcagatggccccacttctcacctgaggttctcccggatcctgtgggcatccagctgccccatgacggtctccaggatctccaggtccaggtcctggggggccagtgagttggcttttttggggatggcaaagtggccgaggatgatccccagccccaagagggcagcagcccccagccccagccccaacaccttcgtccactgcatcctgcggactcttggccagctggggtaggactggtctataggttattccctatagagggggtgttgtgcctggttaaacattaccccatgggtggcactgccctttgacccccagctggcagggagagtgagggaacatcccgcagtgagagccaggagccatccacatccaccacatcctgcaccatttgcctggaatggctctccaagggcagcaaggtcacccagggacactgaagccgagagggaaggggctcatccagggtgtcccaggaaaacagaggccaagccagggctggaactcagagctcctgtgttcacagcagggccgtgcccactgcccaccctcactgcctctgcctccctccaaggcagccgatctacagcatacccagccctacctgcctgagcagattttgagttgagatcccccttcttgctggacgtaagctgtgtgaccttgggcaatccactcagcttctctacacctgttttcttttttttttttctagactgtgtcttccactgacacccaggctggagtccagtggtgtgatctcggctcactgcaacctccacctcccgggctcaagtgattctcctgcatcggcctcccgagtagctgggattacgggtgtgcaccaccatgtccagctaatttttgtatttttagtagagatggggtttcaccatgttggccaggctggtctcaaactcctgatctcaggtgatcacccgcctcagcctcccaaagtgctgggatgacaggagtgagccaccgtgccggctatggtgtcattttcattaaacaatatggcatctgtagaaatagctagtgcagtgtctgacatgtagtgggagctcatcaattttaactactcatccctcatctgactctggaaaatgtaaggcctagagctaaaggaagaaggaggacccagaagaactctctgtgtctatcctgaagggagcccagcgatacgaggaatgggagtcctgggaagggaggctgtcccagaggaggcagcaggggaagcccatgcctccctggcgaggtgacttcctcttctatcccctggctctgcctggactccgtcatccaccctcctatttatccatccacccatccctccattcacttattcattccttcctttatacatgcaagcactgttcattctgtgctatactagagccatgcaaggctgtggggaagcaaaatccagcaggcgaggcagacaggctttaggttcagccatgtggtaagtgccctgtagagggaggatcaccatgctcccagtgaaagagtgaggagttctgactaggagggaacatctgagggggtcctccaaggctgaaaaggtgttccagcatttgcaagggctgagagggaagtgagaccccaagtatgccatacacatactgagcctcttccagacctcacggagagccaggaggggctgggggggtccctagggacttgagctgggacttctcccaccctcccatggcctatcctgccttgactctgcctcgcaggttgcagcccatggatgggctcaaagatgcctgcagagcttgggggctggatcagggcagagcgtgtgtgtgtgtgtgtgtgtgtgtgcacgtgcatgtgtgtgtgtgtgatttcacagacccctctcagagcagcctccttcctgctcacaaccccattttgctggcaccaccatctcttgtgctgctggtgaggaggttcagcatgggaggactaggggtggctgggaagggatgtcatgtgatcagtgacttcagggaggtgcaccaggaagccacagttcttggcaacgtgattatcgacgcccagaatatgaccttggatcttatcagaagcccatcggtgcagggagcatacaccttccttatgaggacacaggacagtcaccaccaggtggggagtgggatgccaaggtcagctgataagttgagggactgaggcagcaaccccatggtcctaccccacccactcctggaa

SEQ ID NO: 915038 - DNA, 4001 bp, Homo sapiens
ccatatttccagctctggtccaagcctgtatcttgctcctctgtttttggcaatttcaatacctgtaagtacagagagaaaaagaaaatggagcaatttcagcacctatacactcaaagacagatgaaacaacctgctgcagtaggtaggataaaaaaaaaaacaaacaacaaacaaaaatgctctgtgccttcccagacgggatgcagtcaggcttcctgttgacagcatggcagcagagggcagcatacacctgtatacacctgtatacacgagtacgcctgcacctgcttatacttgcatatacctgcttatatctgcaggaaatgagaaacagggagggcttgcaggtctgacccttagcaccatggaggaggcggaggaagaggaagaagtcagaccctggtagtttattaacaaggaaatgcccaacaccatctagaggaaaaaggacttagaggattacgatccagcagtggtgccactgtcaggcaccatcggcttactggtcttgggcagcagcttccaacaagcacctagggaggagaggctggcagagtggaaacttagttttggccaagccttcttcagttcaactagatttgctctgagcaaatgaggtgaaagcaggttgatatttaaaaaataaaaataaaaaaccactggctgcggtggctcatgcctggaatcccagcactttgggaggccaaggcaggtggatcacttgaggtcaggagttcgaggccagcatggccaccatggtgaaaccttgtctctactaaaaatacagaaattggccatgcatggtggcagacgcctgtaatcccagctactcaggaggctgaggcaggagaatcgcttgagcccaggaggcagagactgcagtgagccaagatgacaccactgcactccagccagggcaacagagtgacagtccatgtcaaataataataatcataataataatccagggcacatactgattagatgccatctcttgaaacattctgtttctattgttcctggcaaaggctcttgcagtcagcagaccagtgcaagacaagctgcaacctgactacacctgcaggcttgcccatttaggtgcaggtgtaatagtttaacttttcatcctccacggtgcgtccatatgaacgaaaattagatggtgacctttcaacaaccacaccctatcttcgaggccaccacgcccggctgatttttgtatttttagtagagacggtgtttcaccatgatggccaggctggtcttgaactcctgacctcaggtgacttccaccccctccggcccccccaaaatgctgggatgacaggcgtctttttctacttccctttctgggacgccttctcccaccaggaaggcccacggggaccagagaccatcaatctctggcctctgcacaccatccccgccagtgcgcagccattctgttcaacttagatatctccgagaatgggcagctcagtcccaaccacgggaccccagagatatcagaacacgggtccatccccaggcctcccgcctaagccgccagacttttcttaaccgtgccttgtatatcgctcgtccccgggaactataaacactcacttcccgacgaggacctgagcacgtaccactggcggggtcattgcccattatctcacctgatcccatgcccagggccgagagtttcccagggcaaggctgtgagcacgccacgggcaagcctgggcccagccacggtgcccgtgcgccaccccaaaccggtgcccccgccgccccagactcactctttaaaattctttgcaaattgccctcgaagtccagggcccactggttgagtgcgcaggtggccacggtcaccttccggcccatcctggccgcagtcgcttgggcaggaggccagcgggggacagcaagaccagggtcccagcgaggtaggcggctgggacgccggaccttccgggttgcccggccccgccccctccccgcccatccgttgaggctccggccaaggaggactgcggcgtcaggccctgcctacggatcgccccgccccgtctgaggagctcacgaccgcgcctgcgcagcgaggtggcctcagcgttcacggcaccgcgaagggccccgcccccgccccggctccacccacgtcccaggccccggccccggcccggcccttgcgggcaaacccgttcaggtgcacaggtgcagggggctcaccgcccagctgcagcacccctctattttatcccacaccgccaccccacatccagcttagccatgttttattttaatacggcatgaaacgttccaaatacaccaaaagtggagagtacggtaggagcgctccatcgtgcccgcgggacagcagacgatagcaatcgattctccgtgctgggaatcccgccaccctgggcggatggcgctgaattcttgggaaccctctcctgcccctttcactcctgtaccacgtgtgtaagtagctcaggtagcgcactgtttgccttttctgaaactacaggaactgcacttgaatgtgcttctgcaacttgattttttcccctgtaatatgagatacgttcttttaattatttttctgcagtttggtattccatagtggcagtaaagcaggtttattcaatagcggatgggcattgacgttattagcagcgttttgccaacagacgcacgcacacaggcactgctgcaatttcctttccggcaaggtttccttcgtgacctcgttccgccagttcctgcagcagctttgcagagtagtagggttcgtgctgtttgactttactaaatattgccaagtctcttctccagggcgcttgcaccgattcactaccagcggtttctcactttttattttttcacatttcctctttagtccacccacggtagaatccatttttcccccatataaataactgcctcatcatcgttgcttgaagaggccatccttccttctgtcattcatgttagtttaaaaacacacaattcacaaatttggaaaaagagaaggctttatttcttgtaaacggtcgtagcctgcaaggtggcggccatctgtctgaggctgggaatctgtctccagccaaggccagagacaggcacgtccaaggaggaggggttggggcaggagcgctatgctgaagggattggctaaacatacatattcaacaggtaacaggaggagctatgaatattcatgaaggtggtcctgacacatgccctcttattgagcaaagcatgtaatatatgacccatgttcactttggggtggagacttaacatttacacatcttacaattagggcctttatggcaaaacgtcttttcaggacacaaaggcatgcaggtgcatcatctctctctattaacgggtcagctggtcggcatggtcagctggtcggtggtctcttattaggagaaagtcactgaaatcagtctcttgtccaatcacagctgctatggctggtgaaacagagtcagttagttggcacctagtggagctgcaattgttttaatattccctatcccaaggctagtgtgtgtttggctaatagagaaacagaaagccttgtggctcttagaatatagtttattctctaagtgtgggttgcctgacttaccctcgcctagcatggctttgggtcctgtttataatttggtatcttattgccacagagtccgttctgtcagtcttacgatctctgttttaacatgaatgccggccagttgtggtgtccaaactctgaaacagggggctattaccaggcgcatctgacctcccatcccatcatgtctgggaattcagtgttgaggtttttctggtgtccccttggtcaggagaaggtccctttggtcaatggggggcttaggattttatttttaccttatgtacatatacccgttttcacattttgaatcactttttttcctgtctataaagtagtgcttgttcatgacaatttggaaactccacaaaagcac

SEQ ID NO: 915039 - DNA, 4001 bp, Homo sapiens
atctttggattactttcccattctatcaccacgttgctttctctgaacttcattttacatttgcatattatttattccattagcaattgctcatcccagtctgaatctcaaaattctactataggaggcatttggcattctgtggaataagagaattttgagatggaaatgatcaaccagctcaaaacctcgtaagctagagttcagttaagcttagcacaatgatgaaaacaatttctcattaaaacttctttcattccctctacagaagcagtaaccctgggtacagttaaaactgcctgggtctttaagctttgtcacctcggacaagtcattatacctaacctcccagggcctcagcttccagagtagttaaatggaaaaacaatagcatctatctcaggttattagattatgaaatgagttaacacacgcaaacaggctgaaagagtccctggtgcgcagtgcaggtattagtcatttagaggtatagttactattacaggaaggtagtaacttagaaagacttacctttaaggtccaacaacctaatctacatatttgtatatttctaaggtaagagaatttttaaaagtctattttcaccccgtaaacctaatgcaggaggataaggcacgggttactacaggaaaaagtaatgcagactgggggatgcgaaccaaagcacagacgaatgtgccccgacgattcctccgagaacataatgaaatggcggaccttcctgccagaggagcgcacagtcacccaggcaggtgatgtgacacacacgttagggtctaaaggtcccaaggctggagtcccctttactggaccctaaacatgtctgcctcctgccccgcaatcagacttagagaactgtggacggtggaaagtcttatcatgaccaggccatccttcgctggggtgaacggaaagcattcagaaggggaaaattgaaaacaacaaagactctggtcaggtcaaaaaatacaaatgtgacctcttccaccatctctgaactgaaagaaaagcatggcactttcccatccataacatgtacaatttttttttttggagattttgcttttcccttgtgaaagacggttttaaatagtaaacagacttgctgcccaccttggctgggaaaccaagtcccgtgagtaactagtctaaggccactcaggccagtcctcggggagcgcacgccgcccagctcgctcccaccgcacagctcccaacagctaagaagcaacgccaaggactttcttccccgtcagacatgccctcggccacaccaaactgacatcaaaaccccagttagcccagcctgaccccacagaggctcacgatgacaaccgccctacggaaaaactcaaattcctaaacatctaataaagaagtcctggacgtctccaccttaaaaacgggaagcctgaacgctccggcgcgcccggccgtgtaaccgccacagcccccgcacgcggggcgggctgggctagcgggagatttgagcggccgccgcctctcgccgtcttcgcctcctccaaggggccgccgcccaggaggccgcccgcggcgcagaacaaagcgccttgaccttcagtgaggcgggcagccgggcgaggcgcgccgggagttgggaggggcctcccgccagcgccccaggcccgggctccaggccccaagccccaggccccgccgcggccgccgctgcctgccccgaccagaacgcggccccgcccctgccccaccgccccgaggcttccagagatggccgccgccgcgcccgcgccggacccgcggccccacccgcccgtccgggcccggccgccctccccagcgcgccgttaccggcccagcacccgtgtctccgcacctcacgcctcctgcggcagtggcggcgaccctagcttcgctcgctttggggctgcgccgccgtggcctccaacaacgccggctcccattggccgaggctcctagctcctctctccgcgagcaagacaggctgcgattcgccgagcgcggcgcaagtcaactgcgcttcgcgccgcagtcagcaaccaatcacaagcctccgaagaaacgccgcgccatatgcaaatattcctccgcgcggcgcgcgccctgcgttcctccgcctctttaaatggggcggggcaaggtggagaccgcgtgtgtggttccggggggtcccgggtccccgctcccgggaccttccccgggtggcaccacatcctcgcgggacactgggcaccacccctctccgtgggccccggccccagccgtctttatctcctgcgccctcccagttccctagttcaatcccgtccgcggcgggtcggtgcctccagcactccgtgcgcccgctgatgtgagaaccccacctcccatgtcgtcccctcgcgctactccttgagaacatcgcggagggcccctccgcctgggagccgttttcaaccagccccgttagtggttgggacgtaagcctaacccccgctcatcccccaggtcccaggttggagaacacttcctctgcgaagaggtcggggctgggtcacctccgcggacaggacgggactagccactgcctgcatctcttcccccacgccctgagccccgcagtgtcccagcagcctagttctggcctgcgggagaccctgtcggacaaggaggaaaagcagtgcgcactgggccctcagatcagccccctgaagcagagcagggcagagggctggggaggagctggcctgtttcgcccgccctgttctccctctcatggtgccctctgggctggggtgaaggtaccagccccagcctgtgcacatcacattttgtagaaaggcatccaatttgattggaaaataacccctacgctgggacttttgaggctggttcatttccatgttcaaccgtgccattgggggtcttcaagtctaatgtgcatttttttcagaaacgttctcttttgggatgacgttacttttgaaacaattgctaattattattattattagcaagttattcctgtaatggggaaaatttgaaaccatttaaaggctcctggttgagggattaagaacatagcgtcggttataaacctcagaggtaagctgggaggctgaggcaggaggattccttgagcccagaaattcaagtccagcctgggcaacatagtgaaacctcatctctaaaaagaaattaatgcggagcgccgtggctcaggcctgtaaacccagcactctgggaggcagaggcaacaagtccagcctgggcaacatagagcacccttcccctgctccaaaaacaacaacaacaaaaaattacccaggcgtggtggctcaggcctgtaataccagctacttgggaggctgaggtgggagaattacctgagcccgtgaggtcaaggctgcagtgagcagagattgggccactgcactccagcctgggtaaccagagggggacattgtctcaaaaagacaaaaaaaaggccgggcgcggtggctcaagcctgtaatcccagcactttgggaggccgaggtgggccgatcacgatgtcaggagatcgagaccatcctggctaacacggtgaaaccccgtctctactaaaaatacaaaaaaattagccgtgcattgtggcggacgccctagtcccagctactcgggaggctgaggcaggagaatggcgtgaacccgggaggcggagcttacagtgtgagccgagatcgcaccactgcactccagcctgggcgacagagcgagactccatctcaaaaaataaaaaataaaaaaaaaactaattaaaacaaaaaacataaaaacccctcagaggtgaccggtgcatggctgaggcctgacccacacagcgtgctcagtcctgtctggccatctgtgttttaggagagggtgtgtgtgctctcaattcctattttacttatttagactttcagacttttctacaaaggtcatgctttatgctttgcggaagcataaacaatgataga

SEQ ID NO: 915040 - DNA, 4001 bp, Homo sapiens
ttcaaaattggtatgtattttacacttatagcacatctcaatttggaccagacaaagttcaagtgctcagagccaaaagtggctggtagctaccatatcagacctcacaggactaaactgaaatcctctaacctgggcagcaggttctcttttcatctttgaattttctcttgactagcacacaaagtatcattaatgtatacccaatcaatagaccaacagacctatggaaagaatatggaactcaaagaggagcagattggtcataccgctaaaaagtaaaggatatgtgaggacaacagaaatcactgcaacggcaagccatgactgtgtcagtacaatcatgggtgacaaagcaagaacctactcaaaaaataagtatttattataacaacatctaccaggcttatgcctgtaatcccagcattttgggatgccgaaggaggaggactgcttgagtccaggagtttgagaccagcctgggcaatacagtgagactcatcttcacaaaaaacttaaaaaattatagagtgtggtggtgcatgcctatagtttcagctactctggaggccgaggcaggaggattgcttgagcctgggagatggaggttgtagtcatctgagatcacatcactgcgctccagtctgggtgacagagctagaccctgtctcaaaaaataaataaccacatcagtgtacttcagcaacctaataagaaacagtcaaacaccttgtttattctgcacctcttctatgtggagctgctgcaaataatataatcagcaagagaaacaatagcagctaacatttgtagactatgagccactgttctaaatatcttacttccattacctcatttaattttcaggactcagggacaattattatctctttccataagaggaaaataaggtgtagaacgcataaacgctatgcagagatttaaacctaagcagcttaactccagagctctttcaaactgctacattccagtctttctccgaattcattaaaaataaattacatgcagacccccacaataggcactgaggtcgctaaaagtttaaaaggcatggtttgaacaagtatttgctgtcagccatgtgtgaatacaaaggcaggtaagacacggtttctgctctcaaggagggaggtcaagacaaccactttataaacctggatattcattataagggataaagatagagaaagggggcttgttcatttacacttttggtatgattaacaagtttacaggtaataccctggaatcatgaaagcaaagttccagcgctttacagttatcggaacagttttgtgaaaagtaatggaaatcagaaaagtgcaaacccgcgacgcctacactttctaacttttccctgctggcggttgtgtctgacccgactgtaaaagaaaagctagatgtggatgtgccatataaaagtccctacaagaaaaaacccactcccttcccattcaccaacctggatcttaatgcgctccccactcgcgttctgagccccgagagcgtcccgcacgctcagtttggctgaaggtttgtgcttggggaagggggcggaggaacagaagcgcacggaccgcagcaggcagcggacccccagcatcccgcgtccgcccaggccctccgcgggagcagcccagaccccacggttcgaaccccgcctgcagcggccctcctttctcagctgctccccttccgcggccgcagctctgctctaaggcactccagagcccctcggctgcgcgctttctccttcaggactcccagctctgtccccacagaacctctccgcttcccacttcccaacggggcggaatggacaggacactaggcaaacgccagaaagaaaccacgtgcagttggcagctggggcgccccactacccgcgacaattgtaaacctacgaacagaacccgggccgcaacacgcgcaaccactcctaccacaccacgccaacgccgcttacgtcatcacgctacggggaagaagggagagcatgcgtacttgtgacccaggcttagggaggcgtgcgggagggggcggggtcaggagccgagacggggcggagctaatgccctaaggttgtagagattatcgctgaaagaacgtgggagcacatctgagggtcttcatttctaaagtttccaggtgaggctgagaaactgagaggcaaggagtgactgatggagagggaaaccgtctccatcagtcaacaatagggatccaagtaagaggaggctcttagctgttaacaggattcgcttgaagagatcagtcgttcctttcctgagtactccgcagagaaaaatcagacatagccccaatgcgcaagtcacagttgtgtggtatcagacagctaaacagacagttgcataaaagggcgatcagtttgcctgacagagcctaagcgtgggacgccagagatggcttcctggagaaagtagtcctctgacaggtaaataaaaggaactggagggaccttgcatatggcaggcaagacggtgggaagatgttgcagagactggaggaaactcgagtgtttcctgccagaatcctccaagtctccctcttccctctgccctccaacacagctatctgcatttgtttgacctggaaacaatgacccttttatatattaggctacgttttattaaaaaaaaaattctgtaactcaatgacggtcattaaaaggtttttaatctaatttaaaaagtaaaacgtttggccaagtgcggtggctcacgcctgtaatcccaactcttagggaggcagaagcaggaggattgcttcagcccaggagttcaagaccagcgctcgccctcgctgtctctctcccgctccctctcactctcactctctctctctcacttttaccttacttaaagttgctactattattatacccattttacaaatgagagaacttacgcacagaaaggctagatgacctacttaaggatacacattccctaagtgtgagatttaaacccagaagtgctggctctatgcacttaagcagtatgctgtattacatagtgtcccaaggtgatctgttccatcaaggagctcatgctttagagatggagacaagcaagaaaagagactactgaaatataaaccagtaagtgcacacatagatgtatgagttgtctgcatttgtttggactgaaaagtcacccttatatattaggctacctcttaaatttatccaaaaaattatttttgatattttatccaaatattatattggataaaatataatacaattataatatatacatgtatcacaattttatattttatataatataaatgtgttccctggttcttttaataaattaaaattataaatataataaaattataattataaattataatatataattaaattatattggatatattatatattatatacttataatataaaatatgttggataaaatataatatagtctagagaaggagaaaattaagctgaatttttgaagtggatcaatattttgccaggtaggcatgtaagaaaatttcctgccagaaggtgaacacggaaggttgccaggagggcaaatggcctggaaaaattgtaaaatcattcttaagacaggctagaaaatatctcatctgaaaatacttgatgttggaggtggaacctagtgagaagtgtttggatcatgaaggccttggtgccacccttgcaggagtgaattctcagtccattagtttttgcaaagctgattgttgaaaagagcctggcacccccctccctctctcttccttcctcttttgccatgtgatgtttgctcccctttgccttcctgaatggctgaatgacaacaaaccttgacattatttactttgagtggaagcagattctggtgcgatgcttcttgcacagcctgcagaactgtgcaaataaatgaatacacttcttatcgatcaaaaaaaatatataggccaggcgcagtggctcacgc

SEQ ID NO: 915041 - DNA, 4001 bp, Homo sapiens
tgcatacacataacagagggaaaaataaaaaagactggaaggaaataccaaagtataaagtagctacttctggatggtgggacttttattttgttcttttgtttttgtggaatcttaaaaaattcacgtgttactaataaagtcagggaaatcaataaccatcaatgaataattccatgatgtaatgtgtccaactgtttcctcattttagggaaaacgatattgaagcctttgtacagacagacctcaaaagttctcgccgggagtggtggttcatgcctgtaagcccagcactttgggaggccgaggcgggtggatcacctgaggtcaggaattcaagagtatggcgaaaccccgtctctactaaaaatacaaaacttagccgggagtggtagtggagctgcaggagaggctgaggcaagagaatcacttgaatccggtaggcggaagttgcagtgagccgagatggtgtgccattgcactccagcctaggcgacagagtgagactccgtctcaaaaaaaaaaaaaaaaaagttctgtgattacctacagtaaaatactgcatcatcccaataaatacatcaaaaaaaccatcagaaatatcactgtaaaagtaacatgctacttagatgtaaaagtgacatgctacttagaaactctggtacctactgcattataaacataaagctcatttactgaaacttaccataccttaactgtcccttctaaccttccaatccaaacagattttagcatatgtcttactataaaacactaagtcactgtcaaggaccccaatttatacgtaaaggagaaagtataaagaattcaaatatcccgaggcagaaaaacgacagacagaattcacactcaagtcttcctgactccaaagcctgagctcttcccagttcgccaatcttcccaacttgtaaaccttgtgttgccggccacataaagatcccgcaaaaatcaatcaacaactaattaatgggggctgccttttgctctagctactgtgggagccccagaagtagtaccacaaggcccttgacttcaagcttgcattcttcttgaagaaggtatttaagagaatgagatgaggaacaagaacacaggtaaaattagatgtaaaaaaaaaaaaaatagctatactgagggaccggtcagatgaaggaagggctgagattactatgggctgaagctgtcatggaaggcctggatggggaaggccttgaaggagatgattatttttcgctcactcattcgtctatctacacataacatctatgtggcaggcaccattttaggtgcactggcaaacaaaaccaagtcctgaatgtgactgctgaataaagagtataaaggaatgtgcacagtgaaggatttaagaacgtggaaggatctggaatcagattaccctaagtataatgcccagacctgcagccaggcactgcgggcaagctccacggaaaacaactgttgtcacccacccattcaccccgactccccagttacaggcactacttagaggtggttatcgagccacgcaaatccccgaggacgctcgagaagcacgcgccgagagcggctgcgtattggagaggtgattctgttatcttggagcgccccaaaagaggggtggaggacaaacggcgtaggccaggtatccgtccggatgcagagccttcatcctgaggccggtcccctctcgacccaggaagaacacagacaccgatcttggcatccatacccggccctcccgcgttgggtacctgcgccccgagcccgggggatcccagccagtggagaaggggaagcacgtgggagcacggaacaactccgaaagagaaggcacagctgactgcccctagcgtatgcctggtgtccgggtcacgtagtaagcctggctccgcggcacgcgtccctctcaggaactggtagacagcacgtgcgcaagcgcattaaagtcgcagagatggcgagcgagaagggaccttcctcaaggctgtcgctgagtaatgacgtaagccaccagaagcggagctgaggcctagatgtccactgcggttgcgcattttagtcccactgctcgcggtagctgggtgttggctgcggtttgcctcttcactcttcatatcccagctaaagtacctcggctaagaagggcaaaatagatgtccgcaccccagggcctgcccacgtaggtccagggttttcagcgtcagcctggttacgcgaaacgcgacggatccaacgatttgtgttcaatttaaccgatccccgttaagttgaggaaactcggccaacagacctattttattggtttcgcttggccctccacccccacagtactgatcttacagatgggaatcctgtaatctacccatgactgcggccgctgtactttgcaggctcccattaggcctgtatatggtcgtcaaatgaaattactccccctgggcttccagtgaactccaagaacatgactacagggacaacctatacatagtgttgcattcttgactttggggcagatcgctgaacttcaaaaaacattatcaactgcttgatgtttcctcctggataccgcaaatgtctgaatccaaaccccttccccagatacacttttaatgtcatcagcagcactacccatttaatccaacatccatcatgaaattttttagttcattcagcaaaatgtgaatatgcccacgcactattctgctcacaagggatagtgtccaaaatgttcctgcccctcgtggttaattctaggttaagttttaaatgctattaagcagaagtatccagtgagtaaagtgactaaggatactattttagaaacgaacactgaaggcctctgacggggtgacactggatggaacaaggacctgaaatttagaaagaatgagccctgagaatatgagtgaaaaacttccccgtgccaaagatgtacatacaaaagctccaagatgggggagtcctggcaaagcagtcagtgtggccaaagcagtgggcaagtgaaggaccagatttagaatttaattctagtcatgatgagaaaccactggagtttgtgggggacagggaaatgagaaaatctgctttgccctcttaaaaggcttcctgttatgcaaaaactaaatcacaggaaggcaaaagtagaaaaaggagaacaattataagctattgtagtcacctgtgctaggatggtagttgtggtagtagttagaagtataagataactctggatattcaagttagaaccacgtggactcacttaaggattagatgcaggttataaaagtacattgaagatggcacccaaaacatttgctctgagcaactggatgaatgaacaactggtgttgggtaatcaaggagttgacttggaatattgagaaattcatatcaagatgttgaatatgagttttgagaggtttggggcctagaaatattcaggactaaaatgctgatcatattcaaaatcatgggattggatcagatcacccagggaagaacacagctagagatgaagtctgacatccaagacctggagaaatcagcaaaggatactgagtagtgaccagtgagatagggaatccatagaatccattcactaccaccaccccatccgcaccttaagttggaatccatttctcacatgggccactccaacaagcctccttaccatctcttggtccatatatgttgttcattgcattgaatgttctttaaatggtaactttattaagtgagccaccaaccccaccccaaacaatacagcctttttttttttttttttttttttttttttttttttttttttgtgagacgaagtctcgctctgtcgcccaggctggaatgcagtggcgcgatctctgctcactgcaaccttcacttcccgggttcaagcgattcttctgcctcagcctctcaaatagctgagactacaggcgcatgccacaacgcctggctacttttttatttttaatagagac

SEQ ID NO: 915042 - DNA, 4001 bp, Homo sapiens
tactctgttaagccttattttgccagcacaagtgagagctcacccaagcatggagactcattaaaatggatcttacatatatcattataaatttaataatcgccatgacggctagagttcaagttaaaatgaatgtcagctgagcatgaccaattgatgttaccccagctgccgcagagcctcacttggggttatattctacttccagaggctccatagtacatgtggacccaacacagccagagccaagaacagatgggaaatgcagacatctacacctagccaaaaagaagccatcataattgcatattatcttgctgtaccagcccaattaaaattgtctacagtgtcagaggtcccaaatgttcctccactaagtgtctggataccaaacttggctaatacttagtcaaatgcaatcaatcctgggttctgttcacaactattattgatttttctcctatctctctgaaagcttccgtagaaataggagtagacaggtctagtaggttatacacttaataaatcaaacaccacaaaacaaatcccacttatctaggttcccaagatagtgggcattcttcccaaattatagcgacagcagtttcagaaattgaattttttgttaggaatggagtcaatatttataaaatgtttatttttgattatttttatccttggaaagtcagagaaaatgcaatacaaaatcctttttcatacacacacacacacacacacacacacacactcacagagagagccacataaaatcatagggaagagtcagaaggacagttttcatctccatgtgtatttcacactgggaagagtcaatctttgagactcaggaggagagggatacccacaccactctgaaagaacatcagaagtcttttttttttttttttttttttttttttttaccatacacaacatttcaaaggaaatgtcagaaattattttcagttcaacaaaaatttggactctgctagagatttatttaacccttgccacgccccgttcttagctatgccccaagagtgagaagatgtagcttcaactttcttcctagacaaccaaccaccctatgctactccacaacgcgtctgccttttaaagacaagttgaactttaactggtagacacaggtcctgggtgactgcagctttcagaccaatgacagcaaatgacctacactcaacaggccattttaaatggctgtgacattctcacagatagggccaaagagtgcagtagaatatgtttttgatccataaacacaagagccagacaaccacacagagaataattcaaacaaaacctccgctgtcaggagcaacatttccagaaggtgctaagagtgtgtgaatcccgaagggggcttcagtacaaagaaactcatattggattttgagaacaccaacattttttgttaactccctcagttaacgcttataaatctttgcctttttggctgccaggactgaattttttttcccttttctttatctttcttcttgcctaccagtaagtcaagacacccagcatcgagacatagcaaatctcaagccaccatgctacctccttccggagagaaagacagacaagcatgctcgatgatgaccacctatgctctctgaatcacacttagcaatcagcaccataatccaatcaaccaacaaagttctgccacttaccctcttttgatcttccagtccgtggataactggctttctcttctgctgttggctggactcagaaaccgattccatttcccagaaataaaatcctctctctccttcagcgatgcttccaaatccacagaggaacaaaataacccacacaaaagtgatgcatgcaacagccagacagagttcccgccagccaaggaaatcagcaccacctcttcaaaggtcttcctgtcttcttaaaatccactcgggaacctcactcggcaccactgcctttgcaatgagggtgactgctgccggcatcatgagagctaagtcttggggttttactttaggtctgagactcgcttcatgagagcccagaggacaaatctgggcaaagacaagtccatatcctgaggcacataccacattactgccccagaaaccctttccttcactgtctccttggcacagataatttatatgtcaataacaatgtaaatgggcatttaatccaccaagctgctaacatccacatccctctctggcagcccctgactcccataaatcactgcaaacactgcgcggaaagccgcccctcatggctcctgcaagcgttcatcacagcggtggctcccctcctgggctgtcatcttccttcatggtgtaagacccatacctgaggagaaaacgttcaacagtcagatttgtcttttgtagaaaagtacagatttgagctgtctttcccaccatctggagccacatagtgaggcctgaaccaagcagcagccgatgatcgttttccaagctcctctgagcacatccatggacaaggaaactccaggggcctcacgggctccccacttctcacgttctggaaataagcacaccggagctggaaatgagttatctttcaaacttccatggggtgcatgatcatcatcatcatcatcatcatcatcatcagaggaataaggcacgatagtatgaagagacagggaagcaatggtctgtgaagcacaaagcatcaatatttttcccccaattacagctgcaggaggcagtgtatggcaggcgagacaccagggtcctcagggagggtgagaaagagcagccgagattgtctcagggccgaaaagcaactgcctatggagccgcattccctgcctgggaatctgcagatagagcagacactcagtcacctcccggctgacgtcacagaagctcggagggacagggagggaggagagaggaagggacctctgcaccaagaaaaatattcacacttggtacaccctcccataaatagtccaagaggtggggacatatctgaggatcctaggaagatcatgcatcaacaagtaattatgaatgcctcctcccccaacaccagcaccatcaggaaggaaaggaatgggggctggggagctctttactaaaaggcactagtcttgccagcatttgtaatgaacgcactagccattctacaattcaggccatgccagcctccgggagagctgcggccagatccggccgcagcgggtactagacagaaacccacagaccctcccttgcagctgtcctgactggtggctactttggaataaggccgaagccatcccctatcacaaaaggcttccgcacagctcagtgccaaagcaggttaagaggcggacatgagactcggccacagagggcttgtgaggggggaggaggaggaggaggagaaggactagcagatgcttgggagagaagcagcagaggggatgtgacttcacaggtacatccctcttaattgaaggcttgtcccacacacgtgaaacactcggccagaacagatttctgcaagtgaattcccaagtcacagatgttctgaatttggtaagaatcagtgaggagcagaatgttcagaaggttatcttgtatacccaagagtgggtgacattatagacagaatgactgaagccctctgctgacccaggaagtagctgagcttttagaaaaaaagtagatactcgctttttgctcaccaccactatctccacagccccttcaagggatcctttgcaaaggtgaaacctcagaatcattcttttcagctgcagaccacaatgcaagtgaactctgacaaactggctatacgtattacccttttctgaatccaattgaaacctcaaactaaaagactcaggcagacctaggttcaaatctcaacactgcagcttcttgtgtgaccctgagccagtaacttaatcccaatctcagttttctcatctataaagtgaggagaatgataccacacaaaattggaaagatcaagatcaccta

SEQ ID NO: 915043 - DNA, 4001 bp, Homo sapiens
gcacacatgtgaacagctagcgccaatagctttggtcagcattaatatgctgggtgtagatcttctccctccaagactccatacattcagcgtcttaagaagcagacccagagttccagggcacagcctcagcagcccaaggccagctccaaggtcactggcctttcctgatttgaccttcacttgggatcaagtcttcctgaaccaggtacaaactaaagctccagcctgatcaatccagcagccccggagcctcaagatcacagaactcccagctaggtcctactgccaaagcagggctgcttcttaatacacagccctcttccttccagaaacaagctgaatccgagaagcccaggcaggctgtgctgctagcatcctgtgtatttcggtgagtcctccacaacaaagtacgcccttcatccagctgaagtcacatttaaaattaacaggtaaaaccattccgagctcagatgccaagcccacccaggaaggcatggtggtagagtgaacctgggttccaatcccagctttgcctcttatcagctgtgtaaccttaatcaagttatttaacctctcttggttcccactggtgattttcaaaattgaatgtaatctccctggctttgcaatgaaattgaatgacacaatgtctgctagatgcttggcatgtggtaggtggtcatgaacattgttttcttctccccttgtctggcttaaaaacagaaatgtgcttccctgggcagctctataggtcataaggtagcaagaaaagtccttatgcttaaacctcccatgccatctctcctggagcctagtttacacacacacacacacacacacacacacacacacacccagcaatttgctgtataaacacaaccacaagttcaccaggatccttaaattccaaacaaaacctccaactgcaagtctttttaatcagggccctctgaaccacaagcagcccttgcctggggccacactgcctttttccggctcacccctctgtactgcccccaccagctgaaaagtccggaataacgacttaagacagctaggtgatcaatacccagattttcgggctcagtagcctaatttgataagacggtttggaaaatattgacattacccaaatgtctaggtggacccaggacattcgggtaatgccccagtttcctctgaaaccatcaaggttagaatcaatgggggcggaagaggagaagaggtgaatttcctgaccagcaaccttgccccccgccccctcccacccccactcacacaccaccacatagctcacagtgatttaggcagctgcaccacaggctgctccaccaggcttttcaataccggccaaggaagacaaggcagtacatgcaccacacccaccccctggccccagaaattttagaaaatcgtcctaccttgtaaggttcctaggccagagcatttcactacattgcggcccttggagaacagcggacaaagaagctgaatgaatctcacaggatggcaagtcctttagccagctgagccagcccacactgggccagggaatcccaggcacccagcaactctgtaactaaaggactagctagcagggatcaccattccccaggccaggaaagaaatccgatcccccaacaaaattaacctctgaagtgctgaaggatcgagaggtcaggcctcagtgctggtatcaagtcagctgtgaaaagtttcagcaaagcaaaagctaacaccaaactctgaaaccattaccgtaaagcactgaatggaagggccctccatgtggtcccaggggagtttgcaacagcgggtcaaattgaagaaaatctaagaatgaaaaactactttaaatcctcacagactgcacagaaacattgcagaaagtctttccagccctaagtgctacttttaatgatgcaaaaatcattgactataacatttcttagctcattccattgacgtctgaaggcaaagcattcgattgaaaagattagcctacagagagaatttctgaacctaaaaaggaaatgatacctgtttgtacagttaacaacgacacacatacattatttccggtgatgtcaattttgatgcagtgccaacaaaaatatgcattaattccgcaggctacttatttcaaaagaaaaagaatctcagtctaggcatggctacattaaacattatggtacagaggctggaaggggaggtgggtgggagagagtcccagctctgggatgggaaggggttgcatggactaatccctattaaaacctgtaatcaaggcactcagaaagaactatgtaaacagatgctatgaacaatgaacaactgtattactactgagaactcaaaagcaaacttatgttatagccacaagctttatttgaaaacgaaggattaagatgttctccaaaaccctgactccctctccaaaaatcctaccagttggttcctggtagctttcaaagactttccccaagaaaggctctccccctggccagggtggcctctccagtggaagcagggagcgggggttgtggccctgggggatggttagggaaggaagcagtaactggctccaagcgaggtctctgtgtggtcagcatttgctcagcaaacagaagctttcaaaggggaatgaagagccattcctctcccactgaaaagggagggaataaaagatctgctcaaagaggagaggagggtctggtggtgattcccaggtgaatgaaaaaaagattgtaatctcgaaggagtcccaaccaaagttaatcattcacatctcatccttcagggccctcgtccacttgaaatactgctgaggcatctgccgtggggagtgggaagcagaggtgggggtgggcagtgggtgagtttgagggaaggagtagtgtccagatatattaagacaaaaaagttgggacagacccaagttctggctgacaaggatgcttcaaaccaccccttaccttctatgctgtccctggaactgactgtatctttacgatattacttctttgagaatctgtccaacatccgagttaacttgggaatgggatggtgattgtgtgtatggagacacacaggcacatgggcacagatgcacacacacgctctaaaaagtttccattgtttcctcgctctaggcaaacataataggtaaacattctgatttgtcatcaaggtaagctaggaaatgttgatgtattcatttattcattcatcaactaccatatttataaagcatctgcaatgtggcaagtgctgttctaagtgcagaagatacaagcagtcaacaaaatagaccaaaaatctcaactctaatggaacttagcttcagtggtagaactataaaataaatgagacaaaatgtaaattttacagtacattagcaataaatgctcgggagaacaacgtattgtaaagaagaagatgtgatttgtcaaggtggggtgtgggaaattttacatgggctggctatggcaggtctgctgagggcatggtttttattacaaatctaaaagaagtatgggagctgggtatctgaatacctggggataagggactttcaagagaggaaatggtcagtgcaaaggccctgagatagtatacgacttgcaatgcattccaagaatgagtggctggagcagtgagcggtgaaccaaagtggggtgaggagggggtcaggccagagagtccaagggtacagcgagagaggagagtgcctaaatggggccctgcaagtcagcgtaagcagcttgtcttttactctgagggagagaggatacattggaggtttaatagatggagtttcttctttttataaaagttcatgtaaatgtacaacactaaacatatcgttttgattacacatgatttttacaggggtgagtttattgtaggagacatagtgctttaaggaggtcttagttttctttctatggttaaaagaatcacacctttcatgttagaggctctgaattatttgcagc

SEQ ID NO: 915044 - DNA, 4001 bp, Homo sapiens
cctcacagaggcaggcccccggagcactggaggaaatcttgccttcctcccacacaccatcactcaaacctgtcagcttccaaaaatgtttagcaagtgcagcagcaaggggcatgcttatcagcctggtgtgggagcttaatctgctttgagggccttctccagcccagagttccaaaagtctgcttacaattagcttcagctccagttcccgcatcagaaagcctaggaacgtgttgagctctagcctctgatcagagaaagctccaggagaaggtggagatggtgtcagcagggaagtatgtgccaaaaaggtcagctggtctgttgccattttcctgacaccagccccaaaccacctcccctctggcttcccgcctctcctaaccggacagtcacatccgtcaggtcggcctgtccccaaaagtccctgctgactgactgccaagaaaatatagccccctcctaccagaagaagggggaaatggagcggggaggaccaagagaacctgattggcccttgctaatttctgtaaaagagattgcacggccagggcttgtctggatgcaggctctgtctggaaaggtaggagtcaccaattctcttcaagccatctcccatccccacgccccgtcactcgggctaccaacaccaggatctaccacccaggaaggaggggcttagcttcggccgccattctgaggcagccacctccacccccacccccaccgcaacagccagccaaggcgctaggagtctccagctgccggcctcagctggtgcactagtaccgcagtcccagcaccttgcccggaatcccgtcaccccgcaggatggggcagggacaggtcatcttcaagccaagggaagagcaggttcactgccacccgcgatccccttttcttcctggatcttacagccaggctagggggcgtcgaacccaatggggccttagatcattccttgtccggaacagaatctctgcggaaccgccagacagacacacagctgctgctgcggatactggcttcttggggccaagacctcaacatgcaggacctcacatttccagcgatgcacacgttttttgagaacatcccgacctttcctcctccccaggaagatgctgcagacgtgcccgccatcccaggtctcgaagagctcttaaggcaaacctccggcacccgggccacacccaccggccggcccactctcctcgcgcatcccccaacctgccggcctaaggggaatggttcccttccctggccacatggtagacccttctcccatccagccctttctcccacaccatcccgaaagaactattcatccatccttccagaacagtaccccggcaaacggcatctctcacctgggtatcgaacccgttttccaccgagccgctcttccgcagcgggagcccctcccccgctggctcctgcagcccctgcagcacctgcgatttcagggggatctggctaggataggtggtcttgctcacctccaccttgcttcccaacttcaggtagcagggctgggggcccgcccgggccgggggcacgtgcaggatgggcgcggcgctgtgcacgggtttgggcagtcccgacttcattttggaggcgaccaggatggccggcatcttctcccggggcttgggctttcccagcacgtccctggcagcggcggcgggggcgaccgctaaaggcagcgcgggtagcagagcaggcgccgggccttagcccacgaggcgcccaccaccagcggctaaaaaaaaaatccccaggtcggggaactcgaagcaatcgggcgagcgcgcctttggggtgccgggatgggaatgggggactggccacggcgctcagcgggtcccacctggacggatgctgccgccgggtctcacacctctcctgggtggcctttcaagagctctgggcgctcaggggctgccgcctcttgcaaatttcctcctgggaaacagaggcttggacgcccatattaacttgtcactgcatctccgaagtgaggaggcccctttggaagagacagaggcggcggcgacccacgagtcccgttccggaggctacgggtctgagccggcgagagaaagagcgagcagccaaggaaggaaaggagacagcagcgaaggaaggagagaagaagggcgcaagggtcccaagacgtctccaccgagaggcagctgccaccctgctcgcgagcaccgcagtgtcacccgcgacgcagcagaggtgcggcaagagcccccgaaaggtctctcttggggtgacagtcaccgctgcccagaaggcccccggactgagagcaccttagcgcctgcgggtctgcacatgctccgtgagctagatagaggcaaggctgtggccgtggggcgcgggcgccgggacgcgcggctggcgggccgggcagggctgcgctcgggagcggccgccgcgcttcccgggaaggctgcgctggctgcggggctcagcgcaggggaggacaggctgctgccggcgctgctgcggcgcgcgctgacagccggggccgccccggcgcgcccattggtccacggtgcgccaatcagcggccgcgggtctcactgcaaagagggtgtggcctaaactctggccgccgccgaaactctggggccgcgcttggccgcgagtacaaagcgggctggtggccgctttgcggcactgccccggccgcgcgcctcccggggggcccacacccctgcgttcctgaaacccttcttttgaaaaatgccctttcgaacgcaaccgtccgccccagagccacgcgggcacggctcgagggaagtttgtttcctttttcaaattgctccggtcaccttaacggtttgagtcttccggagtcacgcccgcagcctcgctgcccccatctggcttgggcagggccgaagctcgtctcccgctttaagagcgcgccagccatttctctgcctgctcttccaggccggctgggcggggggcctcccaacggcttcctctccagttttcaaaggctgcacatttcacttaactatttgaagtatttataggcaaatacaatacgcagggaagcttcccgccccgagacagctcctccacgcaacctaccacagactctgtaattagagtggcctgaagaagccgggagaggctccatgaccccggcaggctctggccaaaccttgctgcgtttcatggagcccctccctgtccgcgcctgggacgcactggccccaacaggttcctcgactcgaattcgctgtttgggttgctctgtggtttcctcgctgactgaaagtggatgagaataagaaggaaactgagagatgatcaggcaggccagccttcgcgatttatgaatgaggagcctcccaccctgtagaactgcttggattagaagtgggcaagttatttaagcttacatgcatgcttataaagcttctgttttcacatgtagtaaggtggaggcttgacgacatttacctaatgagctgttgtttggattaaatgagatggttggtgcatggcagtcatttagcacaagtacctggcaatgtaagagaccaataaaagctgggctttattttccctgttgttaaattactgctgctttcccccaaagtcatctctgtttataaactatttgtctttcttctttgtttccaggacactttgtgcccaccctatagcctgatcttcagtgctgatagcattgatttagaataactcagatgctattaactctgtccccctggaattcatgttaaacccgtaatccccagtgtgatggtattaggaggtggggaactttaggaggtaataaggtcaagacagtggagccctcatgataggattagcactcttattagaagagacaggagagagatgctttcttactgccttgtgaggacacagaaggcagtcttctgtggaccaggaagagggcccttaccaagaatctgataccgtgttggcatcctagtctcagactt

SEQ ID NO: 915045 - DNA, 4001 bp, Homo sapiens
ggcgggggaccggccgcagggcggggtttctcttggcggtgagtgagcgagaccgttaggctgaagcaccgggagactgtcctggcagctcctggccgccacccgcgccgcaataaaagcctctcgcggcttcccgcccagccagcttcgcactgattggtcgccgtgggagggacccgagttggctggaggcggcggccgagcgctgctcttgtgccgcccgcggagggggcgcactgggtgctccctggcccgccccgtgcgctccccaaccgggggtcggccgtccagggcaggtacaacggtacctggagctgcgaccgcgacacacagcccctccgcccggctttcctcgatcgcttcccagcacacgccccccgcccagaatgtccgcccaacccacccagctctctgcggcccctgcttttcttccttccctcccgtccatcagagccaaagcgcaaatccttgggtggaggtggggggatgacagctggaggggagggtgggcacgcacagaagaattttccagggaggccgggatggaaatagccaaaatgaaatgcacctccctgcacactgccgaggttctctgggcggcggcgcaacccccgccacccgcggcagcatcactactgtcttcctcccagctccctattgttcacactttgccaggatcgggaacctcgcccaaagaaaggagacagggcgaggtgtttcgggcggctacctgccattcttctcccgccccgtgcaacactgggcacgcggcgcgtgtaaagacacacgcgcgcacacgcgcgcgcacacaccaggcagccccaatcacgccctcctcgccctccgcccctccgcacttcctcctgtcaaaacgcggcgctcgaccctcccatccttcagtgctcgcggccgagggtaggctttgcaactaaccagcaatttggcaaatgaaaaactaacgtcatgtcgactggggtgcaacaacggtcacaccaacaacaacggccgtgcgattctgcccattttgccccattttgcaaaccgttattcttctggggcgggggaagcaaagcagcgatcctgactttattagacccaggaatataacgatctggggcggctgccctagccttattgttcactcttcccggagccggggctgacaagccacttccccctcggaatccgagcccgtgcggcggcaccacccgagccgcgacctcccccgccccgccgcccgcctttggggaaggagcgctgcccatcaccagcgcggccgctgagtccccaggagccggccggctctgctcccaccgccgcgggcgcacaaagtgggaagggcggacgcgccggaggggcgccgggcgctggcggctcggggaggcagccccgtgcagcgcagccctggagggagcggggttcggctgggcagcaagggcgacgcgctcctttcacagctaaacgaaaatgaccagccttagcagtccacgtaaaaccacccaaaataatagcgttcctcctaggagtaggaggaaggggtaattagcaaaccagattgagaattaaaaaaaaaaaaaatgtacctgcagttcccaggaaaaacaaagtccagatgagatccttagtttgcagcattgtaatctgctggctgggagggatgttcttgccgcggtaaattctgtgcccccccccctgcagcgagtgtggacggcggctgagcgacagacctaggggcagacaattgccaggctgagtatgattatttttgcagaattgtttcctgccagcggcagccgagctgcgttcacgcgctgatcggagaatgagtgacagtcccagcctcagcacactcgcaactcggagatccttgcgctggcccgggttcgttttgatggaactgggatgggagcgaggagcggggggcgggggtgagaacctcactgtgtccttccaccacgccggccacaaatagtgccgaacatcaaggaggtaagagagacaggggaggcagatgcggaagcctgcaaaacgcggcctggagcttttgggggagccgggctctttcacacgcagtctccctgggagagctgggatttcttttcacacttctaccctacgccttcgcaggcgctcctgctacccagccttccttaatcagcagtttgcatattttgataactagtaaataataaaagcaaaattttagatttggttaggtaaagttgtcaaatccctccatttcgattctaagatccttgcaacacaaggatagcccaggactttaagtgcgggaaattagaactttggagagggatgggggttgccgttgctgggtgttgtttggatattgtttgtttgtttgttttatcctaactgtgaagtttgctctcccacagagagacatacaacacccttcagcagatcccctgggaaggaggtgggaagagacttaagttagaagaaaactccgatgtttggaagagatttccagaaataacccgaagaaaatgttttcctgtttataaattctgaaatctgtggtctctttattaaaatagccaggcttttatataggtattatgatatagaagcgtcattaaataatattttcttacatggggacgtgaccttaattcttaaagatattaatgtataatattactgaggtaccaacacaataggctttaattaaaattccacccgtgttttcaaaagtagggggtggagaaagcggggtgaaaagaatcatgtctcagcacctgaaggcttgggtatgtaaggaactaatgtgagaaaggtgttctagatgtcaggttaacccattagcctagaacactgaaaccctctaacagaggaagtctgcataagttcaaaggcattaaagcactaatgttaccgggtactccgtttttcttcaaaggtcggcctccccactcctgtagcaggttttttgttttgttttgttttgttttgtttctgttttgtttttttgagatggagcctcgctctgtcgcccaggctgcagtgcagtggcgccatctctgctcactgcaacctctgctcccggttcaagcgattctgctgcctcagcctcctgagtagctgggattacaggcgcgcgccaccacgcccagctaatttttgtatttttagtagagacggtgtttcaccatgttggtcaggccggtctcgaactcctgacctcgtgatctgcccacctcagcctcccaaagtgctaggattacagccgtgagctaccgcacccagccgctgtagcagtttttaaaagtccatcctctactgtcaggacatccatccttattggacaggccccatctcttccccactttcctcctctataatagaccaagtgggccacaccagtacagtgtaattagcttggacccctgaaaagtatttcttcccccaagtaaatcttccacaacgtttactttgggctatttctctcattccaagtataaacaattcaaaagtacagaaaagtagaaagaactaaaaataaccccaaatcccacagattccagagatactcatagattttgtcttctgtatgtgcatatgatttttataattgacatattatagtagcaatttgaatcctgctgattttgcctaacatcagtataagcatttattcctctggatcattaaaaagcttttctagatatttttatagctatgtaatatttcttcatatggatgattttgcaatggtttccccatttttgcatatttatattgtttgtggagtttgataatataaataaggcttttttgaacatctttcaacaaatatttgcggagcaaccactgggtttagccctgtgctagatgcagtgaattatatacgtctttttttaatggttgctgtatttaagtgtctttgatttcagacttctgcttctaacatctaaaatcaccacattaaatattacagatttatgtaaatgaatgttatcagactctttccttaaaaaaga

SEQ ID NO: 915046 - DNA, 4001 bp, Homo sapiens
acataatgtgtataaaggccctaacaatgtgctagccacataaaaaacagtcaatagatggtatttattatttttgctatggatgagtgttaaaataatagatatgtaaaatgtaaaatgctacagagcttaatagggaatagtactgggggaggagggagaggaataagatgattcttcaattggacctgaatgtaagagttttgccaggcaaataaatgcagaaaagtgcctcccagcaagcacagtgtaacaaagcacacaaagggaaagaaattaaagtgtttctaaatgaacaaaattgttacagtgtttgcttgtgggtattagtatctgttcagcagttattatgtggcaagtacaaatttatctttacaaaaacccctgtgaggtagatattgtactccccatttgacagatcagaaaacaggggtttagcaaggataaacaacctgcacggtaatacatggatgctatggggtagagccaagggaacaatccaagtgtgtccgactccaaaggttatgctcttggaaaatcaaactggagagaatggcagctcttataaagcatgccaaggatgtggtcatttatttaggaaacaaaggggaaacattaaaggtgtacaggcttgacacattcaaagctgtgttttcaaaagtcgttctgcaaaagtgtgggggatgggctggcacagttaacatcagaaagcagctaaaatactcctgcaattgctcgaggctatgatgaaggcagcagcatcaggaatggagcggggctgccctgagacacctcagaggcaggacagtggtagtgggcatgaaaggggaagcagaaatgccatgactcctgggttggtggcttggatggtgccattagcaggctttgggaatcccattttcactcatgtgacgtttgatgatgtctgcatgtgagacatccagtggaacctatgaacatgaagttcaagaaataagtctggcggaagaaagagatttgcaatttaaaaccatcttaataggtaagaatagataggtgcacgaagacacgcacaggaagaaggggaaggccgagaaaacagatgcacaggcgctagaagagactggccaacattcgcttattctaagggtggcctggccggcttgagcccccacgggaaacctggctagccgcaatcctggcgtggcacggccctggggaccccaggcaccgccgacagccgggcgcccccaccccgcccccaccggcaccccggcccgggcttaggcatcgtcggggacgcataggaccctcgccctggcccccgggcctcccggctgcatctgctcaccgagtctaagatccagcggacaccagggctgcaggccgctaccaaggccccgcaacgccaccatgatcccagggcaccggctcgccgccgccgtgctcaactttcaaagctcgctcccgcgcgcgcgccgagtcgttcctgtggaccaatcacaacgtacagaatttcccactggccaaccaccgcgccgagccgtttccattcgctcaaccaatcaccggcgtcgtccgccgcacgctcagagaactgggcgggccgaaaagtggaagccaaacaaggctcctgcgggtgttccgctaattcgttcgagaaggagccagggcctgagttaaaccctaacagcgtttttcccgcctcgtttttcttcaatgggggaaaatctaaagggtatctgagatagggtacttccggtagtaactgtcacctttgccctcgtcaggcgacatttcgcgtgcgtgtcaaagggctgcctttcccgtcagcactcgaacagcgtaatatccgaatgtgaaaggcagcccaacgtgtatcgagctaaagtaataagggaaaagtagccgaaagcactccgagaagacaagacaactgcagttctgtagggactgcgcggcacgcgtgggcccagagcctgtcccagcgaggtagcagctgccatgccgaccgctggagcgccggccgcgctctccctgcgcatgcgcagcgagctctcctccgggctgccgggagtcccaggagcgttagggggtgcgcctgcgcgccgctgctccagcgcatccgggctggagctcgcccgccccctcccccgcccggagccgccgaagcgcctcggtgcgttgcaccgccggaggctgggcagctcgcagcgctgctcggcgctggaccccacccggcaggcgcaggccacccacacccggctctgtgcggctgccccccgcagcattgcacggccgaccctcgcccgcccactgccaccggccgcgggactggctgggactggctcggccgagggcactgctcctcggtgcattgctgctcgggcgccgcagcccgcagccgccagcctcccccggccgtgcccctcccccgtggagccggctgtccgtcggcgcccactgcccggcggcagcggcggagccaggcagccccgcggcggccgagcgcgctcgcgcatcgggccctctggccttctttacctagggcagcccgcgccccggtgcgagggagcggtccttaccgagacccgcccggcccggcggtgcgatgagcttcttcggcttcgggcagagcgtggaggtggaaatccttctgaacgatgcagagagtaggaagcgggccgagcacaagacggaggacgggaagaaggagaaatatttcctcttctacgacggggagacggtctccgggaaggtgagccttgccctcaagaaccccaacaagcggctggagcaccagggcatcaagatcgagttcatcgggcagatcggtgagtcgacccccgggaccccctcccccagcgccgacagccggccggggagcagggtgattcagggcccagctcctccggcgaggcctgtcacagtcgcttgtcaactgcagtctgaggcctggggttcagctacaagtcccgcccgtgggcgactccccctgcgttactgtcctccctgccaaaagtgacagcgcgctgccagggagatggggacggcgagggcgggaggaagcgccctgctgtgcctcgtgggatgggcaccttgcctatgggttctccccattgtctccggcatgcactcggctttgcttcttgtccccaggatttctgggtgaggtgctctggccatagcctgcaggtgggtttgttagggggagaccgctctgccaatactggctttcccatcgcccggccatctgcaactgccagacgcaaagtgaggctcgtccaccgagccccacttcccagagcccgcaccaacccgtttttctctttagatgtggtgtgagagagctaaccagttctctcttacctcacctcagccctgaactacctatgcttgtacatgtttccagaaagaagacccataatcttcagtctaaatctgactacctaggctgcgtttcttagacttctttattagaatgcaagttttcagttaccacattttctgtttaaagacaaagaaatggtgtttctaaaaaccacaattaagtgatcagagtttctcaatgctttaaacatgattattaatcattggaactagacagcgccaggcacagtggctgatgcctacaatcccagcactttgagaggctgaagtgggaggattgcttgaggccaggagttggagaccagcctgggcaatatagcaagacctgcctctacccccaaaaatttttttgtaattagctggtcgtggtggtgcttgccggtagtcctagctcctcggggggctaagatgggaggattgtttgaacccaggagttccaggcagcagtgagctgtgataacaccacagcactccagcctgggtgacaaccagcaagaccctgtctcaaaaaaataaacaaataaacaaataagaactagacagtaaaaggcagtaatggtaaagtgatttggggagctcccagtcaagactgggtcgtctccaattctaagccttatttagactcttgtgta

SEQ ID NO: 915047 - DNA, 4001 bp, Homo sapiens
gctggacgagccggaactagcttcctccaggagctgctgctgctgctgccgtcactgggcgccgccgcacagccaaacggcgttcctccctctccgcttccctgagaactcgcggcccttctccaccaccaccagcatccgcggggaccgagaccggacgaaagtggcggggacccaaggcccctgaggagggggcgccgggcccgggagggggcgcgggacgggcatgggaccgggtgggcgcggcggcagcccactggcgccacttcgagctcgaggagacccagactgatagagcgcggaggcgtttccagaccgcagcgacaggcgtttccagaccgcagtgacaggcgtttcaagtccgcagcgcggagacaagcgcaattttggctttccacttcaccgcccacacttcactcggaactgtcttattttcacattgcttattgcaaatgtatagaaatactattcactcgtttttatttccacttccctctcccatcgggcagccattctaaggtgtttaacatgtaatttttgttctctttaaggctgtatcttctgtttctcaaactgtggaaatggtattgcattgtatgtccactgtttacttggctctacgccttcaacatccgttcacgctgctcggcaagcagcaagggcgtggtgtgaagctgccgccaaggtctccacggtgaggtccacacgcggctctcctccacctgcagtgactcggggcgcccagagcgcgcctccgggattcctacattccacctccaccacccggcacccaggagcgtattttggccagcctagtaagggtcaagcagcatcttgttgtttaattgccattcttctagttagaaatgagtttaaatatctctacatacgcgtttcagccttttagtctcctgtttaagttaacgcagaacacgcccatacgagttcccaaaaaagcaagagaacgtttgaaggtcaccacaagatcaaaacactcccctccctctctcagtaaagacctaacttagcaaagccaggaggacccactgatatgcggatgaatgatttttccaatttaccgattccctgattttcttctctcctccggcccctcggatgatgcgagagaggcgccaaataccgaggcaccaaacgcgcgacatccaaggaagcaccgtttccgctctcacaggtgtcgaccctgcacagggcaggccttcaatgtaaacctgttgcatcggggactccgcttctcacaaaggagggacgcttgaaaatagagcccccaggccgggcgcgggggctcacgcctgtaatccccgcactttgggaggccgaggcggctggatcactaggtcaaggagaccatcttggctaacactgtgaaaccccgtctctactaaaagtacaaaaaattagccgggcatggtggcgggcgcctgtggtcccagctactcgggagtctgaggcaggagaatggcgtgaacctgggaggcggagcttgcagtgagccgagatcgcgccacttcactccagcctgggagacagagcgagactccgtctcaaaaaaaaaaaaaaaaaaaaaggagaagaaatagaaaagaaaatagagctctcagcccccaggaagttgaggtcccctggcgggatgctagggagccgacccgcgaggaccctctggcgccaggagcccccgccccagcccaccccagccgccccctaccttcggtcgtcagcgcccacagcagaatcaggagcgccgcgcacgtggaggcggcagccctccacgtcatcgccgcggctgctgttgtgtaatttttttcgccgagtgggagcaggcggcccggtagaaaccaagggcagggggagacctctgttgcgtaaagagttgacggagacacagccgggatttccagccggcgcttttgcacatcccacttcttcagatcccttcggcaactgcgaagtcgcctggatttcccaggttcgcactgcaggaagccaggcgcgtgaccagccccacccgcgccgcactttagcccgggggcgggcaccggccggggaatcctccctcgcctccgcccgcggcacgaggttgcgcggttacagccccggtgcctctcgcgagcggctctgcggtccaggactcggggcatcctctgggttcgcttagtaaattgagaccgggatccaagtggcccggggcgctgctctaaggaagatgctgaccgcagtcggtgattgcgagagcaggtgcacgcgtccagagcgacatcttaccgttggcgcgataaacttacattactttaaaaaccaaaaacaacaaaaatttagcattaagtcgaaaggcaaattaaatccccaggacaattcagttaaacgcctgaaggtggcccttaatttcccatttctactaatcaagaagtggcttgcgacctcctgaagcaaacccaaatattctcattcggtgattaagttttaccacctctacaccagtttttaaatcaatttaaccgcaaagttcagaacccaagtggcacagtaaatgtgtgtgcatttataacgcagaacctgcattctttccccagcaacctgcattccatttgtctcattgaccctactgcatttttccttcgcatcattaaaaaggatgtaatgtacagaaaagcacagacagacctaaactccaatgccaaccatgccatctgctgattataagacagtgggtaagtgacctcatatccccagcctgttcacatgtctctaaaactgagagagtaaaagcttcctttccagggttagagacactgtcactgactaagcaaatagtcacattctcacttatctgcagaacagagtgcatacagaaagagctcagaagtgaaagatgcgcagagtgcccacagtggcagcaactagctgaggggccttcagatcgcagccttccggaccaccgttataacaggtagagatatgcaaggttaagtccagctattgaatttttaaaacctaaattacacctcttctcaacctctgcctcctccaaggagccttacctgaggagacatccttgtctggtattagtgacatcattaaataacattcccaatggaggtatatgacgacttcttatacatgcccagaatagtgattcacaaagttgtgacacatacacatcaccctgtagaaattatcaaattactcttttggtaatttttactgttttggtaatttttttgtaccctttttactctaaagggtaaaaccggcaggtttctctatttatatttcattagaatgaaaagtcattacctgtgttttcgtttttaccaatatcatgtctatttgaacatcttttttttttttttttttttttttttttttttggtgagacagagtctcgttctgttgcccaggctggagtgcagtggcgtgatctcagctcactgcaacctctgcctcccaggttcaagagattattgtgcctcagcttcatcctcccaagtagctgggattgcaggtgcctgccaccacacccagctaatttttgtatttttagtagagacagagtttcaccatgttggccaggctggtcttgaactcctgacctcaagtgatccgcccacctcggcctcccaaagtgctgggatcacaggcgtgagccaccacacccggcctgaacatgtcttttaatacttttgccaactttccattcaaccctaaagcacacagcagatacctcacgatgcttctcaaacaaaataagcatatattctcaggaattatttatggaaaactctgactttctgtgttctttattggtgcacagcattgagacacggtattcaaatgctggttgacactgaggtcatttttatgacacattgcatccaacttgctgttggaatatcacatacaattttggaaccatattgtaacacatattgaaaatatccaacaagtaatcagaatggtaaataagggacattcactcaaagaca

SEQ ID NO: 915048 - DNA, 4001 bp, Homo sapiens
agatgactttttaaaatacagagctcatcactgcacccttgcagctctcaaaagcttacaaagttcctgactgcctagaaaataaattgccatgctctgctaaaatctcccttgcagttttatctaaacctgaacactcactcaatcatcaaacaccctccattcagaggtccttgcccccattagctcccactagccccacgggcctagaaagctgtctgtctctcagtcctgcctgataatcaaagttaacttcaaagacccctcttccaaagttcctctcctcttttccctctggaaatccatagagcttagcaaagctactgtggtggttattatcagaatagtcagtgtctctgataggaagccagtgacatactactgggaagtacagcacactggtttagagcctcctattcaaaccgtggtcctcagaccagcagcagcagtgtttgagcgcttgttgttaacatcaagttcctccccagacctcatgaatcaggatccgctttttttttttttttgagacagggtctcactttgttgcacaggttggagtgcaatggtgcaatctcggcttactgcaacctctgccttccaggctcaaacgaccctcctgcctcagcctccctcagcctgggaccacaggcgtgcaccaccacgcccggctaacttttgtatttttttgtagggacgggttttcgccctattgcccatactggtatcgaattcctgagctcaggcgatccgcccgccacggcctcccaaggcgctgggattacaggtgtgagccacctcgcgcagcccagaatccgaattttaacaagacacctatgctattcgtatgcacattaagtttgagaagcactggtgtccaatatccattcagaggtcaaaaaaaaaaaaaaccaagctctgctacttaatagccatatgaccttgggcaagctgctgttaatctgttaggctcggtttcctcgttgtgaataatacatccctaaaagtgttttaaggccgaaatgctatcaataatgcccacagtgtgagtagtgcatggcatggagtcatggctcatttgcgcacacagcacaacacgaactgaggagagtagtttcgggtccttcacagactcagttcctgcttcactgcacctcagtttcttcaagtgccaaatgacactctggctctgcttgattctaaagagctaatggggcgcggactccccggaaaggcgagatggggccagctaggcaaaaaggcacggaaaagcagagcacctcaggggggcctacggccgggccagtctgcagccctacgaccccttctcctcccagccgatcccggccgcgcagcactcaccagccgtcgcgatcggcctccgccggattaggttatcaatcaggccggagcagtagcccaagaagccgatgtagaggagccgcgggtcggtcagcttgggcgggggcaggctccgggcctcatccggcagaaaccgtaagggttctgggttccgccgtgcgatcatggtgacgccgtttccacttgaggcctggtctcagaccacgaactacaaggaaaaccacgacgaccactaccccggcctaagcggtcagctttctcctcctcctctgcgcgccggactcacgggcacggcgcagcgcggtgcagcgcccaaacgcttcccggtacgtgttgctgcgggaacccggcacgcgaagttccgggctactaagtttcactttgctcgtccgcccgcgctaattctctggtgggagtgggattcacgggcctggtaacgcggggtcgaggagtaccccaaacgagccaaactgggcgaagactaggagatactgattttcttttctcccaacttccccaaccagaattgcctctccctcccctgccccttctggaaagatttatcttttcatccaatacccacaaatgggcatgatgcgtagttttgataaacgtaattaattgaaattccataaaagctagttttcgttttctgagttttcagtcgttcattcgcatagacactccctccaaagcctaaaattaaggtctggccagcaacaaaagaatttagagaagcccaggactggatcgttttagtctattgttgaaattcagattcggaggcagcaccctaaaatgtttcacctctgggtcttcacgtcgttacacatggctgagtgaggaggtgttccctaaaggtttgagtaatgaggccaggcgccgtcactcacgcctgtaatcccatcactttgggaggctgaagtgagcggatcacttcaggagttcaagaccagcttggccaacatggtgaaatcccatctctacgaaaaatacaaaaaattagctgggcgtggtggcgggtgcctgtagtcccagctactgggaaggctgaggcagcataatcggctgctcgggaagctgaggggggagaatcgcttgaacctgggaggtggaggttgcagtgagccgagatcgcaccattgcattccagcctggtcaacaagagcgaaacttcgtctcaaaaagaaaaaaaaaaaggtttgagtaatgaaagaaggaatttataattctgttaagcaattttccagtctctgctgtcaggcctctcagccgaagctcaaccattgtaacccctgtgacttgcacatatgcgtccagatggcctgcgggagccaagaagtctggggcagccaaaaacccacaaaagaagtaaaacagccacttcctgccttaactgattaacaaacattccaccattgtgactggtccctgccctaccttaactgatcaaccatccttgtgacattcttcttctggacaataagtcttatgatctccccatcatgtaccttgtgaccccctcccctgctaacaatagataacaaccaccttttactgtaattttccattacctacctaaatcctataaagcaaccccttccccatctcccttcattgattctcttttcggactcagcccacttgcacccaagtgaataaacagccttgttgctcacacaaagcctgttggtggtctcttcacacggatgcatttgacatttggtgctatgacttggatcgggggaccttccttgggagatcaatcccctgtcctcccgctctttgctccgtgaggaagatctacctacgacctcgggtcctcagaccagcccaaggaacatctcaccaattttaaatcgggtaagtggcctctttctactctcttcttcaacctctttcactatccctcaacctctttctcctttcaatttcggcaccacccttcagtctctcccttcccttaatttcggttcctttccctgtctggtagagacagaggagacccgttttatctgtggacccaaaactctggcgctggtcatggactcgggaagactgtcttcccttgtgtttagtcactgcagggacgcctgcctgattattcacccacatttcagaggtgttcgatcactgcggggacacctgttttgatcttccaccttggtggcaagtaccacttcccctgggtggcaagtaccaccccccctctctccatgtctcaacctcctcctttctctaaacttacctttttactatgggcaaccttcagccctccattccttcttcttcctctcttagcctgtgttcttaaaaacttaaaacctcttcaactctcacctgacctaaaacctaagtgtcttattttcttctgcaacaccacttggccccaatacaaacttgataatggctctaaatggccagaaaagagcactttcgatttctccagcctacaagatctagataatttttgtcataaaatgggcaaatggtctgaggtgccctacatccaggcattttttacacttcgttccttccctaatctctgttcccagtgcgacttgccgcaaatcttccttctttccctcccgcctgtcccttcagtcccaacctgaagtgccggtgagtcttttgaatatttc

SEQ ID NO: 915049 - DNA, 4001 bp, Homo sapiens; identical to SEQ ID NO: 915048

SEQ ID NO: 915050 - DNA, 4001 bp, Homo sapiens
aaaccttctcagatctcccaactgacctcaaaacggttttgccgagttgggacgtccactgctgtcaagtcaaccagagatttgaactgtgcattggtgtgatccctgaggaaagtcagcactgggatgacgccatcaggatggatacagacctctaactcattgaagcaggacacctgcacacatgaaagtgaggggagagggaacaaagagctactgagggaacagctaacttcagctggagtcacctggtttaatgctgagagaaaagtccaagcttgggatggaggaatctgtagtttctttgaaacaagtctgcccactcccacatgccctgcgaacatggttctttcttgacccagacccaaataacattagtaagtattacctgaacttgttggacatacttgggcaagatttcagccacatactctccaaaagctgagagctgcttgtgggccacatcattccgtggtctgacagtggctggaaggaaaaggcatatttaaaaaagaaatggagaaggcaaaagccagccctgcatgcagtctcttaggcttgtaagggatgtcaaatccaggaaaggctccctgaagcaccttgagaaaggtgcatgtgaaaggtttcccttctagggaatacagtgatgaaaacttggggaaagtgccaccttaactacacggtcctcagaaagactcttactatagcagctggggtgttcacctcttctcaaaattactccacagttcttccctcacattgcctgcatttctgctaaagcagtagtctcagttctcctgtcagactaagagctgtttgaggatgggaactgaacttttgcctctctgtagctccttagcacgcaagtttataccaggttctcaagctaagaacttcagggcttgaagatccctcacagactctctctctccttaaaagtgtgtgtgtgtgtgtgtgtcaatgagaaaactgaggcccaggtgtgtgtgtgtgtgtgtgtgtgtgtgtgtgtgtgtgtgtgtgtgtcaatgagaaaacccaggaaaggagaaatgccaggtctcctaactcccagtccgtgtatcttgactgtaacataatatgtacatactcattcatgcaaccctaaaccactgagcaatcacacatcacaagctacagaataatggttaggtgtttctgcctctggcagcaggcaggcctactttgtcattcactaggtctttgaccctgggcagtttaattctttggactgtttcctgatctatagtaagaagagtaagatgctatctaccccataaggctgttgtgaggacgaaataagatcattcactaaaacgcttagcgaggttccaggcacacattaagcactcaattaacgctaggtactattattacagggctctgaggcctaaaggttatattgcttgctttcaaagagctgacagtttaatcagacaaaaaggggatgattgaaatggacaaggaacaatcagggccataacaggcctaagggcacagggagggctcgattctgcatgcagggtgaagaccactgcaagtcagatctccaagatttgccaggaggacgtagggaagggcatcctagggcaaggacaggcatctaaggggccccgccgatagttcagagaagagcgctgcccgcacatactcacggcgcgtgtcggccccggcgctctcccgcctcaccggcagcaacagaacggagggtcgcccagtccctgcacagggagataaaaggcacagacgcgcgggatgagccctgaggagctctctgcactgggcacgccgctgcgcctgaccccggtctcagctggctgcccgtgctcacccctggtcagcgccgaggcccccaagatcccgcgccaccacagcctggctaccgccgccgccgccatgttactcagatgcagactaggcagcggacggaaagacagcaggacacggagccccaagggcacggaccggaaacggaagtgtgcagcagatcttcttccgggcggacgtggagccggaagcggaggttccgggctccgggatgaaaggagggaacgcaggtgagaaagcgagacaggcaggtagggaaatcgtgaggtgagcgtggtcctagctccttgtggcagagcctagagagaaggcgaggacgctgaagaaccaggcgggtgagaggaggggagggggcgggcgttttgggttctacgctacacacccctcccccgctctctgagccaagcttttgacgagggcgggcgggcctgagcgggaagaacggtttccctggcgaccgtttccaagacgactcaaggtggagcggggacattgcacagggtgatgggcctcccagtgccccggcctgggggcggatggactcaagttctgggacgcagccatagggagtctttcgagcgagcggggaagtgtgggggaagcagctcagaagagagcaaatgtaagacccacggatatcccaggctaggcttcatatggagcgtcttaactccatgcgctgggaaggagaggacctggccactaggccggggccaggggtcctttttgtctgattctactgcccctgagcttcactagttttatgccccagttatttggttagtaaggcttttacgatcacaggcctctcccagccctttgctttcatatattgacctaaatcccaagtcttttgttaacattatggaaaggaattattccgtgttttctcaggaaaacacccagagttggaacttttatttatatcattagcggaggggcgccactggggataacgaacccagatttggttaaaggatagcgtcagggacatcatggacagggccaggactaaggccaatctggacccactttgctctcacttcttccttttccctccctgagttggacagttggattcacagactatggctgtgaattcctcaggttactcaagatggtgttgctttgcagacagctggcagagagagaagttggctagcatggaatcaccagaggagcctggagcatccatggatgagaactactttgtgaactacactttcaaagatcggtcacattcaggccgtgtggctcaaggcatcatgaaactgtgtctagaggaggagctctttgctgatgtcaccatttcggtggaaggccgggagtttcagctccatcggctggtcctctcagctcagagctgcttcttccgatccatgttcacttccaacctgaaggaggcccacaaccgggtgattgtgctgcaggatgtcagcgagtctgttttccagctcctggttgattatatctaccatgggactgtgaaacttcgagctgaggagttgcaggaaatttatgaggtgtcagacatgtatcagctgacatctctctttgaggaatgctctcggtttttggcccgcacagtgcaagtgggaaactgccttcaggtgatgtggctggcagatcggcacagtgatcctgagctctatacggctgccaagcactgtgccaagacccacctggcccagctgcagaatacagaggaatttctccacttgccccaccgcttactcacagatatcatctcgggtaagtttagggaggggacacaccatacccagttacttggctatgatgttcagtgaatgttctagtttaggagaaaagaaccctcaagcttcctggtgttagtttacattattattcctgcattcttactgagataacctgctgagaaagattgaggtgagattcagtgtaattgctgtcagagacacagtgcgttagaggaagaagtcaggaaaattaaagcacaacatttaaccacacagagtagtgaggagtgatttgtattatactctaatttatcctgtacttcgtatgtcccagtgggtctaattacctatgtaaattggtgatggggcaagatatctaagactaaaaacttttttagtgatgggccaacgttaggaaacaatcctaaccttgca

SEQ ID NO: 915051 - DNA, 4001 bp, Homo sapiens
ccagggactggcaataggcacaggtacccatggctcacacctggcaaccccctccccatcacacccagggagctctgagatcacacatgctaacctcggcaatgatggaccctgcccctgtgaatcagagtcagtctccatcaccataatcattttaaaagtggaaacaggctcagagaagaacgcccctgacaaagccaggactggaactcaggtctcttcccctactccagcaggaccagtcaggaacacctgaggctagaggccacccaggtactcactgtaggtggctgccactgcactgctgtggaggctccggccaccaggaggtcctgcaaaaagaagggcgtgacgtcataccaggagactggactcccctacccccagcaaaggcttctttggtcctacctgcacgtgcagcctgggccagggcccgcagcagcataggcgtggtcaggcagcgcatctggtggcataaaaagggatggagggtggggtgtgcccaagaaccatcctcttctgagactggcaccgcaaggatcccaagtctccactgacatgtgtcactttgccctctactcgcaccccattgctgtcagaggcacagatggctttcctgttcccagcgcctcccagctttccatctgattcagcttggctgagctacaattcagtttctgtggaccccaagttctgcctcacctaagaaaccttttaaatccatccttcctttctccctcccagagatcctgtttcccacctttctgctcctcccttcatcctccccaaatctaaccaaaaacaacattaccagcccccgccagcatgcactgagagcgaactttgttagctctcctcccccaggaaccgtgcccaggggtggaaagcgctgccatcctatccttacaaggactccacgagggaggcacaaataaggcgctgggactcagtttgttgagtgactcgctagggctgggtgtggtggctcacgcctgtaatcccagcactttgggaggctgaggcaggtggatcacctgaggtcaggagtttgagaccagcctggctaacatggtggaaccccgtccctaccaaaaaatacagaaattagccaggtgtggtggtgggcacttataatcccagctactcgggaggttgaggtaggagaatcgcttgaacccaggaggcagaagttgcagtgagcccagactgcaccactgccctccaacctgggcgacagagtgagaccttgtctcaaaaaaaagataaaaaagtgacttgtcggaagtcacacgataaggaggtgggccgaggatcggaacccagccctgccctgctggaaactcttcaaggcctgaacagtcctcggtaccacattcctttccccagcttcaaggccctcctggaactgtcccccagcctgccgcgtgaccttgggcagatgatgtgacctgacctccgtcttctcacctatgaagtgggttgggggcggttggtcttgggaattaggggagcccgtacatgccaagggcaccccagagcccggcacttagccggcgctcataagagctcatcccacgacctgtgaaccccctaacaggcccactcctttggatcactgactgcagttccagggacccaacccagcaccttccccaccttcccagtgatctccgaccctaactaggccggtggcgcagagcgggcggcgcatgcgccctgagagccggctccccgctgcacctgaaggacacggaggccgcggatcctgagtgagccgaggggaagcccaggcgcagagctggcggcgccaacggggacaccacactcgcccccgacgccacgctgcccaagcccgactttcacggccaaaacgtgaacacccaccttgaagcgccgccgctacttgccttgccaagcaggccagtcaatcgggaggcggaggctacactgtaggacgctgccattgggccagcgggttcccccttttctgtattgatgcttcatggtgtggtctgattggccagcaaggctgctgaaagaggcgggattcagaaatatctttcttttgattggctaggagagaccggcgcttgaagtttgtagggggccgccatgttggtttggggaggccaataagtgaagacctccgagccgctggaggcgggacatccggggcgtggtttagaaagagtgctttcgccgtgggtgcagagggtgggcccgccgggttgggtggggggcgtgtgatgacggtaatggcgacgagatgctcaactcacgcggcctcttttaatcctcacagcagctctgcgtggagaaactacagtaacgtgttaccacgttaaggcgggaagctgaggcatgggagtatttagtaacgttcccgggccgtagagctgcggtgtgcggccgcctgatccacctgatctgtatgactcccgtactcaaccagcctatgtttcctaccagcgaatttttttttttttttttttttttttctttttttgagacaatctggctctgtggctcaggctggaatgcagtggtgcgatctcggctcactgcagcctcgacctcccaggctcgggtgatcctcacttctcagcctcccgagcagctggaaccacagtcgcctgccaccaccaggctcggctaatttttgtattttttgtagagacggggtctcgccatgttgcccaggctggtctggaactcctggactcaggcgatcctcctgcctcggcctgccaaagtgctgggattacaggcgtgagccaccacgccgggcctttccccgggaatgctgtggtagagggacccgcagaggccccgaggctgcctgcatgtgtgtgttgggaggatctgcgctgagggtaggtaggagttgggcaggccaggacaggaaggaggcagagggcatgtcccatgcccgtgcagagggaggacacgcatggtagaccaggacgaggacaagggcaggctcagtgtgtgcaaaggggacagtggtttgggatttgcatgcagatgcccgagcctccaaaggacctgtgggccacagggagaccctgggggagttcaagctgaggagtggagagggctttgggctggtcagcaggtgctcagaggagaggggctggccctagagagaagggaggtcttgggatggtggcccacacctgaccctggcccttcatcaggtgattcctgcgtggatgcctgcggggattcctgcgtggattggggaagtcctgcagcattacagaattgttacccaacgccagggccttggtccagagtcctgttgctagatgcacagaaagcaaatcactgagatgtaagtattgccagggaagaaggctttattcaggtgacatcagccagagagacaggagacgaaactcaggtccacccctgtccctcttcccgactaaagttgtaggttgatatagtctaaaaagaaagcaggagccaaggaagaggaggtggcccgcaggccgcaggagcagcctctcattgtccaaatgtaggtttctcaagcatccggcttgttaggaaattgggccagtttcagaatcatcagcttgttcaaaagtgggacttgggaggtgagaagggttgtcaggcaggaaaccctgcattctgctttggctgagtggatggggcccaggaggatgagcagcatggggaagagtatgactcgtagtgggcaccatgaggataaagagttacaagctcctctggcatgggctggagggaagggagaccctatcgcataaccacagccccacctgcctggagagaagagggaggcggccccgctccgtgccaccccactgagaaagataggacacctggagctccagctcagcaatccctcaatccctcaatccttcatttcatccttgcaacagtcccaggaggttttttttttttttttttttaaggcagagcctccttctgtcacccaggccggagttcagtgacgcaatctcagctcacgg

SEQ ID NO: 915052 - DNA, 4001 bp, Homo sapiens
aaggcctgggaacatgtgcccacctcattcatgctaagtttctaaggaaagagcccaaaggcccagggaaaccccagccacccccaaggtctctcccacagccacatctgccccgcccccacacacacacctgccatctgagggcttattcatgaagctccacttgaggccagtggggaagccagcgcctccacggcccctcaaacccgatgtcttgatctcgcccaggatccagtcgggccccttcagcaggatctcctttgtcttgtaccagtcacctcgactcagggaacctttcagcctggacagaatagggaaggcaatgaaggggacaccttgctccgggacccaacacactaagggcactgtctcacctccagtcatggcggccgtacaggttggtgaaaatccggtcttcatccttcagcgagccaaatgaggttttcttgggtgctgtctagggagacaaagggtcaggaggcccagagtgctctggggccatgagggattgggccagaagctacagaatcttgggtctccctatttaggaggggctgggctagggctagggaagcatctatagcatcatagataccactgccacttagtaagcatttttttttttttgagacagactcttgctcttttgcctaggctggagtgcagtggcgtaatctcagctcactgcaaactccacctcccaggttcaaataattcttgtgcctcagcctctggatagctgggattacaggcactcaccaccacgcccgggtaatttttgcacttttagtagagacagggtttcaccatattggccaggctggtctcgaactcctgacctcaagcgatccgcccgcctcagcctcccaaagtgctgggattacaggcgtgagccaccgcgcccggccattagtaagcattttgtttagcaggtactggatggaagcattttacatccaaaatcccatttcatcctcataagaactctgataggaacgattttctctgtttcacagaggagaaaactgaggcttggagcaaaaggagcttatggaaggtctcacagtcaaaagcagcaggtccaatttgagcccaggtctgtcggtggccaaacccacagctgcatcacggcaccacacagccccacaagccgagtgtggcagcttggccctttcccggcctggctcccctgctggaccaaaacttgggtaggccaggggccttttatattcctacctcggccgaagaggcgaaatgtgtttactgatgggaaagaaatgcctccttaacacacaggtgatggaggggctcacttaggatgaaatgaggagccccacgacccagtggagagcgcaccagctgagggcgacgggattcccatccttttaagagcacttttcagccacttcagggcgcagagcagtggacgggaaatcaggaggtgcgcatccctaaatggggcaatgaccccttcacgccctacaaggctgtgacaaggagagaatgaaagactaggggtcttcacaacctgcaaaacttccgccaggccgaggactgtaaaacaagggaagccagcaagtcagagggtcaagggagtcggccccgcgttgggacccgttcccctacttcaaccaggccggagcgggggccttcccgcctggcctggggagaagggctctccagaggccactacagaccccagggactgctcgtgcacgggcgcggccgcgacacccggccccaaacacccgtggccccagccaggctgggcctcaccgtgtcgccgctgaaacgcacagatacccgcgcgggaagcgaccagccgagcagccgccgtgttgccagcatcgcggcgggccagatgggtcacctcacgctgtcaccttcatagcactgaggctgaggaactggcgcgatagagacgctaggtggcgcgcaggaaagacgtcacgcgcccgacgccagcgccgcgcaccggtatcgctgcgccccttcaacttcgccagcggccccgcctcctcgggggaggactgagaggccagtgccttggcgccggggcttctgggagatgtggtcccaccggcctggggtccgccttcctccctccaccgggctggcatttagcggtggctgtccccaccgctcgctctttcgctccctccttagctcgccggctcccagcctttgatgccacaagtaaacaaacctcgcatgtcgccttctgctgggtcctggtgtgttccactttctatagattcggcgtttagtgtgcacctgcggtatgcatcggtgtatcatgggaggagtgaaaagtcaggcaggtcatagcccgatcctcatgactacgttgcaattattctgcccagtgcgagccctgccagactgtgggcttccccaccccgggcgtccgtgtgctcgaggaaggattgcagactccaaggcagggggttgttcgcggagttcttcccagagggcctgtcacggaatcctaggctggggtgaggcagagaggatgcagatggtcagtgcacggcacaaactcttgctggcgccgctgagttctctcagctcttgtcaggagagtccagcactttctgcttctgcccaaaatcctggcatggtccctgctgcttttggaatcagccactggtccaggatttaagggctctgcgaccccgtccttcgccagggtcatcacgcccaggccactgctgtgaaccccacccccgtcccccaagacccctttctgccgtcattagactttagggcgtttgtgtggctgtccccctccctcggttttcccctgacctgaggaggtccctctgtcctttgccttcccaggaggtcttggaagcctgatgaactcgtctttttcagtttcctggaaccctctgctgtggtcctcgtgataagagtgacctttttggcctgctctccccagctcttttccagtcctcatggtgaggaaccatctctgttcttttgtgctgtaatcatccttcctgatctctctaaaacgtgctgtttacaaaactcctttgcagctattttctcacataccccacagcagccccacaaggtgttcactccattttgtccacgaaaaaactgaggctcagggggattttgtcctttgtctgtgggcatgaagctgctgagtggtggagctggactggaatctaggcctttcttcctttccacagtgccccgcacacagcaaacccacagaacaactgacacgcatgtgacagtcactgtggacgtcagtgacattcccaagagaggcaccaagaaatctcttccctgtctgaggtttcccagacagatagagtagtatcaggcccagagcccaggagtcctggctgccagccgcaggccccctctcttggtcagggaaagaggttgcctaggcaaagctggggattacacagctaatccgggctcagacctgagtcctcggatccctccctttggggcagaagaaggggggcaggtcagagccagcccagcgggtggattccttcctcatctgtctctaactgggtcaaaggaatacaggctgagggagatgcaggttggggatgctggggacaggagatgctgggcatgaggggggatggaaaacggagagtgagggaaggatcctctgttcattcagtgccaggctctgggccaagcacttgccatgtgttacctccttaatcctccaaaactccagcctcaggaatgatgagccctgttttcagaagcagggtatcagcattgctgagtggcctgcccaggatgacacaactgccagaactcggcctgaggtctcctaacaacaaatcccccactggtccccacccactggagcacctacttgccaggcttctcaagcgaagaaggagatccactctgatgtcatctcccaggagccttctctgcagcatctcaggtcctggctctcacctcctcagcacccatcccatcctgtgtcactctgtatatcagcctcccca

SEQ ID NO: 915053 - DNA, 4001 bp, Homo sapiens
ctgttcttaaagaccccttccacaagcaatgaaccctgaaacacgttccattccgtgataagggtactttggcgacttttcaaaggagtaatgagaacaaaggatttaggcatattccgtagtgatgtgcacttagggatgtgaactcactaacgggttgccccctccctacctagcttcttcctgtctgcggttcctctgtaagatgtccacgagcaccagactctcgcgctcagagccagtagcccacgctctgcactagtcttgcctgtcctgatcttcctggggtgcgcgcactccttcagcgtgtcctggttttaaaagactaacccatccggatgggcctgaactcaagaagcaactattctaagctagactgagccttggcgtctccgcagcctgggaagctcggatagaggtaaggaacggaatgggaggtttcttttgtcccttgagaaatccatattcaacattcttaaccagacgaaagccgctgcctgctcagtcctggggaagtgggaagggccctctgaaagctcctagacgctagatcttccagcgggctaactgccaaagaggggcgcctgggcgcaagcggagggaacttttgagccaaccaagtgcagacgccccttcttagccctctccagatgaacttgctctttggcctagagagaaggccacgcctctaaagaaggaaataaggatggtaaaggggggagaataaagggaaagggaatgaccacacagattctggggtgcagcgcgtacggaggatggctgggtaggattgcaaacctccgacactccccccagttgacaggccctatttttgccaatttcctacatctcaccccacctcacctcaccccagtctccccgcatctactactagctctttgaagaaggcggctgcaagccagtctccgaaccccaggggacttttgggcaagggagccggtggaagcagaaggaagaagatgcgctgagagtcctcacaactgcgtctccggaggcagaacgaagtggggacttcagacaatcaagcgtcatccttgctcccccctccccacacggaaccctgcgattatggcaagagaaaactggtttgagcttgagaaaatttccccagattgtctccactgctctatttccctcagataattgttcgcccagcccttgggagcaaagacaggcggaggagaatactcctggagttctcctgggtagtcaggaaggcacaggaggagatcgcgggatcccagggttctcccgcagctctctgccctcgccgcaccgcgccctcccgggccccggccgcgcccgccagccggaagcgctccctctgcgggtgcgactcccgcagctaccccttcccagcctggcgggggtcggcgagagtggtttccacagcaccttacaagttcgggaactcggggcacgcgggcccgccctgctgcgggtttcgactccctgggacggaaagccggttactagcagcaagagggtgcgcctactcggccgcgcccctcactcctgcgcccctgaggccgggtcccctgagaaggggcactcaacggggacatcttcaagcccgtgagtccctattttcaccctgtcactccgagcagggcaaagagatcccaggaaccggtccacgctaccgccgttccccagaccagcgcaaagctcggctccaggtctccccacgccgccgtggtctgtgggcacccccatttcccggatccctctaaccgccacagtcatgcttacctgtcctggcagtgcacacacagaaccacacaactaaaatcaaatccatcggcatcgctctcgagggtccccgcctagcagggggcaccgaagctaggtggaagcaaatgagcctggatcctgaggcgcgcctggcttggagccgccaaacttgctagcgggcggcgggggaggtggctcggcagcgccgggtgctgcgctcgcatatgcgcccgggaaggcagccccggccgccccgcccccagcccgccccccaccgctggcgcggcggcggcggcgtggggctcggggcccggccccccgctgcggctgcgttcgtctgggagcccgggcaggagcgcggggtttggctactgtggcttgttgcgctccccactgggggccgattccgttcgcctccttcgcccgcagaactgcgaggatctggactgcaggcgccgcagccgctatcacccggagcaccgaagtcggagtcccaggacctgcggccgaaacgagagagcgggaggcgcacggcgcccccacggcttcacgcgctccagcccctccgagccgcagtcgccaatgttgccctctttacttccgcaccgcggtgggggctgccgaagttgccacagttcatccccgccgagtcgaaaagccgccgagccctcgcgggtgggtatttttcctcgggggaacccagaccgaggcggcgccaccgagcgcgcacggaccccctcggaaaacaattactcgggattcgctctgtcaactgggtggggagggacctgagggggatgatggctgagtccctgctcaccgcctgtaccttctgtctcctctctcctgttgaacccctatgactgagtactctctttgtgggtgcaggaagagggcgctgaggtgggggtgcagaaaaggggtcctcgaggcggagcgagctgtggttggggtttgggaagtctatttgcaaaccttctcattctgcagggcagatgctgccacataggggtaattcctaaccatctttttttctttcttgcgtgattttcttaatggtattatcaaaagcccactcttctttcatagtcacattttggccccatgtgcaattcctccgggacctccaccttcttttccctctcccaccacaacattctctggagagaaaagctgggctgggctttgttttctacttgccggcaagaagagaatgggtcctctcccctctatgcgaccctttcaggacctgaccttccctatgaagatcccccaaatttaagacttctgtcccacttcctatttgtcctactaacacctaggaacgttatttataactggatatgtagagtcatgaaatctgaaatgacagcctctgatttataccaaatgaactccacttagcttgctcagtcttcccactctctctgaagcccccgctccccctcaccagcagtactcctttgatattcacaacagggatcccagaggagtccaaggaaacctcagaacagccgtccctcgtttcctggaaaccaattccaacgtttcagaatcctcttcactaataagaacgtgcccttctcacttgcacccactttcacttcctatatccttaacccctacacaactttgaccccaggagccccagtgaagttcaccaaatcagcgcagcttattaagagagaaggctttactagcatgctgttctggtctctgccctatttttctggatatttctgtgtgcaagccactgtcccatttggccctttatgttgtggtcctttggcagatgaaaaagaaagtgaacaagcaggtaaattccagctcaagaagtctactgcacaatccagaagttgagctgaatgattaagaggtaaactgatgtcagctgactccaactcagattcggctaagacccaaaggaaatctgtctgccttgactctgtattttcactaacagagtccacgtgtttttccttccacccggagcgtgttgcatttaaagctaacattaaaatcacacatcttgaagagaataggatttcccaagtcttgttgggccttgtggacaaggacaccatacaccatgttgtattataagagccatttcctgtctctcctctgcagtctttaagtacacctcagcaggaacagccttgagttgctttggactgttgtttccaaggcccttttattgatttcagaaagcccagaatccttaaaagtacagtgaccccagcaag

SEQ ID NO: 915054 - DNA, 4001 bp, Homo sapiens
gtggataacaatgacaataataacaattacaactccctttcttaaaaacatttaaatccccctttattgctgaaagagaacatactttaaactcttaacaccttaattacaagttaaaccaacactactatcatcagtcaacatgtgactattagttaaatctaaacaggaattctccaggtgataagaagaatggagcacaggataggcatggagcgggttagggctcagaacaggaaaggaagaggctgggtgcggtggctcatgcctatattcccaccactctgggaggctgaggtgggcagatcacttgaggtcaggagttcgagaccaccctggccaacatggtgacaccccatctctactaaaaatacaaaaaaaattggccaggcatggtggcatccacctgtaatcccagctattcgggaggctgaggcaggagaatcacttgaaaccaggagacggaggttgcagtgagccgagactgcaccactgcactccagcttgggtgacacagcaagactccatctcaaaaaaaaaaggaaatggagaggaaatagggaaataatcaccaaaggagaagcacaacttgtcacatgggctggattcaagtctcagctccatttcttgctgcatgacgttttgatggttactcaacctctaggtcttggattccttgcttgtaaactatggataataatacctacctaagcagatcaatatgaagaaccactcaaaagtgttttataaattttaaactgctgttttaataggtgtctttaattataaattttgatgtcctcacaatttcatttatgctttattatcactataacaattagagccattaatttttgtaattatgctgatcgtgttgatgacagaagtaatatagatggtgattctggcattgccacccaaaacgtttcacacaaatcaggtgctggaaacgggatagaaaataatcagatatgggcctgctctggggttcatttaagcagagaattcaaatgattacttgctgctcgatataatcactttcccatcaagtccttcccgctttcttactgggagagagtatagcctagcatggactctgaagtctgacttatctttgacacttactagcaagtcactttacttctgagcttcagtttcctcacttataaaatggagataataccgcctacttctcagactataataatgtaattccacagcctccaactaacccaatgagcctccagtgaatcccaggaggccttcctatctcatttattcactcctaacaagtaatatttaaggagcacctaccacgtgccagacctttgaagatctgtagtctaaaccctctcatggtatagatgggaaaactcgggcccgggatggggacaaagcttactgaacgccactccacagtaaaatctggaccaagacccaggtctcctaagttgaaactgaagctcagggctctttctgccgcccagagacctttggtaagcagggcttttccagtctcagttccctttcatctctggagtgataattctgaggtttaagttcggcttctgtgagaacgaataaaaataggactagccaagaattctctggccaggtcagatcctagccgactaggtggctctgtctcaataatccaaggctggatttcccaaacgcagatggtcttgctcaacctgtccccacagttgagtcctcctcggggagctctcctgtctcccaaccccgctcacctgcactggaccccggctcctccgtctctgtcggggcagagctggacgccggggattcttccatggggcgcgggggcaggtccgcaggtctcattcgccgaagcccggaagaggcaccggccccaaggctggggagactgagacagaggaggatagagagggagaaacaactgagacggaggacacggagacaagccccgagaagcgaagagcgtgtcgactgccggaaacaggtaacggcaacgaaaagaggcgggcgcaggctgtagtcagtggcggttggggccaaccgttggcctactccgcgagccctccccgtcccgccccctcggcgctgcccctccctccagcccgcagctcggtccccaccacggcgtgggaccggcaccacctccaccctcgccaactcagctcaagccctgggcccacctcagttcccaacggccgcctcctctcttcagtgccacagccccgagctcttatattggtctgtagctcggtatcaccgcctaaagcttccctggacagcctgagagttgagcaaaggttcccggcctcagagggtaccctacaaaaaggaccagaggtccagagcattggctactctccttgcaaaatatgaaaatgaaaatatattcatatatataatttatgtgtgtgtatatacacacatttacatacatagatttgtcacatagcactgagtccattcttctgtttcacagtaccggaatttaagcccccctctccccagccaaagaggaaaggactgatctaaggtcattttttatctgggactaagtacaacgtaaaggtaataggctgggcctggtggcttatgcctacaatctcagcgctttggaaggcctacgtgggaggatgccttgagcccaggagttggaggctgtggtgagctgtgattgcaccactgcactccagcctgggtgacagagcgagaccctgtctctaaaatataacaattttaaaaagaagaaattttacaaacgccaataaaaggaaagacagactgctaacttagaggacataaaaatgtaaagcttctgtaaatttgaattcgtgatatttttctcattaaaaaaaatcctgtgctgaggcagggaacatacaagatgagcctggaacatcgtggtgccacaaggaaagaactcacaaaatgatgagggttctttgaaagaacataggtgccaacctcaatacaacctgctgtatttttctaaaaaaaaaaaaaaaaaaaagaaaaaaaaaaaggcctagaaccagagaccaactcatcgtaataagcccaaataatgggtcttttttatttttatttttattttttgagatggagtgtgtctctgccgcccaggctggagtgcagtggcgtcatcttggctcactgcaagctccgcctcccgggttcacgccattctcctgcctcagcctcccgagtagctgggactacaggcgcccaccaccacgcccggctaattttttgtattttttatagagacggggtttcaccatgttagccaggatgatctcgatctcctgacctcgtgatccgcccgcctcggcctaccaaagtgctgggattacaggcgtgagccaccgcgcctggcaataatgggtcttaaaatactattttgtccccaaaggaaccagggttccatgaaaaaaatggctgattttaggtgcagggaagaaaatttataagattagcctagaacatcttaacagaaagcaagaaagccataaaagactatttcaggtcatgtcaaaagaaggtaagaatcaatttgaaggtgattccactggccaaatatggaaaaattagaacatcaaaaagaacaaggactgcaaagaaagttcatatcgacatatggagaaaaatgtcactttggtcacctcagagtttgctaaggaaagcagctttttattctgcctttcctgtacaaaccctatttctgggtaactaaatagttgatggggaaaagttctccttcataaaataattaactgaccaatgccaaatgaatgatagaatttcatcattttgtcctttaatgacaaaatgaatttaatgaatctagacagcaattatcaatagctactaaaagctacacccttattgctcaccttttcttcccttcctactttcccacctcattatggcactccctgcatctctcacatatactattgccctcaggtcctggtctcagaacttgcctctgggagaactcaaat

SEQ ID NO: 915055 - DNA, 4001 bp, Homo sapiens
gtttgttgttctttcacaaaagaaaatttgctgaaaatcaacatacactagtaaaatgcaaatgctaacagtcactttatgagggcctattaaaagccaggcctttcacatatctcatttaattcctacaactgtgcaaagtaaggtcatgggttattacatcggaattaaaactgaaaatcagagtaggtcagtaacttgcccaaccccagaggcagtactgaaactcaggtctacctgcctgcaaacccatgtgcttaatgctacacacaatacctcttgtataacctcgcaacatttaaataataaaaacgaaccttactgatatgactttattagtccatataaattcctgaggttccacacacctgaccataaccaccagtaaagtcaatggccaatctgcctttagttggtccatttgatccgtataatcatgtaaattaatgctacttttctccttcgtgtaataacagaacactgctgatcaccttcagaaaactacataccacaacattttcagactgatggctgggattaggggtcaagttgatagcacaggactgcacaatgctaacaggaccacagggagcttaaactcaatcactctaccaacatttactaaatccatcctttccagctcctattcctacaaagtgggctaaaaagcatactaaaatgaaaagaaaaaaggatgttaacagtcaaaacaccagaattccatattccacattccacaaacaccacattccacaaatcttaccacgccaggtgtcaatttccttatttgaggaagggaagctggaccaggtcctccctcccgttatttccaattctggaatcctgcaatgaataatctctagatgagtgacagtgtgaattacgtaatacaggtacttttcttttccaaaattctccaatgataaagaacagttctagaataactatatgtaaaatgaagcatgttccactaaattatttcaagctcccttgaagagatttcagatccatgtaaagatatagcagaaacttaagcgttgagtcaagtcacgtgggtggtccccaagcaactgtgccccctcatcacccttcagcacatggtgaaatgacatcctcatcatgcctatgcctaaataagtgaagcgggtgagacagcacatagcatgtgagtttaacaaaacttcaaaatagcaccaaaaaaaaattgcagaagcaacctgatgctcagaataaaaccttcttaacagaactggcatagaacagactatcaactgcaaagtcagtgtcctacctgcctcttaggaggtctctatacaacttgctcacaagtttcttcagtgacggtgcgtgtctagctaaagttaatctagtccactgacaacctttgcactgccactattctgaacagaatctcaaaataccaaaaccaggcagctgccagggagttggaccccggaagccaaggatttccagatcttcgggcgttctgaacctcttcactagaccacgaaggcctctcggcctctcatcactggctttcagcacctggtctaactttccccgctggaccctccccaacgcagaagctaaaccctcgggtccttccagagcaaccgccggctccaaagccctcaactctgcagcaaattcccctccggtgccagcccggctggcccaaggcccgggtccaatcctcagaactgcacggctcggccccgcccctcccccacgccgtgcctaaccctaacccccagcctcacgcgtcgcaccgctccccacgccccgctcccgctccccacgcccacacgggcagcgacctcgcggacccagccgcccgctcccgctccctccactcccaggagacacttcaaccctttcgccgccccttgcccgccctcacctgaaccgcgggcgccggccccctaacccgcagcccttctccggccgcgggctcccagacgcactcgctcccgcaaggagtctgggtgcgcgcacgctctgggcctgcgcggcggaaggggcggggcagcgcggggcggggcctggagggtgccggggcggggccacagcgggcgggtcctggagcggctcgggagagcggagggtcggcgagggtgcctgcgcgcggctgggcctggggatgcaggttccagcctgcttgcgcgtctcacctgatttaggagcttccagaggccccagacagtgcctgtctttgcctgaccgcgaatcaaagttccatagcccgtgagcgaaggcacgtctattagctgacgtttgcagagagcataccctgccccaggccctatgctaagcactttctacccaccgtctttgtgctgcagccctgtgagctatgcactattagtgcccattttacagttgaggacatgagtagaacgcgacctcagcctgtgcttccgagttccttcattcctccttcccgtccccgggccctcgatgtccagaaagaatgtaaacacatcgaaggatcacattttaaagttaaactccatcattttcctcttcttagatatgaaggcccctttcctgttattcactgggttttgcttagtacggcttcacactacttattccaggtactcccagcagtggcgcagagaccatcctcagttctgtgtgtggatgggaccagagaagccggccggccgagctaatgttcttcccttcctggaagagagtagtttccaaacaacccgatctctgttcctctactggctccacatatgctctaagttcctgttacactgttgagaggctcttgaattagaaactatcgagtataaatggcagtggaatatcactctatagttgtcaccgatatttcccttaccttgagattgtgacaagaccagaaagagaaaaagagtaaaaacaatgtaaactataatttttgatagactttgtttttttaaagtggtttaaagttaacaaaattgagcagaaagatattttccaaatactccccgccccacctccccacatgcatcgccttccctttatcaacatcctctaccagagtggtacatttcttagaactgatgaacccggcccggcctggtggctcacgcctgtaatcccaacactttgggaggccgaggcgggcggatcccgagatcaggagatcgagaccatcctggccaacatggtgaaaccgcgtctctactaaaaatacaaaaattcgccggtcgtggtggcgggcacctgtagtcccagctactcgggagctgaggcaggagaattgcttgaaccggggaggcggaggttgcagtgagccgagattgagccattgcactccagcctgtcgacagagcgagacagagcgagactccatctcaaacaaaagaactgatgaacctacattgatacatcattacccaccatcacagtataatgcagagtaatttcactgtcttaaaaatcatctgtgctctgcatattcatctctccctctcctctacccctggcaaccgctgatctttttgtctccatagttttgcctttttccagagtgtcatctagttggaattacatagtatgtagccgtttcagattggcttccttcccgtagtaacaggcattgaagtttcctccatgtcttttcatggcttgatagctcctatttctttttagtgctgaataatattccattgtgtcgatatatcacagttttatctattcgcttactgaaagatatcttcattgtttccaggttttggcaattatgaatcaagcaattatgaatcaaacaacccagaaatccaaccacccactccaggcatctttgcatgaacgtatcaaaaacacctcagtcccaatgcccaggatcttcccctttgagaggctgagatgggtggatcacttgagcccaggaattggagaccagcctgggcaatatggtgaaaccccatctctactaaaataaatacaaaaaattagccaggtgtggtggcacgtgcctgtagtcccagctactcaggaga

SEQ ID NO: 915056 - DNA, 4001 bp, Homo sapiens
ccactgaaagacttcccagtggaactgtttttggtagaaaatagatccaggcattaagcatttccagtgatgttctacggttgaaaaggtagtggtgaccagaaccagaggccttgtccgtgcttgcagtgggactcaatattatcctgctgggcaaaagcaacagctaggagatgcaatcgtgccatgactgaaaaaagccaggagcacaaaagatgccagctagcccactggttgaaaatcagagcaaacgacactacctctcccatgcaccaatacgcgctgaatctaaaataagccctggcagcaaactaagaatgacagtctatttcctatggtttattaactttgggccctgcagataaagaccgccagaaaaacagccatagtttaactggtctggacatttactcatctgaacataaataatgatcagctcattcagattcctgggtccctactcagttgttgggatgaggggaagccatggggcaatctaggccaaacagaaaaggagtgaactggggtgaacgacccccaggctgtgatggattccctgagtcaccaggacttaaggccctacacagaaattccaccgctagccttagcaccattagcaccactgcagtggcctccatggtactccactgccaatcaatccgtaaccacagtgtacaccctcttagtgactgcatttttagaccacacatcaaattattaatgtaaaccaaactactacatttagtgataaacatgtacttcataaatatcagggaatgaaagtgtctcaaacagttgaaaagaaccaaacaaataaaggagcctacctttaagtttaaaccaaaaacatttaaaagaaatactgcaactattaactaacagatttactaacacagtaagacactgggtcagggagagattaactgccaaatatttcacagtgaagattaagtactcataacaatcttctggttttagtagaaaagatacccactgatgtgtttcttcatatttgttttccataatttcttccttttttttttctatttttaattattatttcaatagtattgggggaacaggtggtgtctggttacatgggtgagttctttagtggttatttctgagattttggtgcgcctatcacccaagcagtgtacactgcacccaatgtgtattcttttacccctcacccgactcccatccttccccccaagtccccagagtccattatcattcttatgcctttgtgtcctcaaagcttggctgccacttataagtgagaatgatgtttggttttccattcccaagttccttcacttagaataatgacctccaattccatccagtttgctgcaaatgccattatttcattcctttttatggctgagtagtattccatggttaaaatacacaaccatttttaatggatgaaaattatcttgttaaaaatagggcttaaatcatgttatcaagttattctggcatgttattaaacatgcggaacgtagcttgttttcttccttaatcggatattaaatagactctaaacttaaaaaaaagataagagatcaggctgcctgcaatgtagaaaatgaacaaaagggagcacaaaagactggaaatgtagagtggaaaaggtttcccacagctgttacaaggaagctgacagagaggaaaaggtcacaaccgtgttactactcacatcctccagaaggtcctcgggcagactaactctggtgcctcccaggaggcaatcctccatgatgcgcgtgccatggccatctccacacggaccaagttccagaggatctgtcagcatatggtctaaggaatccattgtttcttctccacaggtactctggacaaagacatgcatcttgagacagaaaggcagaaattccagggatctagttgatgctaacactcctccaggaaaacattcaacctccagccagttcttacaccttatccttgcaccctaattacagctaaacagctctcctccctccctttcaccacagcattcccactggaattttcaagtcttacctggaagagctcttttctcagaatgctcctacagtaactcctaaattcataaatttcatatgccttcattttacagatgagtaaaatgagactgagaataaatgataaacagatcacaatctataatttacacttcccagaccaataatcactctcccacaatgtaatttctgtaacaactgttttttagcaattaattctttgttgttggctgggtgcagtaactcacacctacaatctcagtactttgggaggtccaggcgggcagtccccttgaatccatgagtttgagaccagcctagcgaacatggcaaaaccccttctctacaaaaaaaaaaaaaaaaaaaaatcagccaggcgtggtggcgcacgcctgtagtcccagctactcagaaggctgaggtgggaggatcgcttgaacacgagatgcagagggtacaataagccgtgatcacgctactgcactccagcctgggcaacagagaccctgtctcaaaaaaaaaaaaaaaggaaaggaaaaagagaaagaatattgtttgttgttctttcacaaaagaaaatttgctgaaaatcaacatacactagtaaaatgcaaatgctaacagtcactttatgagggcctattaaaagccaggcctttcacatatctcatttaattcctacaactgtgcaaagtaaggtcatgggttattacatcggaattaaaactgaaaatcagagtaggtcagtaacttgcccaaccccagaggcagtactgaaactcaggtctacctgcctgcaaacccatgtgcttaatgctacacacaatacctcttgtataacctcgcaacatttaaataataaaaacgaaccttactgatatgactttattagtccatataaattcctgaggttccacacacctgaccataaccaccagtaaagtcaatggccaatctgcctttagttggtccatttgatccgtataatcatgtaaattaatgctacttttctccttcgtgtaataacagaacactgctgatcaccttcagaaaactacataccacaacattttcagactgatggctgggattaggggtcaagttgatagcacaggactgcacaatgctaacaggaccacagggagcttaaactcaatcactctaccaacatttactaaatccatcctttccagctcctattcctacaaagtgggctaaaaagcatactaaaatgaaaagaaaaaaggatgttaacagtcaaaacaccagaattccatattccacattccacaaacaccacattccacaaatcttaccacgccaggtgtcaatttccttatttgaggaagggaagctggaccaggtcctccctcccgttatttccaattctggaatcctgcaatgaataatctctagatgagtgacagtgtgaattacgtaatacaggtacttttcttttccaaaattctccaatgataaagaacagttctagaataactatatgtaaaatgaagcatgttccactaaattatttcaagctcccttgaagagatttcagatccatgtaaagatatagcagaaacttaagcgttgagtcaagtcacgtgggtggtccccaagcaactgtgccccctcatcacccttcagcacatggtgaaatgacatcctcatcatgcctatgcctaaataagtgaagcgggtgagacagcacatagcatgtgagtttaacaaaacttcaaaatagcaccaaaaaaaaattgcagaagcaacctgatgctcagaataaaaccttcttaacagaactggcatagaacagactatcaactgcaaagtcagtgtcctacctgcctcttaggaggtctctatacaacttgctcacaagtttcttcagtgacggtgcgtgtctagctaaagttaatctagtccactgacaacctttgcactgccactattctgaacagaatctca

SEQ ID NO: 915057 - DNA, 4001 bp, Homo sapiens
gcatatgcacatctgtatgagtgtgcaagggtgtgctctgtgtgtgtggatagttgtgcatgaatgctggtatccacatgtgctcgtggaccttcatgtactgttgtggagggaagtcatgtcagtgtgcatcagcaagtgtgtgtctgtaagaatacatgtaagtgcaaaatgcctgtgtgagaatgcatgaatgtctgagtgttcatgtgaaatgtctccatgtgaagaggtgaggacagagagaggggaaaggaaagggatgcctgaggatggtgaagtgataggagccttgatatagtttgggtgtttatcccctccaaatttcaggttgaaatgtgatccccaatgttggaggcagggcctagtgggagttgtttttgtcatgggggcaaatccctcatgaatgtcttggggccctccccacggtaatgaacgagttcttgctctattagctacacaagagctggttgtttaaagagcctggcacctcctcccctctctcttcctccctctcttgccatgtgacacaccagctctgaccttgccttcttccataactgaaagctgcctgaggcctcgccagaagtcaatgttgacaatatgcctcttgtaccacctgccaaaccatgagccaaataaacctcttttctttataaattacccagtctcaggtattgctttatagcaataccaaagggactaagataagcctgttcttttttttttttttttttttttgagatggagtttcgctctgtcgcccaggctggagtgcagtggcgcgatctcgactcactgcaagctccgcctcccgggttcacgccattctcctgcctcagcctcccgtgtagctgggaccacaggcgcacgccaccatgcccggctaatttttttgtatttttagtagagacggggtttcaccgtgttagccaggatggtctcgatctcctgacctcgtgatccgcctgtctcagcctcccaaagtgctgggattacaggcgtgagccactgcgcccagccgataagcctgttcttgggaaaggacaagccaaatgctaaagataaaacagcttctcagaaagagccatgactctgggtccatgaaaccctcccatttgtacgtagcagaggagctttcaagcatgaaaggagcctatgggagggagcaaaggcaccaaaagatccctccctccccccaggcacccacaggaagaaccagcaggccatgaggtcccacaccacccattctgtagtgtggttccttgagagatcagggccacagaagacttagaagcgcctgagcagcttgccaggaagcagctagggacaggtctgacccctacatcctgatgctatttcttctggttagtggaaatcccttcaccaacaccctcccagtctctaagaccctttcttcagactctccccttctctgccactgcagctggaggtaagatgtggggaagaaaggctagtcttttcttaaataaatcccagctttggctcagtccccctcctgacagttgttggaaccctcaggtggagaccaccaaggactctggggcaccagggactagaggacaaggtgacagaaggcataaggtacaggctacaggcagctctggaaatgccatggtgggaggggagtcccagtgccatcctgccctccccttcccccgctccacactcaccatgcagacaaatatggctgagctggtccacaagttccaacaggttcatgaccttcaagcccttgaggacaactttcacagcctccttttctccatactttgaaatcagtaattctgccaggtccaccggaatcaggccctccaactcccctctggccagtgggggctggccctcagacagggtcatatcccgtaagtagaactttaacttcttgaaatcgttctcctcaaggtcactcaaggcccagagcaatgcctcccggggctttctggccttggccatggccatggtgatctgggggaaggatcaagtccagaccagaagaccagtgacctggagaaagaggcaaaaggagaggtccactgctgagaggcccaccctgctttctgggggcttggccaagttatagagcggaggccagggagagacgagatacatgtgcaaagctccaagaaagacaagcagatgaaacgcaggggaattttcctagtcattcccctctgcctcttagtcaggtgacacgtgactgtgttggcaaatgggtaggaaggtatgtaggtgtgttaatctctcaatctctctctctctcccccaaactctatctctgtctctctctctccccccactcccttcctctttccctctcaacacgttctttattaggctctgtatgcctccttagacggatggattaagaaaaaaaagtctaagttttttattttattttttttggagacagagtctacctctgttgcccaggctggggagcagtggcatgatctcggctcacctcaacctccacatcccacgttcaagcaattctcctgcctcagcctcccaagtagctggaattgcaggtgcccaccaccatgcccagctcacttttgtatttttagtagagatggggtttcaccatacgggcccggctagactcgatctcctgacctcaggtgatctgcccgccttggcttcccaaagtgctgggattacaggcatgagctactgtgcccggccaagttttaagttttaaaagtgagactgtccctggctgtgtgaacctatagaaagctggagcacatttgctggaactgctgtggtatggcaagaaggtaaaaaaaatctacactcaacccattggcctcacatgtcagcctcctggcctcagtcacacagggattgcaaagctagaagtctcctaattcaaataaggaaacaaatccagataatgataggaagaggaaccgccacctgtgagtgctgactttgtgccaggtgatttacatatcctttttgatcatctcagaaatcgtctcaggaactgttccacatgagaaatttggcagtcagagaaaaatggtttttcagagttttccagagctaggccaccgggcaaagaggcaggatttaaactggtctatgccctgggtggaagagagagacagaaaaaactcaaaagataaagaaatagaagacagagtcaggaaccagaaagttaggctaaatgttgccagaagctggagacatgtataaatactaaagtaacgggaaaggagagcagagttttgaattgtgtttctaatgtagaaccaaaatgtaggccaggtggcagtctttggaaaagaaaagcaacaattaatagaaagccttcagaatccagaaatacacctgtgacctaaggcccatagggaacccatctcagtagtacaatgtcacattcatcattgagagtgttcaaaagagaatttgggaacacagagagttgttgccattcaaataccaacattttgactacatactgacagagaaagaaaatgtttggaacatgttaggatacaggggactttggttgtgagtcataggccagtttggaaaagcaggcctgtgaaagcaggatcaatttacaacaaagcttcaggctgcatgggaagactcagggcttccctgcaaatttctgatgttggcagagctatttaataattcaggaaagaaaagacaacactagaacctgccaagaagatgtccagtctaggctgcttaccacagttcagacttggggagctggaggtgaggcagcgagaactcagctccctgatccaggagcccagtaagcaaagcctggggactgagacgaaacagatcccctttcctggtccgacagctctacaggtccaagtttgggctctcttagcccatactcactagttcacttctgtttggtggtgctggtacctaccagctacagcttgatacctaacagttcctagtatataggcctggaacagaagggcccctccccatctgcccca

SEQ ID NO: 915058 - DNA, 4001 bp, Homo sapiens
acattaaccaaaattatggaaaattctatgccttcaagccacagtcatattcttagattcttcaattatttgctatgaagaatctgcaacatcttggactaggaacttgggctatccctctcttcccatgcaaggcagtttcttcactcctaccctgggtacatctctaggcatctggtgactgctcccaggacccccatcaaagctggtgctttgggtctctgcacattcaagccagggagggtccatgaccaataattttcaaaatgtagcttccagagtcataaaaaatgcagatgctcactgtgtggtggacggaggcagataggctctaggccgggcacccctgctaaaccccaaactgtaactgggtagaattcattcctaaaagtcttgcgtatgctatacttggtgctctttgttattcatattggcctctgccctttagcaggtatattccttcagatacacattttgtttctctgaaaactggatcctcttagctttttttttttcttttaattttggttagttcaatgaggttcaggtaatattctcaggttggaagcagtgtggcagaacagcccacttccagtgttcgttcttaccggtcaatgtctctgcattcagtaattcaactatcaattgcggctatttaaatacattgctttttaatgtatttaaatagccgcaattgatagttgaattactgaatgcagagacagatttaatgggtgcagcacaccaacatggcacatgtatacataggtaacaaacctgacctggacgttgtgcacatgtaccctaaaacttacagtataataaaaaataaataaataaatacattgcaatttacaggtgaaaatacttaagggtgagcggttaaacaacttgcttaccaccacctagtggataacaatgattgacagctcttaatgtcagttccgtcagacaacaaagcccacatttttaaaatgctatgctatgctctctgaatgttcaaaccagggaaggcccacgcccagtaattttcaaaatgtggtctccagagtcataaaaaatgcaagagcttattgtgtggtgaactcaagcagataggcgctgggccacccacccctgctaaacaccaaactgtaaatatatagttcacaagactacttcctatgtgcaaggggctggtttaagcattttaactacactaactcatttcaatctaacaagtctgttacatagttactattattattggctatcaatattacgcctattaagctgatgcttaaaggttaggtaatccagccaagatctcgtaagtggtgttgtcagatttgaatccaaggagtcccttgcttgtaatgactatcctaccaaaagttccttgcctaataaaatgtttgaatattactgatccagcccaagtttgaaggacagggcccaaagatgcgaaagtattttcctaatataacacactcagctaaataatagaacaggctcttgcaactctctgtggtcccaggacactgaggaggggctccttctcatggcttcatttcagctccactgtgcgtttcccttctctgcctggagtctccagaggagcctgggatttggcaagaaggcgggagggaggaaagcctcactggaccaggaacgaagagggtgtctggcaacaataggacggaatttgaaaacctctaaccttgagtttagagcgatgctagctagtgccagggctagtgaggtgcccattccgccaaggcgcgggacagcgaggacaaccacgccttgccaaccaaaggcgacctgacagcgtttcctcggggtcgtcgcggtggtgagggtcacagaattctccgaagccagtagctccgtttccagccacgccccctttcccagggccctaaaagcttcgggagttctcctattccattaatgctggtgcgtcctcgccttatcccccgagcgcccgcagctcccgcccgcgcaggaatgccagcggccaaaggtcgggaggcgcgggatacttctggccaatcaggagtcacgttttcccgcgctctctcttcccgccccgcccctcccgtatccatggaaacactgcgagtgtctactccaagacctgggacttccgtttcggtccagccgggctgcggccattgtttgtgtggactgagtgttttggccatcccggtccactctcacaggctccgttaagtgacatgaactctcaggaggactgagccagaagcggacagggcaagacgagctgtgcttgaaggaagaggggcagaaaatcgagggtcagggactgagaagctactccggtttagaaaccccagagacacccgtgtagatgggtacatcacggcttctctcccacgttaagacttaataaaggcaagtagaggagggcagaagcagcttgggccccggggtatgggtgcccggtgttcggtgccggggcagagttctggccggggatctggataagcaacggaggccgcgcgcgtcttcagtgcaggagcaggggacccccgggtctgtggcggagaccgggagatcccgctcctagagaaccgttcgtgtgtctggttctctggtgcttacacttgggcagcccgtgacgcgttgggggagcccaaacctgtcctgctcttggggcacgcatgaaacgttttttccctagagaaagagggttaactaattgcttattactttgcccaggaacctacctttgatcagcaaggaaggactggggtggcaaaggctcatgcccccattttacaggtaaggaaactgagatcttggagatctataagtttggtcctctttaaagttctacaagtgcttgatggcacagttgagactttgatcaggacctgggagctccagttctgggatacttctctaagactccaggtacttttctgatagtaaatccagtattcctgtttagcaagtaggggaggacaatggaatgattttctacttaaactgaacaaaataagaaaaataccttgagaatagatactatttaagtgtgctggtgctttcctattattgttagtagtaataataatctcaataaataagtgagttgtatcttttgaagtttctagagggttggaaataaatttcaaggtgccagtgttcatagctctcctttctggtcgttgaaaggaaacaagagcattcataggcttcttttggacctcttgctaggagatgtgtgcgtcatacccagttagtatatgggaaatttaatgaatttgggaatttaaagccatacccaggttttcagtctgccttcctcctcagctcagccgtctcagcactctacccttccccagaagaggaacacaaaggaggaaggaatgtacactgtttccctcatagtctgatcccaagtgaggatgattgtcttttctcatttacaaaatgtccctgcattctccatgggtggtggaggtggcaatgaggatggatggatgactggacagaaaacgttcctcgcttgcctgtgaaattttcgagcgtgcagacttgaccctgccccaacccagtgtcttttcccaacatttactcattcattcattcagtcactcaagtctagtgtataattcatgctgttcttggtgttctgagataaagaattataagaatgtcatcgccaggcgcggtggctcacgcctgtaatcccagcactttgagaggccaaggtgggcggatcacttgaggtcaggagtttgagaccagcctggcccacatggtgaaacctcgtctttactataaatacaaaaattagccaggcattgtggcaggcacctgtaatcccagctactcaggaggctgaagcaggagaattgcttgaacccgggaggctgaagttgcagtgagccaggatggcaccactgcactccaacctgggcaacagaggaagactccctctcaaaaaaaaaaaaaaaaaaaaaaaagtcttaacattgggggtaataaactat

SEQ ID NO: 915059 - DNA, 4001 bp, Homo sapiens
tccaggatgaagagcagccgctgcggctgggccagcatctgcggcaccggcgcgccgcggtcggggcactggtccaggatcaggtcagccaggctgcgcgtgcccggcctctccagcagctcgccgcagggcatgaagaaggcgaagtccacctggccctggtacagcttgcccgccgcccagtcgtacaggatctttttggccgccatggtcttgccgatgcccgccgggccctgcagcaccacggtcagcggccgccggccctcctcgtcgcggcggaagaggcggttgaaagtgtgcgtgtccgagcgccgcgcgcgccccggctcaggctcttccgcgggccccatcgcctcctccggggcggcgctctcgggcgcgatgagcagcttggtgaagcgcttggtgatcttcacggagcgggcgttcctctccttcacccgagcgtgcagctgcagcacgtgctcccggtacttcttcttgtactctgggcgcagcgggagacagcgcggggacaagggtcggaggtggggcaggctgcgccctccgggagcccacgccctccccggccctgctcaggcctcagtttcctctacgggaccacagcccacgcccctggcggccctcccaccccggtcctccccgggaccctccaagtggggttggggacactcgtgcccccccagcgagagacccaccggacacggagagcagcgtcccggagccgagcccgagccctggaagggaaactggggtgaggttccgccgagggcgggaacaggggaaggcgccacgggggtccgagtcaccctgaggagcacgcagggtcctacccctggggcccgcgaatttgtggataaaacgcgcgggggccggggaccgcgccggggcttctccgggaagcgggaaggagggcagcccagcctctgcccagacaggagggacctcccgcgcagaactcacgctgcagccgccgctcctggagctgcgccgccacgtcgcgcgcgtccgccctcttgagggtcttgcgggccacctccagggcaggctccgggccgtagaactgggccagctgctccgcgaggtccacggcgtccgcgcgctccagccgcccccacgggatgctgcgtccgtccgggcccacgtcgcgcagcttgtggcggaagcgcttcagctgctcttggctcagttcctccagcgcagccaggagcagctcgcgggccaccgcgaggcgcggccccgtgctggaggcgggcgggcgcgggtcatcggggagcggccctcgggtgacccccgcccgcccccgactctggcgccggagaacccaccgcgggcagggcctcagggagtcccgggccaagcatcgtctggatccatggggtggcgggagggggcaacggggagtgaccccagacttttccctcccccgtccccggacccgggtcggggcgtcttggtgttcttcgccctctgagggtgaagtgggcactggccgccgctgatctgagctctggggggcaccttcctcccctgcacctccctttctgcttctgtccttccacaccccaggacaggtcacatgccccgagggaggtatttccaaggaaccctgagctctctttcctcgctttccttcttttccctctcttcccgatcccggagcagaactggcctctttggcagcagacactgccaggcccaggctgtattcctgggcccccacccctgccacactttggtggggcccagcttggggccttgcaccagggcctgaatctgagcccctggtggggaacagactccacaaatgccctctgtggggaggcagtgcttggctcctgagcctgggagtgagggtgggggaaggatgtggacaagggtggagagcctgaggaagtcagcgggtgaggtggaggccccagagggctgagaccagccggttcccagtgaccaccctggggccagcactcacctggagcagggggcctctggctggtccatggggtctcttcctccctgggtctagcactccggggcagaggtggggatcagagaggtgattccttcacaggctgagctggagccaagtcttagaggttgtccagcccggtccattccccgggtccacacaccgcagctcagctggcacgagatgctgttgggcaccgtggcacacgcagagcattgccctttaagggctccgtttggtgacctttgattttcttactcctttatcccattaatgttccccaagaacccctgggtgtggcatcggggcatggctgtgagcaggcagcttcagagcaaggtgggttgtgtgaaggaggtggctggctcagagccaggccttcagctgaggcctggggagaggttagactctgaaggcaggggtgaggaaagacttccaggtagagggaacaggggggacagccagcagcacgcaccatatatgggagggaaggcagtctccagggagacgccgggcaggggtctgcactgcagcctccccacccgacctgaacagctggcgggcagaggctggacgtcaggggtgttcgagacccctgggaccaaatgtgagagtgtgtggaacgggggggttaatatgtggaaatgagaggtgctgggtaaaataaggctgagacctactgggctgcattcccaggagggtagacattctaagtcacaggatgagacaggaggttgacacaagatacaggtcataaaggccttgctgataatggtgtaaagaagctggcccaaaaccaccagaaccaagatggcaatgagagtgacctctggtcatcctcacagctcattactctagttacagtacattagcacactaaaagacactcccaccaacacgatgacagtttataaatgccatggcaaagtcaggaagttaccctatatggtctaaaaggggaggaaccctcagttctgagaattgcccaccactttcctggaaaactcatgaataatccactcctcgtttagcatataatcaagaaataaccataaaaatgggcaaccagcagcctttggggctgctctgcctatagaatagccattcttttattcctttactttctcaataaacttgctctcactttactcttttttttttttttttttttttcatggagtctcgttctgtcgccaggcggagtgcagtggcacgatctcggctcacttcaaactccgcctcctgggttcaagcaattctcctgcctcagcctcctgagtagctggaattacaggcatgcaccaccatgcctggctaatttttgtatttttagtagagacggggtttcaccatgttggtcaggctggccttgaactcttgaccttgtgatctgcctgccttggacctcccaaagtgctgggattactggtgtgagcgaccatgcctggcactttactctttatggatttgactcaaattctttcttgcatgagatccaagaaccatgatgtctggatcaagacctctttctgataacagtttggctgtgtgtccccacccaaatctcatgttgaattgtaattcccaatgttgggggagagacctggtggcaggtgattggatcatgaaggtggatttcgtccttgctgttcttgtaatagtgagtaagttctcatgagatctggttgtttgaaagtgtgtagcatgtcccactttgctctctctgtccttttggccacatgaatatttgcctgcttcccctttgctttctgccatgattgtaagtttcctgaggcctccccagaagcaaaagtctgtacagcccacagaaccaggagctagttaaacctcttttctttataaattaccctgtctcaggtatgtctttacagcaatgtgagaatagactaagacaaattataacaagtaaagagattgaattactaattacagggaaaaaaaactttcccacaaagaaaagctctcaagggaatgcttcccaactcattctctgaggcctgtgacactgata

SEQ ID NO: 915060 - DNA, 4001 bp, Homo sapiens
ttctgtgcctagattttccagtaataattatccaccccactctgcctttcttccgcagatatcagatccttttagctgagttttaatggcttcatcattttatgttctctgtgacttttatgtaagcagcctttgaggctgacataaataataaataaatgaatgaacttctcacttgacatctccagatggacaacctgccactgcttcaaacttctcccatgtaaaactgaactcatcattcccctcctcttgtcatttaccttgctgcaaatcttcccacccacgccttacattagaaacctgacctctctcttcaaatctttcttcccttgctcctttaggcagtgtgaagagtcctagcaattcctccccactgctttgccagccagttgctgccccgaccagcatttattggacccgatctcctcaccagcctttctgccttcagtctcatcccattctaatccctcaccccaagcaccaagcacctcccgaaaagtccaaggttacttatagagtccaaacactgggctcccacaagctatttttctgagtttgtcccagcctgtgccttataccccaggctcaccggattcttgctcttgctgtcctaaatttgttcatacactcttcccagtttggaatgacctttttcctctgttagagtcccaaccaattttttttttttttttttttttttttttttttttcctgagacagggtctctcgctctgttgcccaggctggagtgcagtagtacgatctcagctcacagcaacctctacctcctgggctcaagccatcctcctgcttcagcctcctgagtagctaggactaaagtggtgtgccaccacacctggctaatttttggctttggtttttgtagagacggggttttcaccattgttgcccagggtggtctcgaactcctgggctcaagtgatccgcccgccttgccctcccaaagtgcggggactgcaggcgcgagccaccactcgggccccaaccaatcttttaagatcctgctcaaaagtctccgtccctgggaagtcttttctgaggcctctgaactcacttaaatggaatgtgcccctatttggcacctggtctcctccactgagatcggggcttcttgggcagggtacgcttaaggagaactggctgcattgggccacctgccttagcagggccaaccagcggaggagctggctgggtgctggcccgtcccaggggctgcggaagggttaagagagggctccagaagcctgagaaagcctaggttccggtttaacctcggatctagggccactgagtcaagacgggacttgcggggccgagggcagttctccggtgatcacccaggtctccagggcaatgagaaaaggagggggcactgcaggaaacgtacaggggcggtgttcctacaggtccagagctcctccaccaaactgggtcccaaacagctctcctactttcgggtggcctcgggaacgcagggggagacttgccagaacgcccgccattcagcgcccagctccgtccctctcgttctcggccgggatctccccgcggcccttgcacagcctcctcccccggcccgccctgccccccgctcagcgcggcctcccagccagggcgcaggggttatcaagcccgctaggcctttacccgcggctgcccagttccgggagccgtcggccgcggcccagaggggtcggctgggcggacgccggcgtctcccgctagctcccagagtccccggctcctcggcgtggcgcttcctgcccacctccgcccgcctgcgcggccctggcacctggcagcgggcgcgaaagaggacgagcccaggcactcgggcctgcggggtcctgggacgagggggtcagcgagaggggcccggtgctccggagcaggcgcagggctggaaccccggcgccacccgtcccgccatcgtcccccctccctgcctccatccccgcgggcactgccgctagtactgccctctgcaggttcccaagcgccagtgacacccagtgacctcactaaccacctcccaggctgggctgcttgttaggcccattttacagatgaagaaactgatgctcagaagggtgaaatgacttgtgcaggttgattcagttaggaagtggatgagccagaacaacatcccgggcctgagtcttcctaccttacccctgggcctccctgaggcgcggtgtccaggggattcttccctctgtccctctccgcctccccagcctaccttcaggcagagacctgagcctaaggcttccttgggttctgccttatgtatccggtcctcttcagagcccagacctatgtgtgtggctgctggtaaccttggttaagaaagaaggaagaatgggggctgaaggacaacttgcaccccaacctgctcttcgggtctgacacccattcatggcctagccctggggcttcccagttcccaaagcccccacccttatccctacacttccacacacttccacaccctgggctcacgtagcccagaaggaggagccacccaccacccacagccagggcacgccttcgtatgcaagcatgagtgtacgatgttcacacaacagagctgtgcactagggcacccacagagaggctctccagggcagggctgggaagaggacttactgaaaacaatgtggatgtttcatttagacatttgttcattcgttgtactgtggtattgggtagcactgagcacctcacccccacaagccaggtccagcactaggccctgggctgccaaccacagcaaggcaggcacctcactttaatggaatcaactaccacatttacaaatgatgtacttcaaggccgaggcaggaggatcacttgagaccaggagtttgagaccagcctgggtgacatagtgagaccctgtctctatttaaaatgaaaatagaaaataaaaatataaaaaacagacaaacaaatgatgtacttcagtggcagaggcaaggcattaggagagtctggaaaagggagtgcagaggaggtaacatttgtactggatctgaaaaaataaatcagaggaccagccgcggtggctcacacctgtaatctcagcactttggaaggctgggggtgagggcagatctcctgaggccaggagtttgggaccagctcaaactcgtcaccatggccaacatggtgaaacccccgtctctactaaaaataacaaaaattggccaggcatggtggctcatgcctgtaatcctagcactttgggaggccaaggcaggcggattgcctgagctcagaagttcacgaccaacctaggcaacgtggtgaaacctcatctctactaaaaatacaaaaattagccgggctgggtggtgcatgcctgcagtcccagctacacaggaggcttaggcaggagaatcgcttgaatccaggaggcggaggttgccgtgagccaagatcacgccactgcattccagcctgggagacagagcaagactctgtatcaaaaaaaaaaaaaaaatcaaccagacgtggtggcatgggcctgtagtaccagctactcagaaggctgaggcacaagaattgcttgaacttgggaggtagaggttgcagtgagccgagatcatgccactgcactctagcctgggagataaagcaaaaccgtgtctcaaaaataaaaacaaaagcacaaaaaattagctgggcatggtggcacatgcccataatcacagctactcaggagactgaagcaggagaattgcttgaacctgggaggcggaggttgcagtgagccaagattgcaccactgcactccaacctgggcaacagagagagaccctgtctcaataaataaataaatcagagaaaggaaaggcagggcatcccagcagcagggtgaacaacacatttgcattttaaaagaggttcttcaaggggagtagaataggatgtgggaggggaagtataggaaccccatgaatgtagtctcatgg

SEQ ID NO: 915061 - DNA, 4001 bp, Homo sapiens
ctttgccagccagttgctgccccgaccagcatttattggacccgatctcctcaccagcctttctgccttcagtctcatcccattctaatccctcaccccaagcaccaagcacctcccgaaaagtccaaggttacttatagagtccaaacactgggctcccacaagctatttttctgagtttgtcccagcctgtgccttataccccaggctcaccggattcttgctcttgctgtcctaaatttgttcatacactcttcccagtttggaatgacctttttcctctgttagagtcccaaccaattttttttttttttttttttttttttttttttttcctgagacagggtctctcgctctgttgcccaggctggagtgcagtagtacgatctcagctcacagcaacctctacctcctgggctcaagccatcctcctgcttcagcctcctgagtagctaggactaaagtggtgtgccaccacacctggctaatttttggctttggtttttgtagagacggggttttcaccattgttgcccagggtggtctcgaactcctgggctcaagtgatccgcccgccttgccctcccaaagtgcggggactgcaggcgcgagccaccactcgggccccaaccaatcttttaagatcctgctcaaaagtctccgtccctgggaagtcttttctgaggcctctgaactcacttaaatggaatgtgcccctatttggcacctggtctcctccactgagatcggggcttcttgggcagggtacgcttaaggagaactggctgcattgggccacctgccttagcagggccaaccagcggaggagctggctgggtgctggcccgtcccaggggctgcggaagggttaagagagggctccagaagcctgagaaagcctaggttccggtttaacctcggatctagggccactgagtcaagacgggacttgcggggccgagggcagttctccggtgatcacccaggtctccagggcaatgagaaaaggagggggcactgcaggaaacgtacaggggcggtgttcctacaggtccagagctcctccaccaaactgggtcccaaacagctctcctactttcgggtggcctcgggaacgcagggggagacttgccagaacgcccgccattcagcgcccagctccgtccctctcgttctcggccgggatctccccgcggcccttgcacagcctcctcccccggcccgccctgccccccgctcagcgcggcctcccagccagggcgcaggggttatcaagcccgctaggcctttacccgcggctgcccagttccgggagccgtcggccgcggcccagaggggtcggctgggcggacgccggcgtctcccgctagctcccagagtccccggctcctcggcgtggcgcttcctgcccacctccgcccgcctgcgcggccctggcacctggcagcgggcgcgaaagaggacgagcccaggcactcgggcctgcggggtcctgggacgagggggtcagcgagaggggcccggtgctccggagcaggcgcagggctggaaccccggcgccacccgtcccgccatcgtcccccctccctgcctccatccccgcgggcactgccgctagtactgccctctgcaggttcccaagcgccagtgacacccagtgacctcactaaccacctcccaggctgggctgcttgttaggcccattttacagatgaagaaactgatgctcagaagggtgaaatgacttgtgcaggttgattcagttaggaagtggatgagccagaacaacatcccgggcctgagtcttcctaccttacccctgggcctccctgaggcgcggtgtccaggggattcttccctctgtccctctccgcctccccagcctaccttcaggcagagacctgagcctaaggcttccttgggttctgccttatgtatccggtcctcttcagagcccagacctatgtgtgtggctgctggtaaccttggttaagaaagaaggaagaatgggggctgaaggacaacttgcaccccaacctgctcttcgggtctgacacccattcatggcctagccctggggcttcccagttcccaaagcccccacccttatccctacacttccacacacttccacaccctgggctcacgtagcccagaaggaggagccacccaccacccacagccagggcacgccttcgtatgcaagcatgagtgtacgatgttcacacaacagagctgtgcactagggcacccacagagaggctctccagggcagggctgggaagaggacttactgaaaacaatgtggatgtttcatttagacatttgttcattcgttgtactgtggtattgggtagcactgagcacctcacccccacaagccaggtccagcactaggccctgggctgccaaccacagcaaggcaggcacctcactttaatggaatcaactaccacatttacaaatgatgtacttcaaggccgaggcaggaggatcacttgagaccaggagtttgagaccagcctgggtgacatagtgagaccctgtctctatttaaaatgaaaatagaaaataaaaatataaaaaacagacaaacaaatgatgtacttcagtggcagaggcaaggcattaggagagtctggaaaagggagtgcagaggaggtaacatttgtactggatctgaaaaaataaatcagaggaccagccgcggtggctcacacctgtaatctcagcactttggaaggctgggggtgagggcagatctcctgaggccaggagtttgggaccagctcaaactcgtcaccatggccaacatggtgaaacccccgtctctactaaaaataacaaaaattggccaggcatggtggctcatgcctgtaatcctagcactttgggaggccaaggcaggcggattgcctgagctcagaagttcacgaccaacctaggcaacgtggtgaaacctcatctctactaaaaatacaaaaattagccgggctgggtggtgcatgcctgcagtcccagctacacaggaggcttaggcaggagaatcgcttgaatccaggaggcggaggttgccgtgagccaagatcacgccactgcattccagcctgggagacagagcaagactctgtatcaaaaaaaaaaaaaaaatcaaccagacgtggtggcatgggcctgtagtaccagctactcagaaggctgaggcacaagaattgcttgaacttgggaggtagaggttgcagtgagccgagatcatgccactgcactctagcctgggagataaagcaaaaccgtgtctcaaaaataaaaacaaaagcacaaaaaattagctgggcatggtggcacatgcccataatcacagctactcaggagactgaagcaggagaattgcttgaacctgggaggcggaggttgcagtgagccaagattgcaccactgcactccaacctgggcaacagagagagaccctgtctcaataaataaataaatcagagaaaggaaaggcagggcatcccagcagcagggtgaacaacacatttgcattttaaaagaggttcttcaaggggagtagaataggatgtgggaggggaagtataggaaccccatgaatgtagtctcatgggtgacagtttgggcctggtaatctcctctagcttcattccacttacctagccatgcaagacagtcacctggcagcagttcctggacacagctcagagcaatctgttttcctcccctgtcaccttccccatgggtacgacaaccatgtaggttttattaataacatatactttgactggcctcttgcagacagaagtactgtgagtcatgccgtgggcatgtcctctgttgtctgacctaggatgcggtgcagtggctcaccctataatcccagcactttgggaggccgaggtgggtggatcacctgaggtcagtagttcgagaccagcctgaccaacgtggtgaaaccccgtctctactagaaatacaaaaaaattagc

SEQ ID NO: 915062 - DNA, 4001 bp, Homo sapiens
aaatgtttttttaaaacatcttttctgggccaggcacagtggctcatgcctacagtcccaatactctggaaggccaaggcaggaggatcacttgaggcctggaggatgagaccagcctggacaacatagtgagacctcatctctacaaaaaaattttaaaattagctaggcatggtggcgtgtgcctgaagacctagttattggagaggctgaggcagaaggatcccttgagtccaggagttcgagactatgatgagctgtgatcacatccctgcactccatccagcctaggcaacagagtgagatctatatctccaaaaaaaaaaaaaaaatcccatattttccccaaatccctgtaatttacatcatagtgacaaagaaaatataaatatcaaaaagactaaaaatgtctcacttgaattttaaataaagcacatcagtttgaaaaacctcaaactttaataaaatttaaagtcaaaaagaaaaaaaaaaaacttttcattttttattccccaatccagggtggaggcatgttgccaggaattttaaggtctaggagaaggtaaaaaagatctacatctggtgtacagactgaacaccagatccagaaagtctgttacatggagaatgtaaaaactattaagcaatactttcaaggaaagttaattaaaaaagaaattgagtatataatgtctttctccaaaaatcacccagttcttcatatattgggaggtctttatctcatgcatattcacagcattcccttgagttaggatcagaataggtactgttttagaatttccacttaagtggccctttgaggctaaaagtctccctcaagtcgcctagcaaatcaaggtagactcaggacagcactccggtcctctggtttccttttgcttgatcaagtgagacagtggatacaaaagcactttgtaaactgtggaatcgctataccaatattcgtttttatcctagttaaataaatgggtgatgccaaaagggctgtgaagcaacaacgagagacacaaaacccagtcgtgccctgagactccatctatatgactcacattagtggggagacatgcagacaacagacttacctaggcagaatatcttgaaaagatttttcagaaggtgcttaagaatctggctttctgcagagtgcctagaaccaaacttgtaatatttttctaggtaatcccgagggttaaaatggcttagataggtgtccttggaggtgaagcctgattccattatgtctcacttctgtaccactggagcactgccctccttctctttcctccagaagccagggagtgaccctgcagaagttgtcttcctgagtctcaggctaacagcattccttccatcagttcagcccttcttttagaacagatggttggttaaacactaacagagaaatagaccacaaatgttctggctgttctaggaaatgatgaaattcccggagaagggagcttaggcgaacgggggtggagggtatggtagagggagggccatgagctgtatgcaatgcttgcccaagggatgaaggccagccgccagggattgtagaccagagggagcacttgagctcgtcaggaaaattatttaatgcataggaccccaaagttcagagagacaggacatcccctaacaagcaccatcattcttctcgttcttgccatgaatctcccaagaaaaggggtcacgaagaatggtttaaatttaaacatgtaaaagaaaggaaaaaaaagaagggaaagatgaggataggaaatgtattcagggctaaggaatgttggctgaagaaggagtctcagatgaagtctggaaagagtaattttaaaagcctggataaggctttctgtaaaatctagtccagccaaacatcccgagaccctctcctcatgcccagactctctctccatccctgccctaggcaactgcagcttcaccgaccactgccatgacccagtgtctggcaagcacctcctccctaagcttccccactcctttcagtcaatccaaatcctgatagttctttcaaagttaactttacttcctttaagaattatttaaggccgggggcggaggctcatgcctgtaatcccagcactttgggaggctaaggcgggcagatcacgaggtcaggagatcgagaccatcctggctaacatggtgaaaccccgtctctactaaaaaaaaaatacaaaaaattagctgggcttggtggtaggcacctgcagtcccagctacttgggaggctgaggcaggagaatggcatgaacccggggggcggagcttgcagtgagccaagatggcgccactgcactccagcctgggcgacagagcaagactctgtctcaaaaaaaaaaaaaaaaaaaaaaagaattctttaaatccccttttctgaactcactttgagacagagtagggatggggcttggcttcagctcactccccgctaaagcattctttcgtgcattcccactggtcacaaaacccacaccactacctcactgacaacatgtccattagtcatcctttcacttaattccaggaactggccttaggagataaacaatgttgccgggtgtcccaccttgggaaggaatgctgaataattgatttacagccttgttgccactggccagaccaccagttggcccattcctcaagataaccattgcaaccaagtaatgctgacctgcataccccacttctcgtatgctttgcccagcagcacatcctgcctctgacgtcaattcctgtgctttgcctaataaaaaaatccctaccggttttttccaaggagtcagcaagccagagaattcgctctctcttttgttgtggcccttatgccagggcgtaagttccagtaaagcatgtttgggaagactattggccttgtgtcaatttctatacactgagagccaaaaaacccatggtcagtaacattgtggccttagaatttattctacccagccaggcacttgatttttttttcttttttcttttctccctctctttttttttcggttgctatttatttttctttttaaaaactttttgtgggtacagagtaggtgtatatatttatgggttacatgagatattctgatagaggcctgcaatacaaaataatcacatcagggtaaatggggtatccaccacttcaagtacttattttttgtgtgttacaaacaacccaattatacttgtctagttatttttgaaggtacaaataaattattttttactatattcaccctgttgtgctagcaaatattaggtcttattcaatctttctaactttttttttttttttttgatgtggagtctcactctgtcacccaggctggagtgcagtgacgcgatctcagctcactgcaaccttcacctcttgggttccagcgattctcctgcctcagcctcccaagcagctgggactacaggtgcacaccatcacgcccagctaatttttgtatttttagtagagacggggtttcatcatattggccaggctggtcttgaactcctcaggtgttccgcctacctcggcctcccaaagtgctgggattacaggcgtgagccactgcgcctggcctctaactattttttatacccattaatgatccccacatcccccctacccacctcgctacccttcccatcctctcgtaaccatccttctactctctatctctgtgagttcagttattttagtttttagctcccataaataagtgagaacatgcaaagtttgtctttctgtgcctggtttatttcactcaacattatgacctccagttccatccatgttattgcaaatgacaggatctaattcttctttatgactgaatagtactccattatgtgtattaccacattgtctttatccattcatctgctaatggacacttagagtacttccaaatcttggctattgtgaacagtgctacaataaacatgggagtgctgatagctcttggata

SEQ ID NO: 915063 - DNA, 4001 bp, Homo sapiens
aaaaatacaaaaattagccaggtgtgctggtgcgtgcctgtagtcccagctactcagaaggctgaggcaggagaattgcttgaaccaggcaatcagaggttgcagtgagctgagatcactccactgcactccagcctgggcatcgcagcaagactctgtctcaaaaaaaaaaaaagaaagaaagaaagaaagaaaaagaaaacgcaatctccttgtgcaaagtaatatgccttcagtgacactatcttctgttaagcagtcaaataagaaggagatggaacagaagaatgaaatcagaaacatcatagaaaagaaagaaaaatattaacataaaataaatcagaaaaaagttttgcccagtatctttctcatattatagtagaatactggaatatcatcagccactaacccaaagcaagcactgagaactgcccagaaatgaataaccccattagacccatattttgtgagagttgtcagtaaaaacaaacagtgcagaaatcctctggataagctcatgagcaggctaaaagcactgataagtatatactaaaagcttgttattggttgatcctcctagtgaatcagatccttcagggtacttagcagctggcaataagtagcaatttttttaaggcaccaataacctggtctggcaggttcattcgtttcacttcagcagatattacctttggttcttgagagagtcaatctttttaacttgtacaagtgtaaatgataaatcaggaaaatgtgaccactttagagaacaacaaaggttttcaaagtgaagagtgcacatttctttaatgaatggaactgaccaaacctgtagcaatgtctgccagtgttaaacccattccaccagattatccaagttcaccttacttacccccaacatctggtggaggtagtgatactctggcccttggttatacagcaagaaggttttccagaaaagcaggacattcatggagagccagatgaactaaaccaatcagacatgagagacagaaaacaaaaattgaaaataattattacctgatgaatagaaaccacaggtaaattcttcgacacagtgctttcaatggaacctaaatcagtaactgcagaaagcattttcaattaaccagcaagctgaaaaccactcagaggaaaacaaatctgactttacccagccctttcacctgagactaagcatttgggttgcaaataggtttcctaaatgatttacagctatcccctgccgtacaaaatgagattaagaaattaatgacatcaccataccccaagcaaacagaagtaatctgggaaaagaacaaagggagcaaaaatgtttaaagggtaaaaagaaaagctgtattcacggaaaatgacctcttccctcttcctccacatctctcccatcaatgtgcagaaaaattctcatgcatttgggggacaggcgagggggtgggagggggagtgttcattgttatctccagcataaagttttgtaagttgagaatgttcgaattaagacaaaacttccacttccagcttcccacccgtgcacgctcagagaatgaatcaaaatcactgcaggacagagagaacgcaaggagagcctagcccgccatcctaccaggcagaggtgtttaaccccttcgttggcgagccagctcctccaggacacagccatgccgccggccccgccgcgctgcgctctgtgcccgccggaccgagaaggagcgggcggcggccggggcagcggttacagttgtgcggcctgccgggccgctgagcgaggaccgagggtcaaagactgagtggaagcccgaaggcccggcgccgagccagcccgggcggggtctgctacccagagccgggttttccgggcgccctgactcccacccgcaccgggtcagctctgcccactcagctgcccagacgcccagcgctctgagcgcgcggcccaggctgcaccagtctgctccgccgcgccggcccctttgtctaggggcgagcctgttgttgtggctgctgctgttcaggatgtcccgggtgggaacttggaggcgtcccccgcagcctctacccaggcctgccaggctccaaaatactggcaaacatgtgaacaatgctactcatactaaaagtggggaccctcgccgcccccttgtacacacacacacacacacacacacacacacacacacacaagaagacacagctcttttagactgattgttttcccccaaaaaagttcatctcaaagagccttggtaacgaaatttgagccggaaacagccttttgtgtgctagttcacgtttctcccacccttcctcagcaaattatcccactcccaaactaaagcccccctgacagccttacctaaggcttcccaccagccgccagtttctttatccccttgcccgcccatcccatactgataaaaaggttttaagacattactgaataagaagaacccagggaattaatggttaaagctgatgtaattcttaggggctctaggttaggttcactctattcgggaatctttttgttttaatacctagtctgtttgtaagtaataggaatcctctcaatcttgtaccagaggtccagtgaagagtgagaagtgtgtggagttgacccaggtacctattcgacactgcaacaaatcagtattagaaaagagagagaaaaaaatgtcattcatgtagaaaaaaatctgatgcaaaatagatatccaataaaggtttgttaaaccaataacttttctagatttaacaactaatgagagacagaaaagtttactactagttgcttaatcgaatggcttttaaactcttaaaataaaaaatcttacaacacaggccataggatataattaaaactaaaatttcaaaaaatactactactctcactacatgcaatatacttattccaattaatttaatgaactgattaatgattgcagtcctcagttttaaaaatcaaaatgaattcatatcaagtccctgttagacttcacacaattttctaatagcctgtttttcctgtttcatgcatgaccaaatccagaaagctgtcctaaatctttctgaagttagagagcatattgtttataaataatactatgttctttctgaccatgtgacacctaaaggatcagggaaagagcacacgaaaaacccaaggggtctctccactggaaggaagtcaaattctgggatgcactggtgctcctaagctttaatttcaatagatgggggcaggaggttcattggcagaataggttcttgtcatgagttgagaagcgtgaaacaattcaagaatagtaaaataagagaccatttttaaaagcttagagactttcagaacagcaaaaataacaaaaagacaaaaggtttaaaaaatggctccaactcttaataatgtacctactaagtcccaggctctgtctttgctacttcatatacaaaatctcactccattctcatagtagccctccatgtgcgtgttagcactctcactttaaagatgagaaacggactgccgggcgcggtggctcacgcctgtaatcccaacactttgggaggccgaggcgggtggatcacggagtcaggagatggaggccatcctggccaacatggtgaaaccccgtctctactaaaaatacaaaaattagccgggcgtggtggcaggcgcctgtagtcccagctattcaggaggctgaggcagaagaattgcttgaacctgggaggcagaggttgcggtgagccaagatcgcaccactgcacccaacccagcctgtgcgacagagcaagactctatctcaaaaaaaaaaaagagatgagaaacggaagctaaaagagatgaagaaatttgcttgaggtaatgaaactgggtttgcttccaattaaaacaacctataatcagttacttttgtaaaattattttgtaaaatgatggaatgcttatataaatgttggttattacttatggctattatttc

SEQ ID NO: 915064 - DNA, 4001 bp, Homo sapiens
ccataaaccaatagaaccatgggattagtggcttagggacaatttcactggaattttggaggcagaaatcaataattttataatagttaaaaatggtttatgtgttcagatttatcaaatgttatatatttataaactgatttcaattaaaatatctatctctaccaatataaataattttcatcctttgtttttagaatgtttttgaaaggattgggattgggctattcttagattttgaagacactggagaacagatggccacattttcaatatgacttaagatgatatttgacaataaaatacaataatcagtaactttatgttttctcattgcaacacttgcccccagatttctgggggaaaaaatcccaattgtttttcttattatttcttataatctattctcttgttttctattccggtgttaggatcccacatgattataatttgtaattttctcagtagtgaataaatacttatttgcttttactctgctaaatgtataacacatttaatgaaaattatcccagttttacacccttgtcaaaattcaaagaaatgagtttaaacttttgttgcttgacttttttgattcaaataaagttatgttcatagcaaagaacatgtaatgccaattttgtagtaaatgctacctcattgtcaatggcagagaaaagtaatcattttaggctaaacatagctatttttatttttttaaccaggctttcaagaaatattataacaaaaaacagaagcatcgagaaatacattccagaaatcatgcactttagactgaaattgtttcctattccaaagtgatggaaacattaatgattgtgttcatttttagtcttaacaggtcataagtttcccttgaaaccatgcaataatgaattactaattagtaatgagaacttgcttcttcagcaagtgcttgcctctccctaagacaggtcaatgtggggtgaaacttttcacctgggtgtatgctgcaggcctctgcacttacggtattaactaaaagtttattccctgaaattactaggcagcaatctttgtgaaaaaatggttggctgattttattctgtctctttttgcctaggaggttacatgggggagctgcatttttgagccgcatttatttttacaacagtctgaatgaactgaatctgtaggcgtgattgagaatgcgaaataaatacagtgctgtggctcctacccacagaggatacagattatactgtcaatggctgaatatatacacatgaaattaactaaaagatgtaattgcagaggggtcccgtatatcggtagtattagcaatatcaccatctctcagttatcttccctctcaaccctcccaaggtatctcctcagccaatatatgattaagaaatacatataattaacagacaacatattagcctaagtttgtacctgaagcctgactacagaaattaggagaaactgtaaatgttcatctaccttgctcccaattactaggaaatctttctattcctagctccatctggagtctctctcttggaatccaagcttacacggttagctttttaaggactctggagcattttgctttgatctttaccttcccactttttccgttccccaccttcactttcatcacaagcagcttacttggatgttgattaaaaagggcccaaaacttgtcattccttccttgagaagtggaatttctttctctacccctttagtttgggctgatccaatgattgttttcaaccagagaatatggcagtagaagccctatgtaatactaagactgaatattaagagatttgcttacatttttaagcacttgaatgccatctcttcgaatccagcaggcatgctgtgagaagttcaagccatgtggagagacgatgtaaaggagtaacaacacattcggcttagcagcctcatctgagatcccagaccataactagcaccagctgcagccagccatttgagtgaagtgtgctgggagttctaccagcagagcctccagatgactgcagaaccagctgacatctgatgcaatatagcagaacgactcagctgaggacctaattgatagagaagcatgagagataattaaaagttgttgggcagggcactgtgactgacacgagtaatccagcactttgggaggccgaggcaggcagatagcttgtgcccaggagttcaagaccagcctgggcaatgtggcaaaccccatctctacacacaagaagaatacaaaaattagctgggtgtggtggcatgtgcctattgtcccaactgcttggggggctgaggcaggaggatcacttgagccggggagaagtcaaagctgcaatgagccaaaatcatgctgtcagaggcgatcaaaccaaagctactctatcttgaataggggatgggtaaaatagggctgaagccagctgcgttcccaggaggttaaggtattcttagttgcagatgagttaggaggtccgcacacggtacagagcacaaagaccttgctgatgaaacagcatattgtaaagaagccagcccaagccagccaaaatcacgagggcaacaaatgtgacctctggttgtcctcactcctcattatgtgctaattataatgcattagcgtgctaaaagacactcccactagcaccataacagtttataaatgccatggcaacatgaggaagtcaccctgtatggtctaaaaaggggtggaaccctcagttctgggaattgcccacccctttcctggaaaactcataaataatccactgctagtttagcatatgtcaaaaagtaacagtaagtataagcagctgagcagcctatgctgctgcctagcctatggagtagcccctctctcttcctttactttcctaataaacttgctttcactttactctatggagtcatagagtgtgtgagatccaagaaccctctcttggggtctggctcaggacccctttctggtaatagagccactgcactccagcctgggagacaaaataagacctcatttcaagaaaaaaaaaagaaaaaaaaagaaaatttgttgttttaaaccactttattgggttgatgtgttgcacagaaatgcttgacttaaatactaatttttatctgaatattttgcttattaaatttcctaagaatgcttcatctcagtaaattattaaggttttttttttttaaatatgagattcatttaatgagagacaatggactttgatatcagtgagaactggtttaaatactttattttttattaactatatgactttaggccaggtattaaacttctgtaaattctttcttcaacttgaagtataactaaaaaaaaaaaaaaaaaaaaaatcccttaaattttagtgccccctctttaagtaacatctacttcttatggttgttatggggattaagtgaatcaatgtgtaaaaaaaaaaaatagtacagtttctggctcacattaggtacttaaaacatatcagtttccttctcatttaccacatccacattgtaggcgaattttaattttttctttctcttactctcagttatatatgttcccatctttttatctgtcaaaagacagagaaaggcaactttcaaacaaacaaactaactgaccaactaataaacaaataaatttccttgatgtttgcctgttgtcaggccatccatccaaattctctgtatgtcacaatgtggcttttaaaactcttagtgtggataccaatgaattccgcttgaataaaccttagttgccagtctttttatagaccaagtggctcatggagggaaaggggagtgtggccacaaattccacctcacagctccctcaacactaatagctatttagttttgatttctccctcccctatccctcattcaaggcctcactagccattgaaaattttctcggtaatttgataatctgtcagtgctcctactagtttctctttccaataatgtattgttcctgt

SEQ ID NO: 915065 - DNA, 4001 bp, Homo sapiens
gtttcaagacagttcctggattggatggatgaaagaaataaatgaaatgggtttagctttacagactatttttttcaacccattggcttaaaacctagaagttaaactttataaagtgtgtgatcaacagattatgatattactttgttgtataaaaaattaattaattaattcaactgcaacttgttgcaggcttaatatgtgccaatcactagtctgggtactgagaattacagataaataagatctctccatgtaaaacatagaagggagagctggttccactgaatttgtctgagctcgtcttaattttaagtagtcattaaaccatgaaaaaaaataaaaaagcaaaatgtgtttttttctgcacccccccactcaccaaaatgcaaaatctattttttcaggttccctaagtttttgcagggttttacactttttgcttgttgcttagaaaatgcaatctcagccgggcatggtggctcacgcctgtaatttcagcactgtgggaggctgaggcaggcggatcacttgaggtcaggagttctagaccagcctgaccaacatggtgaaaccttgtgtctactaaaaatacaaaaattagccaggtgtgctggtgcgtgcctgtagtcccagctactcagaaggctgaggcaggagaattgcttgaaccaggcaatcagaggttgcagtgagctgagatcactccactgcactccagcctgggcatcgcagcaagactctgtctcaaaaaaaaaaaaagaaagaaagaaagaaagaaaaagaaaacgcaatctccttgtgcaaagtaatatgccttcagtgacactatcttctgttaagcagtcaaataagaaggagatggaacagaagaatgaaatcagaaacatcatagaaaagaaagaaaaatattaacataaaataaatcagaaaaaagttttgcccagtatctttctcatattatagtagaatactggaatatcatcagccactaacccaaagcaagcactgagaactgcccagaaatgaataaccccattagacccatattttgtgagagttgtcagtaaaaacaaacagtgcagaaatcctctggataagctcatgagcaggctaaaagcactgataagtatatactaaaagcttgttattggttgatcctcctagtgaatcagatccttcagggtacttagcagctggcaataagtagcaatttttttaaggcaccaataacctggtctggcaggttcattcgtttcacttcagcagatattacctttggttcttgagagagtcaatctttttaacttgtacaagtgtaaatgataaatcaggaaaatgtgaccactttagagaacaacaaaggttttcaaagtgaagagtgcacatttctttaatgaatggaactgaccaaacctgtagcaatgtctgccagtgttaaacccattccaccagattatccaagttcaccttacttacccccaacatctggtggaggtagtgatactctggcccttggttatacagcaagaaggttttccagaaaagcaggacattcatggagagccagatgaactaaaccaatcagacatgagagacagaaaacaaaaattgaaaataattattacctgatgaatagaaaccacaggtaaattcttcgacacagtgctttcaatggaacctaaatcagtaactgcagaaagcattttcaattaaccagcaagctgaaaaccactcagaggaaaacaaatctgactttacccagccctttcacctgagactaagcatttgggttgcaaataggtttcctaaatgatttacagctatcccctgccgtacaaaatgagattaagaaattaatgacatcaccataccccaagcaaacagaagtaatctgggaaaagaacaaagggagcaaaaatgtttaaagggtaaaaagaaaagctgtattcacggaaaatgacctcttccctcttcctccacatctctcccatcaatgtgcagaaaaattctcatgcatttgggggacaggcgagggggtgggagggggagtgttcattgttatctccagcataaagttttgtaagttgagaatgttcgaattaagacaaaacttccacttccagcttcccacccgtgcacgctcagagaatgaatcaaaatcactgcaggacagagagaacgcaaggagagcctagcccgccatcctaccaggcagaggtgtttaaccccttcgttggcgagccagctcctccaggacacagccatgccgccggccccgccgcgctgcgctctgtgcccgccggaccgagaaggagcgggcggcggccggggcagcggttacagttgtgcggcctgccgggccgctgagcgaggaccgagggtcaaagactgagtggaagcccgaaggcccggcgccgagccagcccgggcggggtctgctacccagagccgggttttccgggcgccctgactcccacccgcaccgggtcagctctgcccactcagctgcccagacgcccagcgctctgagcgcgcggcccaggctgcaccagtctgctccgccgcgccggcccctttgtctaggggcgagcctgttgttgtggctgctgctgttcaggatgtcccgggtgggaacttggaggcgtcccccgcagcctctacccaggcctgccaggctccaaaatactggcaaacatgtgaacaatgctactcatactaaaagtggggaccctcgccgcccccttgtacacacacacacacacacacacacacacacacacacacaagaagacacagctcttttagactgattgttttcccccaaaaaagttcatctcaaagagccttggtaacgaaatttgagccggaaacagccttttgtgtgctagttcacgtttctcccacccttcctcagcaaattatcccactcccaaactaaagcccccctgacagccttacctaaggcttcccaccagccgccagtttctttatccccttgcccgcccatcccatactgataaaaaggttttaagacattactgaataagaagaacccagggaattaatggttaaagctgatgtaattcttaggggctctaggttaggttcactctattcgggaatctttttgttttaatacctagtctgtttgtaagtaataggaatcctctcaatcttgtaccagaggtccagtgaagagtgagaagtgtgtggagttgacccaggtacctattcgacactgcaacaaatcagtattagaaaagagagagaaaaaaatgtcattcatgtagaaaaaaatctgatgcaaaatagatatccaataaaggtttgttaaaccaataacttttctagatttaacaactaatgagagacagaaaagtttactactagttgcttaatcgaatggcttttaaactcttaaaataaaaaatcttacaacacaggccataggatataattaaaactaaaatttcaaaaaatactactactctcactacatgcaatatacttattccaattaatttaatgaactgattaatgattgcagtcctcagttttaaaaatcaaaatgaattcatatcaagtccctgttagacttcacacaattttctaatagcctgtttttcctgtttcatgcatgaccaaatccagaaagctgtcctaaatctttctgaagttagagagcatattgtttataaataatactatgttctttctgaccatgtgacacctaaaggatcagggaaagagcacacgaaaaacccaaggggtctctccactggaaggaagtcaaattctgggatgcactggtgctcctaagctttaatttcaatagatgggggcaggaggttcattggcagaataggttcttgtcatgagttgagaagcgtgaaacaattcaagaatagtaaaataagagaccatttttaaaagcttagagactttcagaacagcaaaaataacaaaaagacaaaaggtttaaaaaatggctccaactc

SEQ ID NO: 915066 - DNA, 4001 bp, Homo sapiens
tgtaatagatgagataaagcttccactgaaaaacgtcctattcattaagttacacctaatggggaaatactagaaaacaaaaccaaaaagttatcagacctcatgtgtttattagaagaaaccttttcttgtttattgaattataattatttatttgttggtttttccattatattgtaagcaacttgaggggcgaggtgaggtcttactctctgggtgcccatctgaaatgtataggtttcaagacagttcctggattggatggatgaaagaaataaatgaaatgggtttagctttacagactatttttttcaacccattggcttaaaacctagaagttaaactttataaagtgtgtgatcaacagattatgatattactttgttgtataaaaaattaattaattaattcaactgcaacttgttgcaggcttaatatgtgccaatcactagtctgggtactgagaattacagataaataagatctctccatgtaaaacatagaagggagagctggttccactgaatttgtctgagctcgtcttaattttaagtagtcattaaaccatgaaaaaaaataaaaaagcaaaatgtgtttttttctgcacccccccactcaccaaaatgcaaaatctattttttcaggttccctaagtttttgcagggttttacactttttgcttgttgcttagaaaatgcaatctcagccgggcatggtggctcacgcctgtaatttcagcactgtgggaggctgaggcaggcggatcacttgaggtcaggagttctagaccagcctgaccaacatggtgaaaccttgtgtctactaaaaatacaaaaattagccaggtgtgctggtgcgtgcctgtagtcccagctactcagaaggctgaggcaggagaattgcttgaaccaggcaatcagaggttgcagtgagctgagatcactccactgcactccagcctgggcatcgcagcaagactctgtctcaaaaaaaaaaaaagaaagaaagaaagaaagaaaaagaaaacgcaatctccttgtgcaaagtaatatgccttcagtgacactatcttctgttaagcagtcaaataagaaggagatggaacagaagaatgaaatcagaaacatcatagaaaagaaagaaaaatattaacataaaataaatcagaaaaaagttttgcccagtatctttctcatattatagtagaatactggaatatcatcagccactaacccaaagcaagcactgagaactgcccagaaatgaataaccccattagacccatattttgtgagagttgtcagtaaaaacaaacagtgcagaaatcctctggataagctcatgagcaggctaaaagcactgataagtatatactaaaagcttgttattggttgatcctcctagtgaatcagatccttcagggtacttagcagctggcaataagtagcaatttttttaaggcaccaataacctggtctggcaggttcattcgtttcacttcagcagatattacctttggttcttgagagagtcaatctttttaacttgtacaagtgtaaatgataaatcaggaaaatgtgaccactttagagaacaacaaaggttttcaaagtgaagagtgcacatttctttaatgaatggaactgaccaaacctgtagcaatgtctgccagtgttaaacccattccaccagattatccaagttcaccttacttacccccaacatctggtggaggtagtgatactctggcccttggttatacagcaagaaggttttccagaaaagcaggacattcatggagagccagatgaactaaaccaatcagacatgagagacagaaaacaaaaattgaaaataattattacctgatgaatagaaaccacaggtaaattcttcgacacagtgctttcaatggaacctaaatcagtaactgcagaaagcattttcaattaaccagcaagctgaaaaccactcagaggaaaacaaatctgactttacccagccctttcacctgagactaagcatttgggttgcaaataggtttcctaaatgatttacagctatcccctgccgtacaaaatgagattaagaaattaatgacatcaccataccccaagcaaacagaagtaatctgggaaaagaacaaagggagcaaaaatgtttaaagggtaaaaagaaaagctgtattcacggaaaatgacctcttccctcttcctccacatctctcccatcaatgtgcagaaaaattctcatgcatttgggggacaggcgagggggtgggagggggagtgttcattgttatctccagcataaagttttgtaagttgagaatgttcgaattaagacaaaacttccacttccagcttcccacccgtgcacgctcagagaatgaatcaaaatcactgcaggacagagagaacgcaaggagagcctagcccgccatcctaccaggcagaggtgtttaaccccttcgttggcgagccagctcctccaggacacagccatgccgccggccccgccgcgctgcgctctgtgcccgccggaccgagaaggagcgggcggcggccggggcagcggttacagttgtgcggcctgccgggccgctgagcgaggaccgagggtcaaagactgagtggaagcccgaaggcccggcgccgagccagcccgggcggggtctgctacccagagccgggttttccgggcgccctgactcccacccgcaccgggtcagctctgcccactcagctgcccagacgcccagcgctctgagcgcgcggcccaggctgcaccagtctgctccgccgcgccggcccctttgtctaggggcgagcctgttgttgtggctgctgctgttcaggatgtcccgggtgggaacttggaggcgtcccccgcagcctctacccaggcctgccaggctccaaaatactggcaaacatgtgaacaatgctactcatactaaaagtggggaccctcgccgcccccttgtacacacacacacacacacacacacacacacacacacacaagaagacacagctcttttagactgattgttttcccccaaaaaagttcatctcaaagagccttggtaacgaaatttgagccggaaacagccttttgtgtgctagttcacgtttctcccacccttcctcagcaaattatcccactcccaaactaaagcccccctgacagccttacctaaggcttcccaccagccgccagtttctttatccccttgcccgcccatcccatactgataaaaaggttttaagacattactgaataagaagaacccagggaattaatggttaaagctgatgtaattcttaggggctctaggttaggttcactctattcgggaatctttttgttttaatacctagtctgtttgtaagtaataggaatcctctcaatcttgtaccagaggtccagtgaagagtgagaagtgtgtggagttgacccaggtacctattcgacactgcaacaaatcagtattagaaaagagagagaaaaaaatgtcattcatgtagaaaaaaatctgatgcaaaatagatatccaataaaggtttgttaaaccaataacttttctagatttaacaactaatgagagacagaaaagtttactactagttgcttaatcgaatggcttttaaactcttaaaataaaaaatcttacaacacaggccataggatataattaaaactaaaatttcaaaaaatactactactctcactacatgcaatatacttattccaattaatttaatgaactgattaatgattgcagtcctcagttttaaaaatcaaaatgaattcatatcaagtccctgttagacttcacacaattttctaatagcctgtttttcctgtttcatgcatgaccaaatccagaaagctgtcctaaatctttctgaagttagagagcatattgtttataaataatactatgttctttctgaccatgtgacacctaaaggatcagggaaagagcacacgaaaaa

SEQ ID NO: 915067 - DNA, 4001 bp, Homo sapiens
ggcaggttcattcgtttcacttcagcagatattacctttggttcttgagagagtcaatctttttaacttgtacaagtgtaaatgataaatcaggaaaatgtgaccactttagagaacaacaaaggttttcaaagtgaagagtgcacatttctttaatgaatggaactgaccaaacctgtagcaatgtctgccagtgttaaacccattccaccagattatccaagttcaccttacttacccccaacatctggtggaggtagtgatactctggcccttggttatacagcaagaaggttttccagaaaagcaggacattcatggagagccagatgaactaaaccaatcagacatgagagacagaaaacaaaaattgaaaataattattacctgatgaatagaaaccacaggtaaattcttcgacacagtgctttcaatggaacctaaatcagtaactgcagaaagcattttcaattaaccagcaagctgaaaaccactcagaggaaaacaaatctgactttacccagccctttcacctgagactaagcatttgggttgcaaataggtttcctaaatgatttacagctatcccctgccgtacaaaatgagattaagaaattaatgacatcaccataccccaagcaaacagaagtaatctgggaaaagaacaaagggagcaaaaatgtttaaagggtaaaaagaaaagctgtattcacggaaaatgacctcttccctcttcctccacatctctcccatcaatgtgcagaaaaattctcatgcatttgggggacaggcgagggggtgggagggggagtgttcattgttatctccagcataaagttttgtaagttgagaatgttcgaattaagacaaaacttccacttccagcttcccacccgtgcacgctcagagaatgaatcaaaatcactgcaggacagagagaacgcaaggagagcctagcccgccatcctaccaggcagaggtgtttaaccccttcgttggcgagccagctcctccaggacacagccatgccgccggccccgccgcgctgcgctctgtgcccgccggaccgagaaggagcgggcggcggccggggcagcggttacagttgtgcggcctgccgggccgctgagcgaggaccgagggtcaaagactgagtggaagcccgaaggcccggcgccgagccagcccgggcggggtctgctacccagagccgggttttccgggcgccctgactcccacccgcaccgggtcagctctgcccactcagctgcccagacgcccagcgctctgagcgcgcggcccaggctgcaccagtctgctccgccgcgccggcccctttgtctaggggcgagcctgttgttgtggctgctgctgttcaggatgtcccgggtgggaacttggaggcgtcccccgcagcctctacccaggcctgccaggctccaaaatactggcaaacatgtgaacaatgctactcatactaaaagtggggaccctcgccgcccccttgtacacacacacacacacacacacacacacacacacacacaagaagacacagctcttttagactgattgttttcccccaaaaaagttcatctcaaagagccttggtaacgaaatttgagccggaaacagccttttgtgtgctagttcacgtttctcccacccttcctcagcaaattatcccactcccaaactaaagcccccctgacagccttacctaaggcttcccaccagccgccagtttctttatccccttgcccgcccatcccatactgataaaaaggttttaagacattactgaataagaagaacccagggaattaatggttaaagctgatgtaattcttaggggctctaggttaggttcactctattcgggaatctttttgttttaatacctagtctgtttgtaagtaataggaatcctctcaatcttgtaccagaggtccagtgaagagtgagaagtgtgtggagttgacccaggtacctattcgacactgcaacaaatcagtattagaaaagagagagaaaaaaatgtcattcatgtagaaaaaaatctgatgcaaaatagatatccaataaaggtttgttaaaccaataacttttctagatttaacaactaatgagagacagaaaagtttactactagttgcttaatcgaatggcttttaaactcttaaaataaaaaatcttacaacacaggccataggatataattaaaactaaaatttcaaaaaatactactactctcactacatgcaatatacttattccaattaatttaatgaactgattaatgattgcagtcctcagttttaaaaatcaaaatgaattcatatcaagtccctgttagacttcacacaattttctaatagcctgtttttcctgtttcatgcatgaccaaatccagaaagctgtcctaaatctttctgaagttagagagcatattgtttataaataatactatgttctttctgaccatgtgacacctaaaggatcagggaaagagcacacgaaaaacccaaggggtctctccactggaaggaagtcaaattctgggatgcactggtgctcctaagctttaatttcaatagatgggggcaggaggttcattggcagaataggttcttgtcatgagttgagaagcgtgaaacaattcaagaatagtaaaataagagaccatttttaaaagcttagagactttcagaacagcaaaaataacaaaaagacaaaaggtttaaaaaatggctccaactcttaataatgtacctactaagtcccaggctctgtctttgctacttcatatacaaaatctcactccattctcatagtagccctccatgtgcgtgttagcactctcactttaaagatgagaaacggactgccgggcgcggtggctcacgcctgtaatcccaacactttgggaggccgaggcgggtggatcacggagtcaggagatggaggccatcctggccaacatggtgaaaccccgtctctactaaaaatacaaaaattagccgggcgtggtggcaggcgcctgtagtcccagctattcaggaggctgaggcagaagaattgcttgaacctgggaggcagaggttgcggtgagccaagatcgcaccactgcacccaacccagcctgtgcgacagagcaagactctatctcaaaaaaaaaaaagagatgagaaacggaagctaaaagagatgaagaaatttgcttgaggtaatgaaactgggtttgcttccaattaaaacaacctataatcagttacttttgtaaaattattttgtaaaatgatggaatgcttatataaatgttggttattacttatggctattatttcataactctgtaagaggggactgagatctgtttatgttgctttaccaggaaacagtactccaagccatccccaagggacagagctagtgtcctgttacgcaggaactctcattaatgagattgtttgcaatacaattttctctaagccagattgttttattattattattattattattattattattattattattattttagatggagttttgctcttgttgcccaggctggagtgcaatgtcgtaatctcggctgactgtaacctccacctcctgggttcaagcaattctctcacctcagcctcccaagtagagtagctgggatcacaggcatgtgccaacccgcccagctaatttgtgtatttttagtagagacggggtttcaccacattggccaggctgcttttgaactcctgacctcaggtgatccaccagcctcggcctccctaactgctgggattacaggcgtgagccaccgtgcctggccaaccagattgtttaatgacatagttgctgtatttcccaaactaggaaaggccattcttgaaagtaatggggagagagttctgtagctacatcagtattttaaatattataagaaaattcacactttctccaggaacagactttacaataaaaactcaaatgacaga

SEQ ID NO: 915068 - DNA, 4001 bp, Homo sapiens
gaatctagggtcccttcatctctggcctgcctttctcttggaatctgaacactccaggcttacctctcggagatgtccagtagagccaggtctttagcatggcggctctggaacatggccaggaagagcgaggcagggccagggccagggccaggacctgggcggggtctcggctccagaggggcacagaaagctgtgaacacgggatttcctgcccagtaggctccaggtgggtgagcatggaatcggcctcgaataagcacgagtttgttgcctgcactctggcgcctgagggacttggaggtgttgaagcggcagcggaagaggcgatctagatagatgaagagaaaaacagataagagggtgagtggctgagagagagacagtggatggtggggagaagggcagcaggtgggaaattggaccgaggaagggagaagggagtccttaccagtgtccagggcagagggcagggtgagttgctggcgcacagtgaggtggtcagctgggtcaatgatgtcgtagatgctgtcaccctgggcaaccaggtccacctggagggaggaaaagaagagatgaccattagggagaacagcaggagccaatctttgatctacagtatcttgtagggtataacctctccctccatagtaattcccagttcctcaggagtggaaggctcacggcacccactccatgcccagcctcagctgaaaggacccttagcactcaccatggagtggcccagatgctcgctcacactctcagacaggtagagcaatttcccctcggctgtgaacacaagcagaaagccgggtagtgccgctacgatgtcctcaagctcttgagctgagagaagccccgtggggcccgccagaggagtgcctgtagggcgagaagacgtagtgcgtcaggagtaagactgggaggcagagaagaagtgaggaaggcatggtctgagtttcagagaatccagaggaatttctcatggacctgcctctgcaaacacctgttgacccgctgcccgcagctcttggccagggaacctgttgctgtatctccatagcccacaagccctcgacttctaaagcggggtcggctcctctcggctcttaatttcagaaccgcggacagagctccaaagcggctctgaatttcagaaccgcggacagagctccgaagccgactgtgggttcagaaccatggacagagccatacacggccggcgcagccgtcagcaccatgggcagcgccccgaaggcgacaggagatccctttcagcaccgcggacagtagctatgttcccctaggctcaggcagctccatccctgcaacttcccgggcttccctccccggctcccggagcgcttctgcactggcgggcaccgaggccgctctgtcctggctcttatcctctcataatctggtgttagggacaccgtccaggctctctaactctcattcagaactaaggtgaggtctggagggagctcaggaggaaaagtagaaagtcccgaatctcccgagtcccgaatctccccagctcgccagcacgctgccctagacatgcgacagccccagcgggttccctcagctccagggtctccggcgcctggcagctcggatctgcggtagccccagcatgctcaccaccagcgaagaagacgcccttgcgagtgtagatgcaggcgaggctcatgatgtgcaggtaggacagccggaccttgtccgcttcggccagcggcagcagctccttgaggttccggatctcggcgttgatctggtcccggcgcgccttggaggcgcccttggtggagcggtacatgaccggcggctgcggagctccagctcgggtgcccgagcacctgcgctcccgtcccgacgcaccggcggcttcctcctccgtgcttccccgtctctcgctcaggctcgctctctgctctcctgggctccgctcggctgcgctgcccccctcgcctgcctcacgccgccttatatagctcctgccaggcgtggggggctcgttttagagccgggggggcgggagagcgggaggctgggctaagcaagctgcagcgggagccgctgactggggaggggggctcctcctcccgcccggcttccgacgtcatctcatgacgtagaatgagagagggagggaggcgggcgaggggggagcaggaggctgcggagggggccaagcctggcgggagctgagcggagaggaaggcgctgcgttaggaaagcttgaatggagtgtggggaccctggcgtctgaatgcgttcagttgagggaagcgacagggccaggtttagggcggcctgaagcccgcggcaggagtccgcagagggcagagaggggccggcactgacactaatttttctgaggagttgagggaatggggaagaacagggttgtctacaaatccccctcgttacttgacagacaaggtcacgttcacatgcagggaaggaggactttccttggcctccgtgggacaggtcactgctggggttcctctctggggactatttaacctgggattcccttggccatttttagagaacaaattcccgcccccgcttcccaaatcgggccttggcggcttatcagggggtgttcatgggggtctaagtcccgaggatgggtggaaagggagtccggtgggaaagggaccagctgaatttggcgttgatcctgttttcccacagccaagaatagaaaccaacatcagcgctgtagtctgcagtgattcgtggtttccctctcagctaattaaccttactgaaggggaaactgaggcagggacgtgggggcacggcgaggacctgggtctgcacttaggcatcccttccccccgttgccggcccccaagcgagcgcttccccccgccctgctgccagcctctgtctccccgcgggccgggggcgggggcggggccgggggaatcccagctccatattaggacaggaatcctccggcggctgccgcggctgcggcgggcggggcctggctgcctccgcaccgctccggagggctccccgccctgcctaggcgggcaagatgggggagcagctgagaagcgaaggggcagcgccggaccctccatgacccctgcacctaccagggaccctgtatttttgccaggttccctccacccctctccacatttgcgcctctaaggctcctggctctgcctctccaccttcagctctccactttccaccttcgtttctttttctgtcctttcatatccttttctatccttttcatatcctgtcacctttgccctatccccacccccccacacacccgctttttttctcttttcaccacagatgattgctctctacaggggcgaggatgtgccgttcttatcctgggattcaataatgcaagaagcaagtgggctagggaatgttcttatctgaaatctcgtttgatggagtagctgtgtgcgcatggaatcacttaagtggctggaaatgaggccacttaaaaattggagggtgggactgggaagtcccagtcacacaggaagcatggagatgaactttgacatcaaaaaggacaatttggggccagggaactctccgctcctcatggaaaggggtggtagtaagagaggtagagtgggaggagaggcggctgaggagaagtatgtcttagaagaggtgtacaaggtgtggagaccctattctggtgtcttatgcattttggcagaggttggggccatcctgtggtcagtgtcacagctgaggtggagggaacgatgtccgcttatctgtctgccactgtctctaaccccattgacctggatgacagagagatgattcctcctggacatgggtctgtgttgcttctttcttctcaatctgacctctaatgtacctacccacccctctctcaatcttccatttgaacaatcccttgatctttggatccccttccgtatgaaattccaggggggttgttcctgtgttcttcattcactgatgct

SEQ ID NO: 915069 - DNA, 4001 bp, Homo sapiens
ctcatatgagaaagatatacacgatatgtatctatttaagatgtaaaatgataaacgacaaaagtaagagcattaggcatggggaggcttttttgtattgtatactcctgcccatctgaaatttttagtaagaatagaattatctcaactttcagactaaaaggtatagtgtgaaagcttcagggagatttgtaacaacagtaaataaaatgaattgcgaggacaactgtctgggaagccatgacagaagtccaaaagagaagtaatggcaggcacattgcgggattggtggcagtgaaaatggaatgtgaatgacaaagatttttaagataagaaaaccatggctggcgttttttgtccattaaatgaaaagcaggaagtcagcagagtagctggtttgtggagaaagaatactcacacatcgatgtgaattatttcaattagaaaatgatactgctttcttagggctttcttaactaggggtgattctgccctccaggggacatactagcaatatctagagacattttcactgatcacaactgggtaagggtagggtggggaacgggtgtcctactgtaatctagtgaatagaagccaggaatgctgctaaacatcctacaatgtttgagcacaggatagctccccacaataaagaattatgaggcccaaaatgttaacagtactgaggctgagaaaccatgtttaagactatagttaccgaaactcaactagattaccaaactgccaaaactcagaattcttaagcaaaagattaatcagacattaacaaaacattaaacttgtcattaagtttcttcaaaaatggatggtggaaccatttccgtttaacgtttcctgcaaaatgtgcttatcaagagccctgcgcaaataacatttttgtggacagcgctgggcatttaaaagaggcacaagacaaatgggttttccgaacaataaaataatagtagtaatggctgtgaatactatgggaggtttcatcacagatgcttgccatttacttttagggacgtcgcatacgacgtccgtaaattactggctcgggttttgagctttacctggctctcgtcccctgtagtacaatcctctttattctttcaggggacaaacaacaacaaaacccgtctctcacacagacaatacaccctgacagacaagtgacccacaaacaatccctcctcaaatgaaggtaaaactagggctagaaaacgttcaactaatttaaggcaattaaccctctgaaatttttcgctgatcaaaggaacaggaattgctgttttaaaatatgcaactggcatttcacacctctacactggacgacgtattgcgtggaggatggagaaggaagatcacccctactcccaaattcgtagttataagggcgggttattagaagggcgccaggaaggtctctctacaaagatggggggccggggaactccctatttgccctattttggtcccaacactgaaccaaggaaattgcgcccaaggttgaagcacacgcaatccgtccgtcatgcagacaaatgctctttcaggggtcctaattaagtgtggaggcctgactttccttccgaatccgccccaggtgttccaccccgagcttcccctcgggcttcccctcgccacgcagcctctgaagagaggagcatctacatacaaagaggcttaaactgcccagaacctccgaatgacgaagaatcaccgccagtctcaactcgtaagctgggaggcaaaaccccaaagcttccctaccaagggaaaacctttggcctcaaaggtccttctgtccagcatagccgggtccaataaccctccatcccgcgtccgcgcttacccaatacaagccgggctacgtccgagggtaacaacatgatcaaaaccacagcaggaaccacaataaggaacaagactcaggttaaagcaaacacagcgacagctcctgcgccgcatctcctggttccagtggcggcactgaactcgcggcaatttgtcccgcctctttcgcttcacggcagccaatcgcttccgccagagaaagaaaggcgccgaaatgaaacccgcctccgttcgccttcggaactgtcgtcacttccgtcctcagacttggaggggcggggatgaggagggcggggaggacgacgagggcgaagagggtgggtgagagccccggagcccgagccgaagggcgagccgcaaacgctaagtcgctggccattggtggacatggcgcaggcgcgtttgctccgacgggccgaatgttttggggcagtgttttgagcgcggagaccgcgtgatactggatgcgcatgggcataccgtgctctgcggctgcttggcgttgcttcttcctccagaagtgggcgctgggcagtcacgcagggtttgaaccggaagcgggagtaggtagctgcgtggctaacggagaaaagaagccgtggccgcgggaggaggcgagaggagtcgggatctgcgctgcagccaccgccgcggttgatactactttgaccttccgagtgcagtggtaggggcgcggaggcaacgcagcggcttctgcgctgggaaattcagtcgtgtgcgacccagtctgtcctctccccagaccgccaatctcatgcacccctccagagtggcccttgactcctccctctcctcactccatctttcctggcctctctccgggtgcttagcggacttggccaataacctcctccttttaaacgccctgaattgaaccctgcctcctgcgcatcctctttttgtgtcaccttagggttcagatttaactacgcgacttgactagtcatcttttgatctctctctcgtatttagtacttttagtcagcgagcatttattgatatttcaacttcagcctcgcggttaagagcttgggctctggaatcatacggctggaattggaattctgtcagtcgtgtggccgctctctactgtcttgtgaagataagtgagataatcttgacctgtggtgagcactcgtgagcgttagctgctgtatttaccaggtacagataagacaactacagtggatgataatgtatgtggtgataggggagtactctgatggtagaggagtgactttggttctctgcaaactcagcctgagactatcaattcagtttgtggtgagacctcgcagtgttaccttggcagatggtagaagccttccagatggaaggaaaaatgcgtgtaaaggcacaaagtgtagaaggaccctgaagctccagcgtgaggcctggcattgaatgaaatatattttgtgggttttcagctgctgaagtcataggaatggatgagaccaagaaaacaaagctgtttttgaggtatgagcggaagaagagatatcaggagactttcgaaacagtcataacggaagttaatatgatcattgctaacatttgctgtgtttcaggcactgtaagcatgtatatgggtccttaaagggactcatagaggtaggtactagtattgtttttccttttatcattgagaaactgaggtttgaagagattagtgaacttgctctagattatacagtttgtaagtggctgaaccaggatttgaactaatacaatctgactacagaggccacactccttagcactagaaaagaatggcatgccaagggcagagttatttctaggaagatgggatataagcgtcattgtcaagttgtgcaaaggggtcaacttggttgagatctaaaaaggaacactgaattcgtcaattcagaggctcgtaggaagtaggaaatccttatcttttcgtttgaaccttgagtggaacctagatattctggattaatgtataaatgaagttcatctttatatggtgacactcatactctagttgactacctaatagttcctctgccttctttcagttccgccaacatactgtgttctttaacattgtagaaccctttggctatgctagtctccttccctgaagtgttggt

SEQ ID NO: 915070 - DNA, 4001 bp, Homo sapiens
cccacccctgcagtacccccagcagagtggggcatcctggcttcctctctgaggatgcagctgctgcctccctgggcctggctgcttgcatcctgtgcgcctggcttccacagctccaccgcagagtctgagctccaaaagagaggcacaagggggtctcaggccccatcccggctccacggcccagcgtcctagctgggaaactgcaaacttatccccacccttagagggcagcaaagtcccagctcaggctttgggaccctagagtctgtgtgggctctagctaggactagtcacttgtagtttcttacatctcaggaccttaaatgaagatgttaatccttgtccctttggggggctggagtgtatgcatttcagagatcagataaaactcttcaaagccagagcagggtaagcactcagctggccaactctctagcagcaaatccagactggggaggactgggcgggtgcctgcaagggccaggcactggaaccaggggagaggtgatctgggcgggaggcaagcacgactaagaatgactctggactgctctctggaggaaggaagaaggcaggtaatgaaggaggctgattcctacaggaggcgtggagcctgcggtctgggctcaggggagagggatggaatgaagcttaccaggaggaatgtcaggcacaggggcccccagccacaaggacatctcttcctggagccctggtcattaccaaggcactgtcctgcaggaaggacccagattatactcttctagaactgggctcctttctggcctcagctcccttctccacctgatcctcccttttatcaatatcaacaatatcagctaacatttacttgccatatattagcctgtactaaggctttattatattactattatgttttttagagacaggttctccctattttgcccaggctagtctaggaattcctgggctcaagtgatcctctcacctgggcctcccaaagtgtggggattattggagtaagccactgcgcccagcctgttataaggctttatgtgctttcctcataatatccctctgaggtcaaaactattaattttttttttgagatggggtctctctatgttgcccaggctggaactcagtgctattcacaggtgcaataataggacactatcgcctcaaactactgggctgaagcaatcaggtttcagcttcctgagtatctgagattatgggcgcacgctactgctcctggctcaggactattcttaaactcattttacagataagcaaactgaggttcaaagagattaagtaactatggtcacacagttaggcggcggtagagtcaagactccaaccctcctctgactccaaagtctgggctcccagccaccgtgccggcttttctcccccaaagtcccctccaggccagcagggaatgtttgggtgcatctgccctgcttctcttgggccccttccccctcactccaacactgaggacagctcactccacccagtgaaacacgctgcttattagagaacctcgctcgtgccactttccagggtcccagcacaaacctgtctccaagaatctccccaattcacatagaggacctcctcccctgagcccctcatgagttattctgggacccagagtcctgctcctgtcccaagcttccatcaccatcacccctcacttctccccagaaacccccttctcagatccttaggacattccccgaccccaccccagatacacacacagagccccaggccactgctaaggagcagacccaccaaatccccaggccaccagacttcctgggtgggcagtctctggagcccccttgctgggagaagaggatggtgcagtttcctgtccagaagtctcggtggccagccagtgagctggagctgagcacaagcaggacctggagccccagagaagtagcaatttggggaaaggctgaggggagggactgccgaggggtcaggccacccctccttcctgcctggtgaccacagccctcccctcctcacccccgcccacagggcagcttctccaccaggctggctcctccccagccggccaccccctctcccgccactcccgccccctactcccggccaaaacagtggcatttccctgcagaccagccaagttccatgtctctccccttcctctccttacccagcgctcttagcagctcttgcaaaaggactgcctcccaggaacccccaccccaatcccagcagcctccagaatcgtgttccctcccctccataggcacctcgtggagcaaaggtcccagcacggcccggaattgcgacactgagccccagcggctttcccagcctccctcctcctcccttgcctctgggaagaggccaagaagctctccccactagccccaggcctcagccaagctggtagaaatccaggggtggagagaggcaggtgctgggccttccagggagtttctgaaagtgggtgccctgcgggggccacagataagagaggaggccaggagagcctttgataggaaatctgctatgagcagtggcaggcctgggataggggtggaggtggcagaaggaagacaggcaactcaggtggcagcccaggatggacctgggaaggtatgcgggttgcctcttctggggaacaaccccatctgaagtgatggcaggctccaaccagcagctactgagactatagtcattcttcctactctgctgcctggggcatgaaatccatccctgaaagtagacatcatattttattgatttcatctcccccaacacccctgaaacagggctggcatagatgtggcaacagagtaggtactgtgttcctatttgttgaatgaataacaagaaaaatataatatattctcggccgggcgcggtggctcacgcctgtaatcccagcactttgggaggccgaggcaggcggatcacgaggtcaggagatcgagaccatcctggctaacacggtgaaaccccgtctctcctaaaaatacaaaaaattagccgggcatggtggcaggcgcctgtagttccagctactcgggaggctgagacagaagaatggcgtgaacccgggaggcagagcttgcagtgagccgagattgcgccactgcactcctgcctgagtgacagagcgagactctgtccccaaaaaaaaaaaaaaaagaaatattattctcgtctatcccgtacttattagccctagtcaattttttttattattcctttttttttttttttttaccttttttggggtagggtctcactatgttgcccaggctggcttcacactcctgggctcaagccatcctcccacctcagccttccaaagtgctaggattacaggcacacgccatcacaactgctgtagtcaatttcaactcagcatgttgatttagcgttcagactctgggctcagattttgggttcaaatcctaaacctcttattacctatgtgatcttgattgagcaagttacttaacgtctctgaatctttgtttccctatctttaaaataagaatagttgagccagcaatggtgtgttgaaaaataaatagaacgggcacggtggctcacgcctgtaatcccagcactttgggaggcctaggcgggtggatcacttgaggtcaggagttcgagaccagcctggccaacatggtgaaaccccgtctctactaaaaatacaaaagttagccaggcatagtgatgcgggtctgtaatcccagctactcgggaggctgagggaggagaatcacttgaatctgggaggttgcagtgagccgagattgtgccaccacactccagcctgggtgacagactgagactccatctcaaaataaaaaaaagaaaaagaaagaaagataaataaaatagggataatagtaatttttaccacacaaggttgttgtgggattgaaactacagatcatgcagggtgcggtggctcatgcctgtaatcccagcagtttgggaggccaagg

SEQ ID NO: 915071 - DNA, 4001 bp, Homo sapiens
cgtgagcacgcacccggccaaaacttgacttttaatccattctcaaactgtgcccatgcccaaactgtgaatttgggcaagtcacttcctctctttaggtttgtttcctaagctgtaaagtaagaggactaggttaaatcaggtattcagagatgctgatttatgaaacctgtaataaatggtctttgtgaaccatttgggattatatgcaaaattccatgtgtgtgtttatatgtgtgaacatttttctggaggagaggtgcaaaattttcatgtgattcataaaggggcttgtgattaaataagaaggttaagaactgtttggctacccaggctttggctcttactctatttgcttcttggcctcctccatgacaactctggaagcaaagtttaaatcctgaagtatatataaataattgaatctggagtcctaggacaaaataaagacagataatcctgatctttttttttcttttcttctttttgagacacagtcttgctctgtcatctagactggagtgcagttgcaccatcatggctcactgcagcctcaacctcctgggctgaaggtgatcctcccacctcagcctcccgaggagctaggaccacaggtgtgtgccaccacacccagctaatttttaaacttttttttgtagagaggagatcttcctaagctgctcaggctggtctccaactcctgggctcaagcaatcttcccaccctggcctcccaaagtgctgggattagaaacgtgagccaccacaccaagcctaatcaggtttttgttgttgttgttttgagacagtctcactctgtcgcgcaggctggagtgcagtggcgtgatctcagctcactgcaacctccgctttccgagttcaagcgattctcctgcctcagcctccagagtagctgggattacaggagcacgccactgcacccggctaatttttttttttttgtatttttagtagagacggggtttcgccacgttggccaggctggtctcgaactcctgacctcaggtgatctgcctgcttcggcctctcaaagtgctggtattacaggtgagccacggcgcccaggccaagcctgatcagttttgtttcccaaagatctgaggagatttgcttccagtaggcagatctgaatcaaagcatccccaggacctatgatctgacctgcaaccgtcacaggagtcacaaagtcctgaggccaaactggctgcacctgaatcctaatggtcaatgccaagagggccattgattctgtggaaaccccacctactcccactttatgatatgcgcctgtcccttacctcaaaatacctccccactggtctgaaattcctcccccagggattcagtgctttgggtttgtaaagtctgaacatcctgtgcaacccaactcctttgggaagaggcatgacatgacgtcttgactctaattaactaaaacttggaagtggaggggagggaggacagggaaaggactggaagggaaagtgagagggctactgaagctttgtgcagggcaggaacggtaggccagactggggcaacctcaaggacacacggagtccaaagggttgtttacatactgtgtcctgcaccccaagcaaaacatctcctggagaacagggccagggctcaatctccccacaaaggcaggggcgtggagagaagcgacctctactttcccatccctcgcctcaattctgcacccgatctagctatggggtcaagcctggaggggacgctggttctccagacatggtcccgcccactgcaagtgccaccttggtaagggatttctccgagcagaggcaaacgcgaatttgtggccttcttaatcaagatgaggtcttcgagccctgtctgccgcgccaggtcgcgttaccttcttatgctcctccgccacagccagaccacgaccctcctgcacgcaatcccaccgagactgcgccttttccccgcaccccagcaggtccctaagtaagatggcggcgaacgcacttccggcgtgtgtccttacgggtgcgtccgggcggctgcttgcaggtgccacccagcgggttccagcttgtttgctgcatagattacaacggtgatggcgggcaagcggtccggctggagccgggcggctctcctccagctccttctcggcgtgaacctggtggtgatgccgcccacccgggcccggagtctgcgcttcgttaccttggtaatgagagatgggctcaccaaagacttccctgaagctaaaagggcaaaggccagctggtggaggtcgaggatctcgggaaggaacagctggtttaggaggggacgactggcctgggtagttgggaggctggattcaggattgacctggagccctggcttatgggagtcaggatgaccgaatacgtcggggtgagtctgccttgagacagggaagtggttgaatggttaagactcatccctaaagaagcctttggttatcttttttccccagttgtccccaccacatacgttgctttcacttctcttttcccttcctacctgtaccttggctttgcctatggtctccagtagcattgcttagctaagttagaatctctggaatctggaagaagtgactgactcctagctggggtcttttgcagccagtaggcttcccagagggaatgagacttccttccctaacatggggcaaaaggtaggctctgggtccctatcaaggggatgcttctgacctataggcaaaccattttattctctcagctgtaccgccatggagaccgttcaccagtgaagacatatcccaaggacccctatcaggaagaagaatggccccaggggtttggtcagttaaccaaggtgggtcagaagccagcctttcctcaggatgagctgcagaatgagcgacgtctagagcagtctacaaaacttggggtcctactaaactgccttttcccatatgggtgctgactttgaccagatttcataaccttaatctctgtgcccatgatattgctgtgcatgactggccacttaatgaaagacttctgggatcagattaattgactccagcaaagcgtgaacctggaaagcaacagggcctaaaccccatggggcttgaagccaccccttccctctagaccctcttaacccttgggtttgcccacaggaggggatgctacagcactgggaactgggccaggccctgcggcagcgctatcacggcttcctaaacacctcttatcaccggcaagaggtaaggttgggagctccagaggcaaggggaacaaggtatgctgccctcatcttttgccctcagggagcctaaggctgaggctgggcactttggcctccttcttgtatttttggtcacaactacaggaaaagacatctgagagctgtctggaacaaagccctaggagctgagttgcccctgcttggctgggatgaggcaaatttgattaagcatccaaattcggacttaagggcgggcctggcaaagtggtttctgactgtgaaatcacaggctttccatccaagacattgagtacctattaaaggccaaggactgtgctagcactttgcattcagttgtgcaccatacagatatgatctctgtcttcatggagcttagaatgttgtgggggtatctaatgataaaccagacagggccaagatgaaagacagcggggaagacatgcgtagagagggcttgtcttttcttgatcaagatgaggtttttgagccctgtctgctgcgccaggtcgtgctatattcctagggcacatcagggaggactggtgagtgtgcctgctccttgagtcttcgccccaccccaggaatgggggaagctgttcctctgattaccactgtcagcctcagccgtatcaagaatccatagacattgttattgttctcttaaggcccagctctgtcctgagcttgtccttccccagtttcctcctcccttttcatgagccactatctctgaataagctc

SEQ ID NO: 915072 - DNA, 4001 bp, Homo sapiens
ggagctaggaccacaggtgtgtgccaccacacccagctaatttttaaacttttttttgtagagaggagatcttcctaagctgctcaggctggtctccaactcctgggctcaagcaatcttcccaccctggcctcccaaagtgctgggattagaaacgtgagccaccacaccaagcctaatcaggtttttgttgttgttgttttgagacagtctcactctgtcgcgcaggctggagtgcagtggcgtgatctcagctcactgcaacctccgctttccgagttcaagcgattctcctgcctcagcctccagagtagctgggattacaggagcacgccactgcacccggctaatttttttttttttgtatttttagtagagacggggtttcgccacgttggccaggctggtctcgaactcctgacctcaggtgatctgcctgcttcggcctctcaaagtgctggtattacaggtgagccacggcgcccaggccaagcctgatcagttttgtttcccaaagatctgaggagatttgcttccagtaggcagatctgaatcaaagcatccccaggacctatgatctgacctgcaaccgtcacaggagtcacaaagtcctgaggccaaactggctgcacctgaatcctaatggtcaatgccaagagggccattgattctgtggaaaccccacctactcccactttatgatatgcgcctgtcccttacctcaaaatacctccccactggtctgaaattcctcccccagggattcagtgctttgggtttgtaaagtctgaacatcctgtgcaacccaactcctttgggaagaggcatgacatgacgtcttgactctaattaactaaaacttggaagtggaggggagggaggacagggaaaggactggaagggaaagtgagagggctactgaagctttgtgcagggcaggaacggtaggccagactggggcaacctcaaggacacacggagtccaaagggttgtttacatactgtgtcctgcaccccaagcaaaacatctcctggagaacagggccagggctcaatctccccacaaaggcaggggcgtggagagaagcgacctctactttcccatccctcgcctcaattctgcacccgatctagctatggggtcaagcctggaggggacgctggttctccagacatggtcccgcccactgcaagtgccaccttggtaagggatttctccgagcagaggcaaacgcgaatttgtggccttcttaatcaagatgaggtcttcgagccctgtctgccgcgccaggtcgcgttaccttcttatgctcctccgccacagccagaccacgaccctcctgcacgcaatcccaccgagactgcgccttttccccgcaccccagcaggtccctaagtaagatggcggcgaacgcacttccggcgtgtgtccttacgggtgcgtccgggcggctgcttgcaggtgccacccagcgggttccagcttgtttgctgcatagattacaacggtgatggcgggcaagcggtccggctggagccgggcggctctcctccagctccttctcggcgtgaacctggtggtgatgccgcccacccgggcccggagtctgcgcttcgttaccttggtaatgagagatgggctcaccaaagacttccctgaagctaaaagggcaaaggccagctggtggaggtcgaggatctcgggaaggaacagctggtttaggaggggacgactggcctgggtagttgggaggctggattcaggattgacctggagccctggcttatgggagtcaggatgaccgaatacgtcggggtgagtctgccttgagacagggaagtggttgaatggttaagactcatccctaaagaagcctttggttatcttttttccccagttgtccccaccacatacgttgctttcacttctcttttcccttcctacctgtaccttggctttgcctatggtctccagtagcattgcttagctaagttagaatctctggaatctggaagaagtgactgactcctagctggggtcttttgcagccagtaggcttcccagagggaatgagacttccttccctaacatggggcaaaaggtaggctctgggtccctatcaaggggatgcttctgacctataggcaaaccattttattctctcagctgtaccgccatggagaccgttcaccagtgaagacatatcccaaggacccctatcaggaagaagaatggccccaggggtttggtcagttaaccaaggtgggtcagaagccagcctttcctcaggatgagctgcagaatgagcgacgtctagagcagtctacaaaacttggggtcctactaaactgccttttcccatatgggtgctgactttgaccagatttcataaccttaatctctgtgcccatgatattgctgtgcatgactggccacttaatgaaagacttctgggatcagattaattgactccagcaaagcgtgaacctggaaagcaacagggcctaaaccccatggggcttgaagccaccccttccctctagaccctcttaacccttgggtttgcccacaggaggggatgctacagcactgggaactgggccaggccctgcggcagcgctatcacggcttcctaaacacctcttatcaccggcaagaggtaaggttgggagctccagaggcaaggggaacaaggtatgctgccctcatcttttgccctcagggagcctaaggctgaggctgggcactttggcctccttcttgtatttttggtcacaactacaggaaaagacatctgagagctgtctggaacaaagccctaggagctgagttgcccctgcttggctgggatgaggcaaatttgattaagcatccaaattcggacttaagggcgggcctggcaaagtggtttctgactgtgaaatcacaggctttccatccaagacattgagtacctattaaaggccaaggactgtgctagcactttgcattcagttgtgcaccatacagatatgatctctgtcttcatggagcttagaatgttgtgggggtatctaatgataaaccagacagggccaagatgaaagacagcggggaagacatgcgtagagagggcttgtcttttcttgatcaagatgaggtttttgagccctgtctgctgcgccaggtcgtgctatattcctagggcacatcagggaggactggtgagtgtgcctgctccttgagtcttcgccccaccccaggaatgggggaagctgttcctctgattaccactgtcagcctcagccgtatcaagaatccatagacattgttattgttctcttaaggcccagctctgtcctgagcttgtccttccccagtttcctcctcccttttcatgagccactatctctgaataagctcttcaaaaaaaatttttttttttgagacagagtcttgctgtgttgctcaggctggagtgcagtgacatggtcttggctcactgcaacctccacctcctaggttcaagcgattctcctgtctcagcctcccaagtagctgggattacaggtgtgtgccaccatgcctggctaatttttgtatttttagtagagacaggatttcatcatgttggccaggctggtcttgaactcctgacctcagctgatccgcctgcctcggcctcctaaagtgctgggattacaggcatgagccaccgtgcccggcccaaaatatatacatatattttaaaggggtctcactctgtcacccaaactgtagcacatgcctcagtcatagctcactgcagcctcaaactcctgggctcaagtgatcctcctgcctcagcatcccaagtagctgggactacaagtgcccgccacacttgggtaattaaaaaatttttttttgtagagacagggtctcactatgttgcccaggctggtctcgagctcctggcctcaagcgatcctcctgcattggcctcccaaagtgctaggattataggtgtgagccaccaggc

SEQ ID NO: 915073 - DNA, 4001 bp, Homo sapiens
ttaagggacactgacttcaaccatgtctactaatccctcagtatggctccctgggcactcaagagcaacagttccaggcagggacccccacatcctactctaattactactgcagacacagaggagaccaattccattccttccctggcctcttggattctttgtttactcacctctttccagtgaccacgtctcccacttccccttccccagcaatactcccctgtcatcctcacctctcccctccccccagctcatttcccagaacccaccatccatttatcttctctactttatacaacactgctgggaggaagggctcttcctcagtggagcccaggaacctccatgaggagcccatttctcccttcacaaccaaaaaattgcttcctgtagaataacaagcagagggaaaaggctggaaggagatatgttatcggggtgttctccagggggtgggactgtaggtgactgacatgtttgtttttcatacttttctctaggttttacgttttctattatgagcagattacttttataatcagtaaatatttagaggagaggttaaaccacagctcttcgaagaagacagggctatgtttgaatcctgcctccacagttaggagtcatgcttccttggaaaaatctaactttctaaacctcagttggcacatctgtgaaataatacctacttcacagggttgttgctatgattaaatataaagtgctggctacagggcaggcattcacaaactggcaactattacttaaactaataagagttaaaatcgcaaccaccaccacttgcccctaagtgttctctgcctcttggtacccagacatgggaaagtctcacctattatagaactgggctatccttcccttccaaagcccactttttttttctttactatgccataaggtggcaaagtcagtaacctcgtgtatcattagctggttgactgaatgactgaaaatacaaggactttggaatagtctttctccaagtgcagaggcaaaaaataaataagcaaacaaataaatttcatatacgtatgatcactgtactcttccagtgaggcaggagccagggcctatgccaggcgctttcataccgagtcacctttacagcaaacccctcgggcgctgggcacttgcagtacccaggtttccgcgtgggcgctgacaaattgcagacacttcctttcctcgccagcagggctctctcgcggtcacttcacccagccccttccgagcgagaaggccttgggggccgggacaacccctccccagaaccaccctgactaggctctttgcagccagcatcactaccgagctaaccaatatggaccagcctgcgctgcacagggcgcttaggcgatcgttggagggtcatgaggatcagcctgtccgcccaccgacggcggcgcagtgggatggggaacggggtgggggccgaaagacgggaggaaggagtcgctgcagtgtctccaggcgatggttgccagcgtctcactggggaggaagttcctcctgtcatccaacccgcagttcccctcttgcagagccctgccgagctcccagtccagcctaggctgtctaacggatgggcgctcagacgcccccgcgagttgaggagcatttttcctagggcttccaagtcgggcgggcgccttccaccatccaccacccacgtctcggcaaggaccccttttctttctgctcctaggtcttccgcatccacttccatccctctctcgccctccagggctttctcaggcgcctctcgcagcggaccccgccaagtgcccctcccccgggccctctaacttacggtgcagcagtccatgctggtgtcggggggtcctctgcggggacgaaggctggcgcagggcgggggtggggtctgtgtggtgccgggtgggggctctggggcagtcggccgccagccgacccgcgccgaaacagcagctctgctctcgggtccggtctcccgcgctcggctccgctcgcgaatgtaacctgagccccgcggccgggaagccaatcaggagcagcctccggcagggtgggcggggagaagtggagggagggccacgccctctcgcggctctctgcgccgcgctcccgctcctgccccagcccctccgcctacacgcttgtatccaagcctcctacacactccatcctcccgggcgcaatcccctggcttgctaggcggcagactgccaggcagatgtacgccggagtaggcagaaggaggcccccgacaccccgagcacaaacacccacatctgggcacagcacctactcccgctcagagaaaaccacgcacccctcacccatccctccatacttccacaacctagcaggagtcccaaatatggctccctttcacttcactccccctcagtccgcaaagaaaggctccctaacgggcggtaaaaaggtctcatcatcactcctgctacagacggagaaacctgttggtacaacctggcgatgggcatgcgtccacacaaaagctcacaagccccacatgtccacatatgattttcccaggccttcttccagcatacagacactgcagatacaacctgcaaaaataactacgcagcccttcagttgcaggtaaatgcggacaccctgttgcgggcgcccgcgcgctcacgcacgcacacggacagtcacccaactcaagctgtcggcatgacgtatctattatcgatctgtctacatgagctgcaacaaacaacatcatatatgcacaacacctattttgtatgtatttatatatgggcacagacttggaagaagtatcctcctccctttcataccagactctgcctaaccttttgatctgctgcctcagaataagacaaaagctggccatcctcgcccttgctcctgagaagaagaaaaataccctaaacccaagtgtagagaattcgaagtaattggctcttgggtccatgatgaggcaggatgtgggcttcgtgagaggctgggaaggggagctatggaaagagcatctgggagggacagactgccactgttgtggtcgtcagcctcccccaactcggcagggtacaaaagctggcagtgtggcttgttatgtgggtagggtaggccttctctgagaaaactagaaagtcttctcagctaaggtcccagagaagggaaggaggaaaggatggctcctgctgggagcaaaggtgggaaatgccctgtggctctggttgggacagcagatcctgagacagctctgctgtgcatccccagtccctggccatgaccagggaccacgtggcggtgacatgcttcctttccacctagatgtttgggcccgaggctctgcttgccaaaggaaaaatgagtgggagagaaatgcctgagtccattcagggtggggataaggttagccagcttggggtcccaggctgagctggatgctggccgggattccagggcttggggtgtaggggtgtctctcccagcatgtttgggacccacccacttttgtaaaaaaaaatctgttccccaatctgtctctggcacatctttcatctccccacctcctccaagtggccagatgtcctgggaactcaggcccttgcctaaatgacacgcacatctgtggccttctgttgtgccaattcctgctggacttcaactccagaatccagagaggagaggaaagggggaaattgggggacagagtggataccaggcctagactctgtgcttttctcttcccaaattagagctgaggaattcgggatttggtgagtttgcagtcaagtctcccaagttgctaggcaacatccctctgcagactgcgctgcctctgggcccttcttcctgctggtcagaactgaagggggggtatctttacaacaccccccccaccaactcccacacaggcagcacagcccttccctcttcctgaaggacacctttgtgtggggtgagggtgtctctgaacactggagggcccatag

SEQ ID NO: 915074 - DNA, 4001 bp, Homo sapiens
aagcggatggaattcttacacagcatgaagtagtataagaaatcctaggcagaaggaagttcaggtagctctcagggctaggaaactcctcgacaacgagggacaaccaaatccagcatttaaaaactctgtattttaattcttctcttaatataatacttccttctttattgattgctgagcattctaggaactaggataggattatttggcctgaaggaaagaatacttctcgaacctgatttgttaaatgaatcgagattgctttaaagtgaaagaagggaaaagagagttatctcttttgcaggagcacatttcaatcacttatcactctgggttagcataaatcagataaactatcctgtgggttgtgcaaaaagcaaaacaaaacaaaaaaacacaacttgtaaaaaaaacagagcaagataactgaagtagacaaactctgcacagaagtaactaatggcagggaggagaaaaatttttgtatattatattatactgtgtataatataatgtacctgtgtatcattagagctgttaaattaaaaaaaaaaaaaaaaaaaaaaggaaatggatgcagaagctctgccctcctggggccagaaatggcaatttcagtgaactagggccgacaaccacatccaaaattaaatatttcaaaagcttaaaataaaaaatactagaaaaattatgcagagcacctatttcatttgttaaaagacatttaattagtgtttcacatattaccacccaaatgaataaagcgattgtgaaattcaagaaaacaatcaaactacaagaaaactccagataaaactacaaagttaaacataaacttggcccaggaccactacagtggctgagggatgacaaatacagttctttatattggtaacccttagccatccatcccattctatagaaagaggacagtaccatctttgaccccaggccccctgtcctgaggtgcttctacttaatgccaggaacaactgtgctagaaaaaaagactgcacccaccccagctccagatgcacacattagctggtcggtgagatgcagcagcctggcttcctccctctacccactccttgggggcggggctggaagaggagaatgatgaagagatgttgggggttcaggaaaccttcacatttggccccttttctctctccccactcaggatggaaggtcaaagttaggaccaaaactagagaagtgggttttgcatagggggacaatggattcaacagaagtcctctggatctggcaactgtcaaaaaaccctctttccacttctttccccctcacggaaagccattaggaatcacctctgtctgggtcataggaacagccacacagcataggaggcacaagccccgtgaacaaaattcggtattaagaataaggaaaaagaaagaagacccgagggcaagagggcagggcaggacctcttctttctactggagaagagacatccagggaggaggcacagccgaggggagcgcaagctagaaaagctacgacggaatccccaccgaaaccgcagcaggggtactggaaggggaggaatccgcgacgcagcgaccgcgagccaagggcagcggcgggccgggccgtgactcagtgaaagccgcaacggccgggcctcggaaaacggcgggcgcgaagccgccggggccggggcgagaacggcggcgggggctcaccatgtccttggacgagcccagcttcttgaggccgtccaggggcagcaggtcggcggagtccttgtggatgaactgcaccgcctgcttcatccggcgctgctgtcgcagtgacgccgcctcccgcatgtcggtctccttgcggccgccctcagtgaggagccctgagtaaaacatcgctgaggcgccggcggcccggtagcccacagccccccggcagcctcagcctcgagctcctccagcgccgcaagggccccgagccgcgccttttatagccgagcgtgacgtcgcggggagcagccagtgcgcgcgcggggggcggggccggcacagagtccacgccccgcgcggctccctcgcgtcccgcgtcccgcgtcccgcgtcccctgctcacccggtggcaaagccggcgaggaggcggcggcgctggtggggactgacccggcagtccgagaatccaccgcggccttttcacccaaccgccccctcctgcgtgggggccccgcatcccctggactggcgtgggctctggggcccgatgccctggcagccccggccatctctgccgctggccgcgggtacctgctcacctgtccacgccgtggccgacccggggatcaccgacagccgggccatgcctcgagtcccgccgcccgcgccgctgctcggcttctcagaaacgcacctccacgccgccagccggggctccagggtccaccgcccgggcccggaggactggcgactccctccgaggttgggagcgctccggatttctccaacttcaggtcggtccccacccaccgggccacgtgactggggagggggcagccggtgcaggcgtgtggaggaggctttcgggacctcctcccccgggcaccctctgcctgcagcccggcacccggcccgcgtttccgagccgggggagcaggtgcagtcggaagcccgcgggtgggcgtggggcgggggagtggcgagggtcccccgcctccgcgggagcgcacgcggctgcgagccctacacctgctctccgaccaaagaagcacctgtttttctcaataagtgctagggcttaccatctaaaggatcgttcaccatccctccagcgtccttagtaggagcgattggaacccgtttttcttcctgaataatccatacttttaagccattctaatcgggccttcaggcatcctggattctggtctcgacattgtgatttgacacaaatcacgttttcactctggaaaccacaactactccctccaccccatcacgcaggagcagacctggataagaaatatgtgcactctgcaaagaaccaatgataaaagtaacaatatcgacgcttactgagcctttactatgtgccaggtactagactagacacttaaaatgcagtatctcattggatcctggcaacagcttgtaagatagtattctcatcacccccattttacaggcaaatacctgataccttctgtctggcctcctgaatgctccttggttccattccaatacgttgttcactgtgctgccagagtaatcttctcaaacgataagtgtgatcatctcacttccctgctaagagcacctcaaaaggcttcctattgctcttaggagaaacccacattcttgcatggtctgcctagaccctgcatattcactctgtacttcagcctcatgggccttcttccagttccttccagtcacctgttgccaaatggcctgcctttgactgtcctgttccctctgtgtgcagtgccccctcctaccctcttcaggaaactcctatgcttcttccagacctcagctccattatcatttctttaggaaagccttctctgaccttccagagagagtgaagtctctctaattatatactatctatctcttgggcatttgacactttctgtgggggtaggggtaggggggtactggttgttggattaatatttgtctcctccactgattggaacctccaggaaggtgactgaacccattttttgcttagcattgatgccctaatatgcagagggttctcaaatactagtgaaaggatggcaaaaagttaaggtcgtaccaaagaaatcaagtggtaaagctggcatttactcccagaacctgtgctggactacctagacctggagagactgggtttggcctcatgaagctgcttcttttactctgttctgccttcaacacttgccccagtttcaaagactgtttgtgggaaaacaaatacagaaggctgctcacttggcttcaaggaagccccagggctggattcctccctgt

SEQ ID NO: 915075 - DNA, 4001 bp, Homo sapiens
gtatcattgtcagagtgtctgtgtcactggcaagggtaagcgggagggagcagctggacctgggtagtgactgagcctggaaggaaagaggggtccccaccagccactcgcgcacccagcccctcctctcagaactccaatgtcatatggattcagcccaggcctgggctggaaagaactgcccggcagccgtggctggttggtccatcccgcccacccctgtggatctgaggataggatgggtctgagaacacttcctctagcatgaatgaagagcccccagccagacccttctcccctgtctcccaaaagatccagccacacctcagatgccagcatccctagagccatccctggaagcaagaggaggtagggactgaggggctgaagcacccacaaaacagaaggcctcacagttagcagactgcagacctccctccccttctccttccctctcccttctttctttctccttctctggcagaagacagagaaagtaagaccctaatgtccaccctcctccaaaaggaacacccagacactgggaaggtagacaacagggaaggataagaatgaatggaagaggagagacgcccacccgccaacacatgaaaaaacagggctatctggaagcccccagggcagccaagggactggggacccaagacccaccccctaaaaatctatttcattattccaggtggacagcctcctccttcacctccagacaccaagaaaaagcccctcccagcccttgctagctcaatgaggcatcgaatgccctctcccaagattcaggaggggggtgagagtaaaggagacaacagcaccccaaagccaattgtgccccaaaagcccatcaagggttcaagggctcataccccaacccaaagaccccagggaagattgctgcttcagctgggggaggaggctgggacatgagaaatggtcccttcctctttaggggtgggggagcaagccaagggccctgcagcttcctctccccctgcagcactctctgaccagaaccctgtcaccgcccccagcgcattcccaccccagcaaagccccctcctactgatttcccagtctccctgtctcatcacccccagccttcccccgcaagcttccgctcctctccctcagaccccatctttcccagctctccaccagcacagacccatctctgcctggagcaccttggcacattcccctctgctctctcccaataacctcttctccccttggctcccatcccccaggaaagcctggtcctcagtgggtcccctcaggacgaagcccttggcctggcccctttccttccctctccacttctctctcttctccagccccctctcctctcctcccacgaagcccagtttctcgctggttagaccctccagaacacaacagctcctctggcccggcgctgcttcaagcctctggggctagcacagactggggacccccctttaagaaccccctctaagtcctctggatgcccctcctctctccatcccttcccccaaagacccttcctcccacccctccccattctcctcagctctcagggccagtgccccttccacaggagcctccgacccccaagcccccagcggctttgcctcctcgctgtcaccgggccagccctctcagcgcggcgcccccgccccccaattcatccgtcctgcctccctcgccccctccgatccgctcccctcccccgatcggctcccgccccccgcccgtctccgccgcagcgcccccccccccccattttacctggttctcggggcgccagaagctggagggtgggtagcagagctacagggccgccccgtctccgacgggtggcagagccagggctagcggtgtctgccgcctcgcgcctctctccctccccgccgcgtccccgcccgcccgcccgccccgccgcggtgcctctccgaggaggatgctccgcgagtcagggcggctgctcccgccgccgcatccctgcaacaccgactgacggcagcatcagcaccagtgcccgcccccgagacgcgcgcattggaccacgctgcgctgacgggcgagcagcgcagccaatgcaagggctcagaagccgccagtccagcggctccacaggcccactccctccctcgcgcgggacccaggcgtcccggccccagcacccgcgctcctcccagcctctcgaggttctcgggcgcccgggcccccaaccaggcgggccccaaacccggcctcagtgtcttttccgggaacccaagcactctcgcccctcgcccctcgccccttagttcggggccttgggtcccgcaccctccccccacggccagcaggtcttcgcgcagcgcggggctgggacaagccgaaggagaggctgtggaccccgacttgggacgccgcgagagcagggctgatgcggggcctgggccgcagcgccctctgctggctacccccaggggcgggcccgggcttcgaggagcctagagaagggggactcggtgggtccatggctgctgggggctttttccagtcggtagcctggcccccacctcccaccgtccggagggcccctggcttggagcccccagaactgaagaggaaggggctttgctgggataaagacggaggcggtgggggaaggaaaggcagagatgggggcggggtagacctaggaacttgggggtttcccagtcctgcctcatgggaatcccagagtttgaggccaaactctcagttctgcctggaaccctggaccgaggtacgagtaggtgtgggggcagggttgcgcctgcacatgcctggtgactgagggcacctggcagcagcccccttctctgttctcctcctcccatccatgagtttcagttagagtggtgctggggggcgcaggtctctcctgtaagggtacatgcatcactgtgcatgtgtatgagtgtgggggactgggggacacccttcactcactccgccaataaaagtgtacacacactggcacttagtgtgtataccccgaggttggtcactgggctgctgaatgagacagtgagagacagagtgtgtgtgtgtatgtgtgccagaccattctgccagctcactccaggaccctggtttctgttgcagggtctgtgatctgcacagctggtggtagttggcacttccttagccagaggcaacatgcaagaacacttacattcaaccaccaatgcatggacattggggcactcacagccatgcacacatatctgtgaacactgggcattcccagagacacataagaacacctgcagaaatgccccaccatggtaacacacccacaggaagcatatactgcccaagaacacacacacttgtgcacacaggtacctacaccaggcaattaatgcatgcccagaacagctgcacccaggggacctgcccacagtcatcctggacccctgcccaggcacttcaaagagagtggtcaattactgagtggcttaatgcggacaccaaccccccgggtgggaaactccttccccagcctgtgaaggggtaagagggggacccaggctgcaaggagtttttcctaggagtcgagaagggtgatccctaagccaggtcccagacttagggcccactctgaccttggagagacccccagggcatccccaccaaagccaatgaaggagccagagaatggaactgctgcgtcagggcctatgaatgcgaaatcgcctccctgaccccacagcccactttcctgcccatcccccactgttcctcttcctgcagcctcctcacactcacacacacacacacacacacacacaccccttgtccatccaggcatcagggcatagacagacagatgcaatggctcacagagacagactcagacccttacagaggagcctgggcagggagggaggtaagtatgagcacttgtctcctttccctacccccagctttgcccatcaagggcagaaaaggtcaccgggcagctgctgcat

SEQ ID NO: 915076 - DNA, 4001 bp, Homo sapiens
ctctgaaaggtaatgacaaggtgcagagatgggaagtgatgaatagactaaaatgggaggtgaggaggtccctgggatgcaagtgacagaagtcctgagatggaacgtggagggactgaggtggaaagtgatggggctgacatgagatgaaataaaatgtgaagagggccagatgtagaaggtaatggggaggacagagcttgggagtgatgggggcacagagtatggaggacagagatggaaggtgacaggtacaggggtgagaagagatggcatgcagagaatcttaggggtctaagatatgaagtgatggggggcctgagatggggctgaggaaggacggaaatgagaaggtgatggggtctgagaaggaaggttaagtttttccatagatggttatgaggggcagagataggaggtgattgtaagtggacagcgatagaggactgacacaggaggggaagcctggaaacgggaagtgctggacctacagaggtgagatgctgggggtcagaggtagagacagagcagagatgaggggacatggaagggagacactagagattaggggaacaaggatgggagaatggcgggacagtggagtgagttgggaggtgatggaaggccagtcatgggaaaagaaaggaaggttgctagagggatggaggtaaaacagagacatacatgaagaggtcaaggaggaagagacatgtcagaggcagaaatgacagatgtgacagaggtgggagagaggtgaagggggagagatgacagaccagcgatggaagggtgagggtgaggcagaggtggaggcaagacagatggagagatgataaggggccgagatggagaaggtgatgcgcaagagaaatggaaggcagagctgcacggagaggatgaaaggacagacagggcggggagggtaaggaagtagaaggagataatgaaccagacctaggggtaagcaggtttaggtgaggccaggaagcaaagtgctgaagacagagatgagggtgatgggggagaggagagatggaggcaagggtggggctgagatgatgggagctggagattggaggtgaaggggctccgggacgcaaagcagaggggccaggctcggcgtgcacagctggggtggggcccgcgggggcccagctgcgcacacgggaagcgccccccgcccccgggccaaccgggtggccggcatctacagtgccacttaccgtggccgccgcgggtgaggaagggcatgcggttgatggcgatgggcacggtgccgtgcttgctgtggaagtggtggacgtggtgggtggtgctgaggctggaggagacccgggccccctcggccgcccccagcagcaacagcagcaacagcggcaacagcggcagcagaggtggcggcggcggcggtggaggcggcggcaggggcccagccagggccggggggcggcgcgggcacccccccggcccgctccccccggggggcatttcggcccgggggcgaccgcctcacagccccatggccgggggcggggacgcggggctgcgcagccccgcgaagcccccctccggctccgagctccgggagcggggtagggatgaagcggaggtaaaccagggcccaagcctcggtccggagccaacaaaatcaactggatcccgccgggaaatcgggggtccgcggagcggcaacgccaaggtccaggatgcctgggtccatcgcgaggagctaggggtctctctgcatcccggcggggtcggagcggcgcagagggccgtcagaaacccgggggagcgcccgggggagggggcatggtgccgagtggagagggaggggagcgcgggggccaagcagggaggggagagcgagggaaatcctgcggaaaaaccgagctggggagcggggcggtgcgggctggaggagagaagagggacggagacctggttcccccgaaggcgggagaccgacggcgactggggccggccgcgccgctgctgccgctgccgcccgacggaggccgggggaaaggagggagcggccgggggaggggggggcgggagaagggggaagggaagcaaatccgggtgaggggggaatgaagggataggagaggaggggataggagaggaggggagcggggctgagccgaggaaaggcgcgagcctgcgagattccggcggagagatggaggcagcgaagtgttgctgcagaggctgagagggctggaagggagagggagggagggagagagggagagagggagagagggagggagggagggaaggaggagagcggagaggggaggggaagcgcgggaggaggagggggcagggcggagggaccagagcggctcccgatctgcgggcggcgctgggcagctcagccgcgcggcacctggctagcccgctcggcgctctcctctcctctgcgcgcgcccgcccctcccccgcgcctggacgcgcgcgctcctcctgcacccccctcctggagaagggaccctgctgaataatggaacgggattgaggctagcaagagaggccactttcttcctccccgcccaccccacccggatgaaccccaataatgctctctggcacagcctgctgagatgccgcggcggccacctctgcaccacccctcgcaacgcacgtgcacactgagatgtgtatcggcttgggtatggaaacatccacgtgcccatatgggcacagtgtgcgggtaggcacacaggctcagacacatacatgcatgcatgtgctcacagacactggcacaccaacttactctcaggggagcatatacacatgctcacagggcatacatccgtgcacacacacgtttgatcacaggacatgaatggccaacatacacacagacacccctgctccccaagctcaccctccaaaatagggtccacagcatacagtgcacccagagccttcgaggtactcaggaataagacatgccacacacgtacaactccccaccacctccccaaaaagctgctcccccagccccctgcacaagcctctcctggactcctccaatccttcctctccactaccactgcccctcccccagccccaacctctccctccatggggggtctagaggacacctgcccactgagtgtcccatttaggacaaaacccttcctgggccacgtatgtcaagctgaggaaaccacttctccttcaggatgccctccaattgggttctgtcccccaaacttttggacgctctggaaagcacctgtggccccagaggtaagcacagagagactcctttcccgtcaccgggtcgtatgcaccaacctgctcggacaggggagagggtgggaaggcagagggtagaggaggagggaaaggaggagagaggtggagagggcacctgggggagctgaagaaacagtgcagcggagtgaggaggagggctgggtaaggaaaggacaggaggcaggggcgggtgaagtgagaaaggggagggctgggagagaggaggctgggaggggctggagagagctggctcctatttattgattctaaactccatttgggagcaaaaactgtcaccacgagccccatgtgccacccccagctccaggatgcagtcaggacccaggacatctccccaatgctgctgccagtcctccatccctactacatgccagagctggatttggcccccaggtctttagaagtgaagaaagcggtcctcagaggcacccagaggaggcttccggtggtgcagggccccgagccatgcagtgctggaggagagactgcatgccaggagcagggctggggcccccagaggccacgtcctcctgccctctctatcacgttcttgggcccctggatctggaatatagactgacacagctctgagcaggcagaaaatttatggttccacagggagggagggaggagccggtggcgagaggaaaggaagggaaaccgcctagaggccaatcaataccagtgagtgggaactggagaga

SEQ ID NO: 915077 - DNA, 4001 bp, Homo sapiens
ggtgcacacacacgcacgcacacacacacacactgatactgcttcatattatataagaggagtcaatcgaggatgcctccaagttgattcccttcactcaaacacccaccaaagcccctaggggacagcagggaatcctgaggcccatgcctcctggggttgggtgcagcagacgacatcatggacatccctgcaagattcaccaccttggacttccttatcacccgacacagatccctcctgtccccaccccttgccttcttcatcgagccccagtcaagggtgtacacatttgatccttccagcctggtctctctgcccaccttacgtggatccacactgcagccactgcaacctatgtcaagaggacagcagcaatccctaaatcctaacctcggagaagagccagcaggactacagctcaggactcagtccagatcaggagaactccatattgcagggggagaagagggcgagggggtgggactccccatcgtttttcaccgggtcagagggaactttcctctgggaatacaactgcataggactgagcctcacctcccaagagagggctcctcctcccggagccctgctgggccaccctgggaaagtttctcagcttgtctcgatccttacgagttttagctgtgtttaatataaaagaggcaaactagttaccccaaaggacagggcaggtgggagcaagaagattagtggataattctgttgctggaacgaacagacgtgagagccgggatggggtgtggggaggcacggtgcagcaaatggactcaaggtggaggccgattccaaatgcacagaacacagcactggggacatcaaagcttgcactcaactgcagcccccagggctcccggctcagccgataaataaacagaaaattagcattcgactcttattgcctctctcccttcaacttcgaaaagctttttagaatttcagagccccggctcccctcgcttccacacctccgaccccagccacaaacacacccccgaacacatttaaaactaatacagttgtcccccactgctgcaaattgactcatcccttgcagctggatcgctgaccagaacctcacaggaagcacctgattctttctagcctgcattttcccctttgctccttttaaaagctttgcaagttcgctggccgatatttaaagtttcctcttgtaatttcttcccagtcgcataagcaacacattagcaaccctgttgccctccgaatctgtcatttccccctgcttacatgtgtgctccgttgtgtatgtgtgcaagaatgtgcatgaagccagggagccttgcacacaagcacagtcctaacaggagcaccaaacacattttacttatgcacatacatattcccccattccggtagcagccagaatcaaatcaatattctcacagcctagtcgggagaatgaagtcccagccatgctgtctaaacgctctctcctccacctgcaaacagcgcagcacagccgactcggggagtctgcaaatcttataaagcacactgtacaattcctgggtctaccgaaggcaaatcaatagcaagctcttaccttggaagagacacagagcagccagccccgtgaagattgcccaagagatagaattgtgcatttttggctggatggttttcatgattttttttcttcttctttttcttcttttttgtcaggttcggtttttttctttctttctttcctgatagattgtgttgctctcaagcttgtgcaaggagatttaaatccactgttttgctgaaggacacaacaagaaagccgagggtgtgagagagtatgacttctccgtaattatctccactcatactctggcactgagacacattgtacaatctggccctggacagccctcctacaagctgcaatcattggttctaatccaaggattgacagagctacaacacacgcgcgcgggcacacacacacacacacacgcacacacactctcaggaatcatttactgggcaaatcaggctagctgattaaagagacaggagcctggagagatagaatgataaatgccactttgccccttctatattactttcattttttaaactgacagtctctgagtcttctgagtatcagaaaatccctttccccctggcattccctggcctcctgaactcagattccctttgcactggaaaaatcccatagccagccatggcttatgggaaattttaaagggacattttcatgctcagtgaaacttgtaaagatgaggcaattttcatttgttggtacctattttcccctccaatggaaatatcattcagtgacagcttttttttctctctttcatcaacctttctacttagttgctttgaaaatagtaaataactttctattttctcctcctgtcacttctgtttcagaacatctatgttactcctctttttcattcactttttagaagtcaatttcctaaattcatccatgtgtatatgatacaatggaaaggtacaaagtacctggtatttgagaagaagctctatagtctgaagatggagaaccttcttcaaaagaaaacaaagcaggagtttattccccatgacttggtcaatccacatccactaaagcaatcatagaagcatctgtgatttaaactgcagcgagaaagattcagggtagacatgcggaggggctttctgagtgtaaactttgtgtagttcctcagacagttgaagacattaacctccttggtgataggaaagaataaaaaccgaacagaaataatctaatggacataaatgatttcttaagaggtctaattctagggcctggaagtttattctaatctttggcttccccttatgagaagcaagttagaggatgtgaacaaaaaatctagaaaatgtagctcctggctgggcactgtggctcacgcctgtaatcccacaactttgggaggccaaggaaggccagtagcctgagctcaggaattcgagaccagcctgggcaacatggtgaaaccctatctctactaaaaaattccttaaaaatatctgggtttggtggtgcgcacccgtggttccagccacttgggtggctgaggcaggagaattgcttgagcctgggaggcggagatcacagtaagccaagatggcgccactacaatccagtctgggtgacagagccagcccctgtctcaagaaaaaaaaaaaaaaaaaagaaaagaaaaagaaaatgtagtttctcacagaaccttccttagctaattctgacacattcatacccctactatgccttgacacacattttaaaaatattcttctagaactccaccgctaattattatacttccttgtaaccccataaaaatgttcatgtattttcaaactgcatagaagaaaagtactcattgtctgtttgtattttagtgtacagaggtgaaatgaaaacatcactgccattttgcacatgtctaagacgtacgatttaccttggcttttttcttttttctttcttttttgtttttgtttttgacagactcttgccccgtcacccaggttggagtgcagtggtgcaatcacagctcaccgcaactttgaactcctgggctcaaggaaccctcctgccttacccactatgcccagctattttttttttttttttaattttctacaacatagtagagatgaagtctcactatgttgctcaggctggtttcaaactccttgcctcaagcagtccttccagccttggcctcccacaagtttaccttgtgttgtgtatgaatagggacaacactgcctggaatgtgggatcttgtgaccttgagaggaaggggccctgggacctcaagatctggggacctcaagatccttctcatagttctgcacaactaagggacctcaggcaggtcctttcacctctgtgaaccttggcttcttgtctataaaattgtagaactggaataatttattatactccttctcattttaaa

SEQ ID NO: 915078 - DNA, 4001 bp, Homo sapiens
aatcctagaagaagtcatcagaggggcaaaacagtagacaccagcaccagggttatctttccagaaatcttcatgtgcaaaggacaggaatattgccatgttgccttgtggttagttctgtcgcttagtttggaaaactttatttaggagggcagactaaaccaaggagaggcagggaaatcgttcccatgaaccttcttaacgtccacctcatgcttattctcttataaaatcccagagaataaaatttcccatcgcaatcattaagtgttttgcccgcatatgagaggtgtggtttatcaacactggaaattcagttagcgtttctgcaggcaaggtaatcagggagatagaatcattctaccttacacaaagcataaccaagattcttcttcttctcctcccccagtgcctgtaagccttaaccccagaagccaatcaggacccaacccaacactgaaacctagtttctcttcagtagacgagttttgcatgtaccgttttggtggagagcaggaacagaacacagttcactacagtaaatgccattttccacggacaaatcagactccatgacttgggcctcagaaagccacgttcagacaggagaaagcatctctgtctgcccaccagctcacggcatgaaggcaccccaggaaagcccgggcacagtcaggcccaggacaaagcagcggctctcccagagtgcaggagccagggctggcaaagccctatggcatgggcgagtgggggcattcactccaagccagacccctcctttggggctcattaacttcagagaagactgctcgcggggagcccctccaagccccctgtcaccacggccaccaggctcaggcacagacagtgccaggcacaagtccctcaatctcggcgaccacctggtccagccacccctcacctttaacaagtgcctgagccgcagaggccagtttttgggaaaaagctcaccgccagaacctctgagcctttccctacgactgccacattcccgggcagagcccccagcgcagccataaattgtgcagcccagggaaccagcgacctctccgccaacccaggcacgcctcagtgcacacacctgcacccctgccccttaccccgaccccatacaaaccatcagttcgcagaacaatgtcagctccctacctgagggtggcgctctccccctgccggaccgtcacgttgtccatagctttggggaaggtggcatctccgctgcgcacgggcactcctgtgggtacaaggaacagcagcctgagagacacgaccacgaggcacttccagggcaggaacaggtacccacagacccccattctcgacagccacaacttccccgaactccggcagccgcacggcacacgccccccgggcgagcacaggaagtgggtggggtgcggagcgagcgcggggactgagcggtgaacccgcggcgaccgggaggcgcggggaggagaaaagcgcgcagactcctccgagtctaatattcctcccccaaatccagcctcggcttttgccagcctcggaaaaccggttccacggaggacggccaaagggggctccctcctcgctgcttccgccgggaaggtggccgaggagggggaagcgcgcggcaggtgaaaggtgtgggcgcgtctcaggagccgcttcttcccagcggcagttcagacacggcactttggagaggagtaagcactttggtaccagaaggggacggggtgggcttcatccagctacccagaggcggtctgcagtccctcagttcgaacgggggacatccaacactttgtaagtttcggagccgggctcgccaccggaaaacaatcggaaacaatagcagatgggaagtggagctcgcgggaggcgcaggggtggcgcgcggaggagacggccgcgcgggcttcgtgcgatccgggcccgggatcctgcggcagccgcctcggtcaacttcctcggagcccaaatgcgcgctgcggccgccgctgtccggcggggctcggcggggcaggggctgcggcggtggccgaggagggagaggccgggcggcgggagcggaccgcggcggccccaagctcggtagctcgctggggaaggcgcggcgcagcccgcaccggagccgcgcggacgccaagctcagcggccgcccccggcctccgcgccgccttcctcccgggagcagccccgacgcgcgcgggccccgaccgccggggttgtcatggcagcagctccatccctgaccgccactttctcccggtgccgcctcggagcgagcgggcgggctggcggcgcggactgcgctctcatcccggcgggagggcgcggggcgcggggcgcgggcgcccaccttaacccccgccgcgccgggcccaggctgtgcaccagcccagcccaggccaggagtttaaccatttacgcgcttccaaattaggaaaaaagacaaagttaccatgcagccttaatcagcctcagacttgagacatcttaataagggtcacaaactaattaactgggaaaggaacaccctgcagcatgcatacatgcacctttaaaatgatcagattaatcccattagcattcagagtaaactcagagtgttcggaggatgttttagaagaacctcatagttattcagtagtacagcacccgcccagcagccccccacaaagctgctcaaaaccccagagactcaacactaccattctagagatctgccatatataaaacaaatccaaaatcacagaagcctcttagtgtgcgaaactggaaaaatcgcatcatcaaaatgttggtcaagttcagacacccacttacattctttattcttgttttgtcgccattaaaagatgctgggcctgcaaaagtgctcacttgggtggatgagtgtgagccacttgctgtatttatacagcagactcccaggtttcctgggcctcacactctcgcacagctgatttcatctttaagaggtgtgtttctcaaattcttgaaacccggggagagactggatttgcctcggtccctgtcacttctcctctctggctgctgctggtcctcctgtgcctgtattattatttctcccttaacttcggctctgagggaatggcctgcgtttcctttccctggctgggcctggttcttgtgcaagggggaagcacagagcagctcagcaggcacagtggtggtgacattaataatgctcccttctcagggattcccagagccggcctccagccctgacccacattctccttggggatggagaggaggcaacagtggctttgtttttcccctagactctatcaaacacaaccaggaagctttttgttgttgttgttgttaacaactgttaaataacagaaaaatggtcttccaaaaagccatccggtatcaaagagactgaaccattataactgagtcatataaccataagggcttcggtacaatactcattctggcaaccttcgagcagtaccaatcacttacatgtagataccacgttggagaggacacaaacatttcaccaatcaaatctccctcacactaactatagagataggacagaagtaggctttggagaagtggaaaccacactcctgggtaacaaagaaagactaagacggcttgcctttccattgtcatagttgactaggacgtgcttagccagcaagagtgaagcgactttacagtgaatatctcaaaatactttgcattaactcatcattgggccaattgttccctcctctcctccggtgacttttctgatattaaattctcagggaaactcatctgctacttttggccactggggatcatttgatatataacaccaaaactatcaatcgtcaacttatggctgcaacaaatgactttactatcaggaataaacaattacatctgcggggagcagaagatctttgtttgtatttttgaaaggaaaggaggaaaattaacctactttagcactagtccattcttggaag

SEQ ID NO: 915079 - DNA, 4001 bp, Homo sapiens
ttaataacatatcccaaaacaaaaaagacatctgaattgatgttattgatattagtgcccataattagttgtgtcttgaaaagtaccttaattgtcttaattgtgcattttatctcaactgttattcacagagcgcaaaccaacttggcaaaaagcatgctgaaagaatatatacaaaatacgtgatatgaacaatatgtaccttgggagagcaaagaaaggtaaacacaacatagacagattcgactcttagaacatgggtcgtccaggcacggtggctcacacctgtaatctcagcactttgggaggccaaggcaagtggatcacctgaggtcaggagttcgagaccagcctggccaacatggtgaaacttcgtctctaataaaaatacaaaaaattagctggctgtggtggtgggtccctgtaatcccagctactcgatgggctgaggtaggagaatcccttgaacccgggaggcggaggctgcagtgagctgagatcgggccattgcactccagcctgggtgacagagtgagactccatctcaaaaaaaaaaaaaaaaaaaaaaagatgggtaaaatttggatagagaagagcatgagtaaacacacggagacagaaataaatttttgcctcctttaagtttctaaaattgtctagttaaaaaaaaaatttgaccccctactacaaaggtagatgagatcatggaaagcttgaagaccacgatgagaaatagaagtttccatgttcatcctaattaggagagtgacattatttgagatttcatttctaattctaaatttccagaattttaatttttgaccctattagctgaagaagatttgttgaaatatttgttcaacatttgttgaacttattcaagtttcaaaaaacaaaaacattccttaaagcatctatctcatcaattctttaactttcccatagggaaagtccacaatctccctcaaacaaaattcactatcagaaatatttgcatttaacctcccctatttttaaaccaaggtaatatcttttagtgttcatattcgtccacggatttaacagagccttagtagcaggcttaaatggtagcactagcttattcaattgcataaaatgtacattattcaatttagaagtttagcagacatagaatttcaagaggttctgtctctcaaaaatcataatggttcccgttcattctcattccctcatattctctctctctctctccttctttccctccctctcccagccatttgatactgtaaaataactgtcatctaagaccgttgcaaacaccaaccacaataaccatatttgctcactgagttgccacttagcaggtgcaacaaggaaatactgtttctcatctcctaaaaccaaaagggttcatctcgtacctaatttgtcacttaagtgaaaagcatatcacgacttacactaactttctcctaagtgtcagaggttgctggcttaaccagaccggagaagagcaggatccccgggcctagctttgctgagcggcacaggggagcatcgcctggaattggtgggtgtccctcctcactagtgggcacccccttgcccatcgacctgcccaaacccgaagggaccccgccagggtctcggtttggcacctaccctctcctgctccccgccaagagccagccaccctcctcgaccccgaagaaagctcgggtgcccagctgcgagtggagcagagggaacccagcgcctccggctcgcgctgggagccccctccccgccggtgccccgcccacagcacggcccccaccatcctctctgctctggcaaggcaggcgaagaccggagccttatctccggactcccccacccctaatctcccgccgcgctgctccgcacctaccgcgcggccaccggccttacctggccgggtctcggcgagcgaggctgcgcctggtgcttgcgtccagcgcacaaacctgtcctccagcccccggcccaccgctccgctctgcccctcctcccgccgcgcgcgcccgcctcctggctgccatggcgacagttcccacactctgcggccgctgattggtccggttcgcgattgctgacgacgccgattggcgggagcagggacaaggccgcgccggggagcctggaggcgggcggtgaggagggccgaagctgtggagcctggtgggaggctgagccaggagggacgtggcgctctgagatgcgggctcaggaggccgcgcctcttccttccctagcttacccggagaatcctgtggagcaggactcgggcgggtgaggtgccgtcctgagacccgggcagagccccagggatcgcctctcccttggcctctggcctgcgcctgcagcgcccacgcaggtcggagaatggctgtcaggcctattctcgcccacaggcctcgctcggctctgacacccccgtcctccgccttggcgggaatcttaacggcatttgtaaccgcacccacccccgttgtgctgggccctcggtcactgtggtttaactgtatttacccaccttctctcttgcccattcgcagacagctctttcctctgcatcctgccccagagaacagacatctattccaaacccctcattttaaagatggggaaactgaggctcaaagatgcacatgggtagcttgagccttccagaagcttttggagccacaggctgtttacgaagtttcatcctgccgattagtttttttcacctgaaaaattggtatcatatctaccttagggttattcacgaagattgaatgagataacattgccaggaaaacagtacagactaggcatggtgactcaccctgtaatgccagcactttgggaggccaaggcaggaggatggcttgagctcaaaaatttgagaccaatctggacaacagtgagatcctatctctacaagaatattttttacttttttatctttaacacaatgatgtttcagtctgaagaaaatacttaaaaatttgccaggtgctgtgtcgcacatctgtagtcccagctactcaggaggcggaggcagaggcgggaggatcacttgagctcagaaggccgaggctgcagtgaaccatgatcattgtgccacagagtgagaccctgtctcaaaaaaacaaacaaacaaaaacacacagtacagaatctgccacatagtatgttagcaatgaaagcttctgttatcaggaagtactaccagccagattgcctctgttgcacaactggactctgtgtgcccctaaccgtgtaatttgccagttatttaagtgctctctgcctccatgtccttgtctgtaaaatgaacataataacagtaccctcctacttacagcatagcaaattaatttaaaaagtgactggcacataggaaattttaaataaatgttaaccattctcagattagtggctgagctgggactataacttaggtctctagatttcaacccaatcgtatttatttatttatttagagatagagtctccttctgttgcccaggctgaagtgtagtggcgcaatctcagctcactgcagcctcaacctcgcaggctcaggcaatcctcccacctcagcctcccaagtagctgggactacaagcacacaccaccacgcctggctaattttttggcatttttttgtagagacggatttttgccatgttatccaggctggtctcgaagtcctggactcaagcgctctgccttcctcagcttctcaaagattagaagcgtgaaccaccacacctggcctcaattatctttactaacacttctcatccacatacatagatcagtacctcaaggttaggctcctttttgaggttcaggagaagaggaccctccagcctgggcgacaagagcgaaactccgcctcaaaacgaacaaacaaacaagggtgaactcctaggagcaggagactgatgcaggacaggaaagcgccaaaattgaggattcttggcttcacccagtaaagaattcaagcg

SEQ ID NO: 915080 - DNA, 4001 bp, Homo sapiens
gtgagccgatatgccaccactgcactagcctgggcaacagagcaagactctgtctcaaaaagaaaaaaaaaaaaaagaagaagaatccggcctggtgcagtggctcacacctgtaatcccagcacttttggaggctgaggcaggcagatcacgaggtcaggagatcaagaccatcctggctaacaaggtgaaaccccatctctactaaaaatacaaaaaaaattagccaggcatggtggcggatgcctgtagtcccagctactcaggaggctgaggtaggagaatggcgtgaacccgggaggtggagcttgcagtgagcagagatcgtgccactgcattccagcctgggcaacagagcgagactctgtctaaaaaaaaaaaaagaaagaaaaaagaaaagaagaagaatccaaggcagagggtactgagggctagaattccactccaagtatgtatagctgcaaagccaacttcttccctcattgctggccagatgcctgcaggcctcctgccagcccagacctgtagaattctggcaagtcctaccccctcccttcatgtctaccaccctgtccaggtcaacctcactcacctcatcacagatctcctgaaggacactggaaaagagttcatgtaccaccagctgcccagcgaggtcctggtgctgggggctgccaccagggcacagggcctgtgagaggtcaggctcagcccctgctccccacctcttccccctgccccatctcaggaccagcaagcctatacctgctggccttgagggtctgatgtggcacagtgtaagagagttagtgatcctgagtctggtgtcctttccctgacagacaaccagaggtccagcttcaaaggagatacacagggggcaggggtggagtagggcatcttcttcctgtgcccaatctttcctcccgtgttttctagtttctcacaggactggggcaggggtcagtggggaggcaggtggactgccctgagcaaacttccagagaaataccaggccaattttccctttaaggaatgaggaaaccaaagctgggaggattgggagggtggagagctgcagctcccttgagctgtctgggtctttgtgcccagcctggaatctcacctgaggctcagggtgcccaccaggtacgtccaccagcccaggggcctcagccacctgccgggagcggcgcaggaagacaaggaagtcatcggctgtggctagtgcagcgcccacccccagtgggtccgccagataggcctgcgtgtcaccccagtcggtggcaccctgctgtcgcagccaggcagctgagctggaccagttggtgcccaggaagtctcggtaggaagtaaggcccaggcgcaggagcagctgtggcccccgagagccaataggcgccagggtggctgagtgcaggcggaacttgggggcgtcgaagagccagggttgggcctttagccgggtctcccagatggcagtgatggcctcgtccccacctggcagtgggcgacggtcatgggcggggctcagctcggcctgtatctgctcctggggcaggcccccgccagggcactgcagcagcaaggtcacctcaggatccatggtctgaacggggcagctctgggggaggatacggccaggcctgtcatccaggggggccactaccactcctgggctgcgcagctagccccctctgtcgcagacctcctgagggtatccgcagcgcttctccacccccctgaccactccttgggcagtaaaacgtgccatcttccccgcaggagccccgagtcccgcagggtatccaggacgcccgggcatccctaccatccagaggtcttgggttcaggcgccccaaatgcccatgtcccccaaacccaggggtctgcctccgacccggggcgcgcggggacccctttccagggcccggaagctccagcctccagcgggcgctcaccagccgccgggtccctcaggctccgccccttccccgaagcggaagtgcccgccccctttccacgcggcttttcattggcgggtccgccgcggtcgaggatcctggaggtttgtccccgccgccccgacgcttccgcccggtccgtcggcacgtcggccctgcctcccggaccaccctgcggggcgcaccagcgatctggggtgcggggctcggcctccctgcgctcctggctgaccgtgtgaccttgggcaagtctggcctgctgggccttagtttccctctctgcagcagggacttgggggtggtgaacttaatgagccgtatactcccacccagcgctcacttcctgaggctttgtgactttctgggagggatggggacgtggaaggggccttaaagcagtcccccctcgtcactgccccccacaggtcttaaccatgaacttctctggaggagggaggcaggaagcagcagggtccaggggtagaagggctcccagaccccgagaacaggtgcgcgcctcctccccaccccctcccaccagtccaggctccctgggagttgctggggggcggagctgaagggtcctactattcctggagaccactggcactcctttctctctgggctctctctgcagtgggtcattgagggttcaggatgggcagtagggcagggtcaccatggagactaggggccaccgctgggttctttcaggaccgagacgtgcagctgtccaaggctctgtcctatgccctgcgccatggggccttgaagctggggcttcccatgggagctggtaagtaggggccttggaggctggggcttgagcccagagagaaacgtgagcctgtctgcgactcctccctgatggctgcctccaccgctccctgaggaaggcacagagtgcacttcctccccatgcacagaggagagcaaggcctagagcccctgtcatgtccacagcagactgaggagagttcttgtctgggccaggcctggtgaccgccccctccagccaagcagccagatcagcacttaccccgagggcgagccctggaggatacggtgcagctggtggtgtgagtgtgcactccgggccagcgctatgctgggcactcacctccctgcccctccgtgaggcagatcctctttttatgtaagttgaaaaaactgcggcccagaaaggggagactttctaaaggtcccacagaggatgcccaagcgatctccaagcccagactttgtttcggttgcctgtggctccctgttaaccctggcccagtccagagcaaggttagctcctgagcaccctgcctgcccacagatggcttcgtgcccctgggcaccctcctgcagttgccccagttccgcggcttctctgctgaagatgtgcagcgcgtggtggacaccaataggaagcagcggttcgccctgcagctgggggatcccagcactggccttctcatccgggccaaccagggccattccctgcaggtcggggtgaggggacaagtgcgagacgagatgggagggacccctgcctgcgaagggggtctcactgctacccgttcaaccaggtacctaagttggagctgatgcccctggagacaccgcaggccctgcccccgatgctagtccatggtacattctggaagcactggccatccatcctactcaaaggcctgtcctgccagggaaggacgcacattcacctggccccaggactgcctggagaccccggtatcatcagtggtcagtgccctcccctccacctagctactcccacccactctgtcctcccaggtccccttcaaaggttacaacacttgtctggggccaccccatgtccggcatggagcagcacccctgcatcccccagcccaggaccccagtctgcctaggttgctgactgcactccaggtgcccaggcctcagctccagctgtctctgcaggcatgcggtcccattgtgaaatagctgtgttcatcgatggacccctggctctggcaggtgagtctggacaaagcaggagctgcc

SEQ ID NO: 915081 - DNA, 4001 bp, Homo sapiens
ggaggcgaaggttgcagtgagccgatatgccaccactgcactagcctgggcaacagagcaagactctgtctcaaaaagaaaaaaaaaaaaaagaagaagaatccggcctggtgcagtggctcacacctgtaatcccagcacttttggaggctgaggcaggcagatcacgaggtcaggagatcaagaccatcctggctaacaaggtgaaaccccatctctactaaaaatacaaaaaaaattagccaggcatggtggcggatgcctgtagtcccagctactcaggaggctgaggtaggagaatggcgtgaacccgggaggtggagcttgcagtgagcagagatcgtgccactgcattccagcctgggcaacagagcgagactctgtctaaaaaaaaaaaaagaaagaaaaaagaaaagaagaagaatccaaggcagagggtactgagggctagaattccactccaagtatgtatagctgcaaagccaacttcttccctcattgctggccagatgcctgcaggcctcctgccagcccagacctgtagaattctggcaagtcctaccccctcccttcatgtctaccaccctgtccaggtcaacctcactcacctcatcacagatctcctgaaggacactggaaaagagttcatgtaccaccagctgcccagcgaggtcctggtgctgggggctgccaccagggcacagggcctgtgagaggtcaggctcagcccctgctccccacctcttccccctgccccatctcaggaccagcaagcctatacctgctggccttgagggtctgatgtggcacagtgtaagagagttagtgatcctgagtctggtgtcctttccctgacagacaaccagaggtccagcttcaaaggagatacacagggggcaggggtggagtagggcatcttcttcctgtgcccaatctttcctcccgtgttttctagtttctcacaggactggggcaggggtcagtggggaggcaggtggactgccctgagcaaacttccagagaaataccaggccaattttccctttaaggaatgaggaaaccaaagctgggaggattgggagggtggagagctgcagctcccttgagctgtctgggtctttgtgcccagcctggaatctcacctgaggctcagggtgcccaccaggtacgtccaccagcccaggggcctcagccacctgccgggagcggcgcaggaagacaaggaagtcatcggctgtggctagtgcagcgcccacccccagtgggtccgccagataggcctgcgtgtcaccccagtcggtggcaccctgctgtcgcagccaggcagctgagctggaccagttggtgcccaggaagtctcggtaggaagtaaggcccaggcgcaggagcagctgtggcccccgagagccaataggcgccagggtggctgagtgcaggcggaacttgggggcgtcgaagagccagggttgggcctttagccgggtctcccagatggcagtgatggcctcgtccccacctggcagtgggcgacggtcatgggcggggctcagctcggcctgtatctgctcctggggcaggcccccgccagggcactgcagcagcaaggtcacctcaggatccatggtctgaacggggcagctctgggggaggatacggccaggcctgtcatccaggggggccactaccactcctgggctgcgcagctagccccctctgtcgcagacctcctgagggtatccgcagcgcttctccacccccctgaccactccttgggcagtaaaacgtgccatcttccccgcaggagccccgagtcccgcagggtatccaggacgcccgggcatccctaccatccagaggtcttgggttcaggcgccccaaatgcccatgtcccccaaacccaggggtctgcctccgacccggggcgcgcggggacccctttccagggcccggaagctccagcctccagcgggcgctcaccagccgccgggtccctcaggctccgccccttccccgaagcggaagtgcccgccccctttccacgcggcttttcattggcgggtccgccgcggtcgaggatcctggaggtttgtccccgccgccccgacgcttccgcccggtccgtcggcacgtcggccctgcctcccggaccaccctgcggggcgcaccagcgatctggggtgcggggctcggcctccctgcgctcctggctgaccgtgtgaccttgggcaagtctggcctgctgggccttagtttccctctctgcagcagggacttgggggtggtgaacttaatgagccgtatactcccacccagcgctcacttcctgaggctttgtgactttctgggagggatggggacgtggaaggggccttaaagcagtcccccctcgtcactgccccccacaggtcttaaccatgaacttctctggaggagggaggcaggaagcagcagggtccaggggtagaagggctcccagaccccgagaacaggtgcgcgcctcctccccaccccctcccaccagtccaggctccctgggagttgctggggggcggagctgaagggtcctactattcctggagaccactggcactcctttctctctgggctctctctgcagtgggtcattgagggttcaggatgggcagtagggcagggtcaccatggagactaggggccaccgctgggttctttcaggaccgagacgtgcagctgtccaaggctctgtcctatgccctgcgccatggggccttgaagctggggcttcccatgggagctggtaagtaggggccttggaggctggggcttgagcccagagagaaacgtgagcctgtctgcgactcctccctgatggctgcctccaccgctccctgaggaaggcacagagtgcacttcctccccatgcacagaggagagcaaggcctagagcccctgtcatgtccacagcagactgaggagagttcttgtctgggccaggcctggtgaccgccccctccagccaagcagccagatcagcacttaccccgagggcgagccctggaggatacggtgcagctggtggtgtgagtgtgcactccgggccagcgctatgctgggcactcacctccctgcccctccgtgaggcagatcctctttttatgtaagttgaaaaaactgcggcccagaaaggggagactttctaaaggtcccacagaggatgcccaagcgatctccaagcccagactttgtttcggttgcctgtggctccctgttaaccctggcccagtccagagcaaggttagctcctgagcaccctgcctgcccacagatggcttcgtgcccctgggcaccctcctgcagttgccccagttccgcggcttctctgctgaagatgtgcagcgcgtggtggacaccaataggaagcagcggttcgccctgcagctgggggatcccagcactggccttctcatccgggccaaccagggccattccctgcaggtcggggtgaggggacaagtgcgagacgagatgggagggacccctgcctgcgaagggggtctcactgctacccgttcaaccaggtacctaagttggagctgatgcccctggagacaccgcaggccctgcccccgatgctagtccatggtacattctggaagcactggccatccatcctactcaaaggcctgtcctgccagggaaggacgcacattcacctggccccaggactgcctggagaccccggtatcatcagtggtcagtgccctcccctccacctagctactcccacccactctgtcctcccaggtccccttcaaaggttacaacacttgtctggggccaccccatgtccggcatggagcagcacccctgcatcccccagcccaggaccccagtctgcctaggttgctgactgcactccaggtgcccaggcctcagctccagctgtctctgcaggcatgcggtcccattgtgaaatagctgtgttcatcgatggacccctggctctggcaggtgagtctgga

SEQ ID NO: 915082 - DNA, 4001 bp, Homo sapiens
tagagctgtcaaagacctttattcagtcctggagtggagctggcctgacagggtgaagccaggggctgcttagggcgggccagaccctcagcccctgagcaggtcaggccggccaggcggggctggtaggtaccaggtgccagcagctgcagggcaaactcagtgatgacagctgtgaggccccagacccggtgtggtccatgcaggaagacgggtagtgtgtagcggaagtggccaccccggcagaagtgggtatagccctgattctgcgtctgcagcaggtgggccagcggcagtgcaaacacctcatctacctgcaggcaggaggcagagagggtagacagaggactggaacagcccaaccccctcatatcccccagctcacctcctccgagttgggcctgaggctctggggatccagtgggcctacaccagcaagcactggcaccacggtggccttttgctggggaagagggcaggtggtcagggaagcatggccttcgctgggtttgaaggctggggaggggagtgtgagaggaagacccctttgccatgcataggcctttggtagtcatgttcgggtccacctgcctgtgtcctccagccatgctgactgactcaggtcccctcaaatgcactagacctgttccctctgcttaggacaatctcccacttggcattcaagcctgggttcaatccctgcctaccccatgaagcttccctgaccctaatccaccaaactgagtggagctggcccaccccatcgccctgggccacctctactcaggacaccagagcctccccaatcccttcccgagggggtgtgtggggtggtgcatgtgaccaggcaggttaggggcacccttccacactttgtgcccgtgggggtccatgaccactctcctggtccctggtagcccagctccagggcaggcacagagtgagtgaatggggtggggtggcctcagccaagtggcttaccggatcatacacaggccgcagcaggccccacacgtgctcctcgggcactgccaggcccagctcctcccgggtttcccgcagggccgtgtgcaccacatcttggtcagccgggtcgcacttgccgcctgggaaactaaacagacacaaggagtctggtccttggactcttggggccacggagaggtcggggtatcggcagtgcggggggggccactggcccaccgaagtgtcgcctgcctctgcccctagtttactgggaggccccaggcaagccatgcgacctctggaggccagtttacctccctgagcaatggggataaggaagagaggcccgggacagcgcaggataagagggtctgcagcaggggcaagaagatcctggggctcagatacccaaattcggcctatggtggccccagcaacactgacattgtcctcaggatgttcttaattcccgccgggcggggcccgaacctctccgtagtcgccggcagggggcggcgtccgccctctaagcgggaaacagctcaaaggggtgtcccggcccaggcgtgcgcgcaaggacgcgtacgaggggcccacgcggcgaggacgtggcgccccggcaggtgcaccggggccgacggacacggatcgctgacctctcgctgcagcccttgggcggagggactctccccagacccattttacggaggcggaaaccgaggctcgaaggggctaagtgccctgccagaggtccctgccagccccgggctcctgtagcctccggcaaagggcgaggagttcccggccgctgtacctgacgtcgcccttgtgcctcccggtcaggcggctggaccgcagcgtgtacagcagcgccgggaccccacgcactgagcagagcggcacgagcaccgcggccgacgcgggccgcgcgcggagccgggccgtggcccctgccagcagccggcggcagcgcagctcgccctcggccgacaggcagtcgggcagcatgtcaagtcctgcgcggccgggacactgagggcgcgggatcgggcgagggaagaggcggggcgaggcggggcggggcgctcagcccgggtccctccgaaagctgagagggagaaggggcagcccgcgcgacgcgtcccgcctggggggctgcagagcggcagcggcgtcggggggcctcagtggggtgggtctgttcgtgggcggggccttcccggagacggggcctcggtgggactgggtctgttcgggggcggggcctgtttgaaggcgggtcctcggtgggacggggtccgttagggggcggggcctgtttgaaggcggggcctcggtgggacgcgttgagtcccccggatgggagggacggagggcggcggggcggggcggggcggggcctgcgcgggagccggactcggacgttactgccaaagggcggcggggcctagtaggcaatcgaggttggggcgggctgggggcggggcctggaccggagcttttgctacgaaggactggggggcgtggccaggaggactgtgcttccggcagggccgggccgtggccgggggtgtggccgcggggagggagatgggcgcggagctgcaggacctgccggttgtgttctccgagatcctgaaaccacgcgaaccgtgaagcgcccggcgaccgtcctcggtcccgttgggtcctggcgttggggtgtctgatgaggccccgccggcccccactggtccgtccctcccctaggggctccaggatgtacggagccgggatcccacggggacgcccctccaggaacccgaggtcgatcggtgcgcgagaggagcgtccggcccagccctccctccggtcctccctcccgataccgctgggtggcgcgcgccgcccccagtcttgtcttcccctctggctccgtcggactccagccccaggcctttgacctccttgtcccagcgtccagagctcttctcccttcctgccttgagtcttgaccggattcccaaatccctccccctttcctacctcggcccctgtggtcactgaccaccgtggttctgcgcccttccaccagaccctgggcttggggaccagatgaccccagccttgcgcacagcatttaaacgtggggtggcgggtgtccgccatgctctgctgtgtgacgttgagcaggtcccgcgcctctctgagcgccagtttcgatcctcatctgggcaagtgcagccctgccactgggctggagtcaccacttttaatattactgtgtgctcccagggatgcggacggcactgggcagagcttcgggatgcctacagggctgatgtggggactatgatgggtctgggagttcctgaggcccccacccaccctgaccacgacgacagaagtgctctgaccactcatgccaaatagtttaatgttagggggaagggagaggtaaggcagggttttcgggagttacccccaaagcaagagggcacagtattcaggctgctggggttgggagatagaagtcctggttccaagcttgccatggtcccagccttgctgtgaccctgggcaggtagcctctttctctagactttcacctaccctgctctccttgagacagagatggggctggagggggcggggcagaggctgattcccacacccggtgtaaggtccagggtagcagggcttccccccagggcttctggcatcactgggagtcctggccaggccccaggcacaccacagtgggggacaggagccccagcccagctgggagaggcaggcctccttgatccctatcagcccggatgttggggagggggtatggtgctggtcgggtccttgggatccctaggtggctcggggctccagagtacaggctctgatacgtgacaggcctgtaggtggccggggccagcaggacctcaggtgggggcagcagctgatgatggagccaagcaggggtcttggaggtggaagctgaagctttgttggggtctgagggaggaaatgagtggactctgggcctcccatcgcatcct

SEQ ID NO: 915083 - DNA, 4001 bp, Homo sapiens
taggctacgaaaagaatactttggaagctttcacaaaaaagtatgtggttcttcctctaaagaagaaaataccacacagaaagagggactgaggaaacataaacccatctgtgctgacagaaagctaccttacatgatcctcatgttcgccccaggttcccatatattcacagcagtaaagatctccacaaagcagagaggcccaactcccttaccattaaagctttaacgaccagacaacccagaagtttggaaacatagaaccaggcaacagatactagagagagggaattatgtattaaagcaagaaaatatcatcacgttttcaagagggagtgccattccagtaaagaggacagcttaatactgaggttcaaatgccactaaatgaaaacgggaaagcgaaattcctgtgccctttcagcccaagaaattattccaaagcatacatttattcccattacatgtcgcaaatcctgcctagccattaggatacagtgacgaaaaagtctctcgttatctagaagggcagacaaacacgcagacttttaaaataccagatggcaggccgggcgtgatggctcacgcctgtaatcccaagcactttgggaagccgaggcgggcggatcacgaggtcaagagttcaagaccggcctggccaagatggtgaaaccctgtgtctactaaaaatacaaaagttagccgggtgtggtagcgggcgcctgtaatcccagctactcgggaggctgaggcagggaactgtttgaacccgggtggcagaggttgcagtgagccgagatcgcgccactgcactccggcctgggcgatagggcgagactccgtctcaaaaaaaaaaaaaaatgacaagtgctaactcagaggtaagcaaaagagagtacccagaggcggcagcatcaacccagtgggctcccgcccacccacaatcttcacacagtcacaccacttatagtcataaatttgtactctccgaggtgcgtgtatgaaacatgttatctgtgagagtccatggatgaaaaacaaaaacaaacaaaaattaaaaaaaaaaaaaaaaaagacttaacctgttttgaccaggacaaccaccccaggaagtaggtaaggcaggtaaggtcattgtttacatatatgaaaagtgaggctcaaaatacactgaccagtccaagacaacgcgcgcccccacaaagcaccttccccgtccccatttatgcccaacccataaacccaaagtagagccaacctcgcactggctacgtaacccgggccaagctaaacattataaacctcaggctccccatctttaaagtataacaggtggttagaagattaaaaagataaacatttggcaggtcattgtggacggtgtagctcagaaaatgctgactactgcactaccataactactgctattgttaacgataaaaggcaaagactttccaggacccgacccctcgcttacaagcctttcgggaacttgccctatacccccgaccccagtcaccttcagatttaattccacagacacgcccccaaacagaccctcccctttaaggcaccccccccccccccggctcctccctctcaggcgcctctcctcacaaaccttacccccatagattctgccctttcggactcggttatggaggaggccttccgctcgcagcggcctctccagcaccccttttaggcctgagcacccgcaggggtgcccaggccgcacgccaaacgcgggcccgcgccggttacctggctgcgcgctcccgctctgcctcgcgattctccggaatcgtacctcttcgtgggctcgcgccagcgctgtgagcgcacaattagtttaaactatggccccgccccctcgcgctgccctctgattggcctctgtcggcggggcccgcttaaggacccgggaaaaggaagtttgagggccactgggaaagagaaggggtatcaccgcttccggaccccggcctgtacttgaaggcaaagagaactacaaatcccagcgtcacccgcggccttgaagccccgcccctgacaaactgaaggtcccggtaagcatcgcgtcagtacttatggcgcctgccgggttgtggtgacgaaagcagttgccatggagttgctctgagtaaccctgaggcagtgggacgccaagactggagaggaagcgactgcgggtgagtcgggcgggaaaacaggaaacccgttctaggggacaagagatctatggagaagggaggggcactcacagaacgactaagaaccttcctgctcggggatctgagatttcccccaccgaccctcatcacctttcacagcgaacaagatacaacactcacatgggacagactgggcgagggggagcagagggagggataggcgttgagatatatatccatacagatttggggatgcttaagaaccacccccagggccgggagcggtggctcacgcctgtaatcccaacactgggagaccaaggcgggcggaccacttaaggccaggagttcgagaccagcctgagaaacatggcgaaccctgtctctaccaaaaacataaaaaaattagccgggcttggtggcgcgctccagtggccccagctactagggaggctgaggtagaaggatcgcttgagcccggagattgaagctgcagtgagccgtgatcacgcaactacactccagcctgggctatagagcgatacctccatctcaaaacaaaacaaaacgaaacaaaacaaaaacaaaacaaaacaacgaaccccgcccccaacgcaaacataaagctcccaaaatcggatgcttcaagttccaggcataacctgggagatcagaaacgccctcagaaatggggttggttttcctctgaggaactgagaccctcttccaagacatgcggttagcattagattgagtaaatcgcagtcgctaccctaattctagagatgtaggaaacttcctggggcgtgaagtgcctcattccttcttcttccaaggagtaaaaccccttctcaatctgtccccagattcccttttctccccacaccttctccgtggtccgctactcaaagctctacagttagagcttcattttttttagtactcacgacagatctattacatttagtaacctacccagtgctttcacagtctctcttttgatactcttaacagctctgtgagtcaaggatatttatcttcatttcacagattggaaaactgaaacccagagaaaagggacttgcccaaggccacacaccaaattagtgacagagctagaactagactccagttctccgacttccagctaagtctctttagcttcagcctactgcctctatagcggaaggacttgttccaaggaacaagttaaactgccccagggaaaaggaacctgtgtggcctactttgtattatttacacttcagctggaatgaatttcagatcctcccctgaaacttttaatggggaaaaggaactagagagactaagacaatgagacttgaacatttttaactaaacaggaaacagaagggctaacacagcacccatgtctgaagtgaccatgattagctggtttctagctggtgactagctggccctgactggtccacttactaccttaaagttctcccaggtttggtcctacgccctcttgccactgcactctatattctcttcttgggtacccctccacacccacaacttcattttccacctgtatgcaaatgtacacaagtgtgtatctcaagcccagccctcatctctaagctccagatctatatagccaattgcctcaacatctcctttaggatacctcaaaggcaacccaaactctacatttctgaaattgaaacaatctctgtgtatcccaaccttttcctccaagcctggatctcttccagtgctcctacctttatccacaatatacccaagcccaaaacccaagttagtacctcttccatttacttaatacctcttccattt

SEQ ID NO: 915084 - DNA, 4001 bp, Homo sapiens
agggagctgtccttgttctctcttcttttaccatcccttaccccatattcaatccaccaccaagccctagtgaatctatcttccaaaggtatcttgaatccatctacttttctatttctagtcattcccacaattgagccaccagcaacccttacttgggccatgataaaagcaaaattttttttgtattatacccatctaatccaaatccactttccacaaagtagactgagatcttctaaaaatacatttaaaaaaatttagattcaggggtacatgtgcaggtttgttacatgagtatattgtgtgtatattcctatatacatgaggtttgggcttctgatgatcctgccgcccaagttgtgaacacagtatccgataggttttccaacctttgctcccctccctccctccttttggaatccctagtgttaactgttcccatccaaaaatgcaattttgatgttagtaactctttaaaaatctttcaattattactcaatgtacttaggataaaatccaaaaatccttaaaaatggcctaagggtccctcatggtccgagtcctgcctacctctccagcctcagtatctcacatcactttctgttttacccactgcacttaagccacacagatctttggtcagttccaaacccgccacattctttccacttcatgacctttgcatatggtgatcctacttgctggactcctctctgtccactccccatgcctggctaacctcgtgtcctttagatctcagggtaactgtgaattccttaaagcctttccctgccccactaattatatttggtcctcttattagcctctcataacccgtatatttttcctctagggcaagttttcctccaaaaaatttccccatgaaaagtgggtctacatctattctgacattgctacaacgtcttgcatgatgaaaattgcagttttgttcatttcgtcctggtacctagcacaatgcctgacatattgaagctcgaacgtatttgtacaatgaaggaagctgtaaagcactataaaaacataacgggttcatgtttaaaattggtcttatgggctttattcccctaagctacatttcctctgcttctggtgttgcttggtgtatgtgtgtgtgggggtggggggggggagggggagaggtatctcttctagaactctgtgtctcagttttcccgattctgatacgaactgaaaaaacaatctttctctttccctaagtgtcaattaccgcttctagaatagcactttgggtacagcgacgaaaatttatacaccaaaccctaccttccaggggagtttggcgaaccacaacacttaccaatgaatgaacctgtttctggttacggagaacaacttgccactctccacgtagtaaaagcctcccgcgctttcactgtattttacggcgccagccacggcatttgcagtccctgcaaaatgaacgtggtcagcctgcacacgcgtcttctgagaaatgacagggactaagggagctgacaaagcagagagtgacagactgacaacccatacaaagaaaagaggaaaacgtcggacatcaaggaatctctgatcccggggctagaggcatgtggactcaggaggatgaaacagggcgtcagggaccctgggacccatgagaggagcccgaggggacagatgggatcgcaccctccctggccatttccgtaccaatgctgcagactgtgaattcccgaaagtgcctcggcctttcgcgctcagctccgcttagctccacgaagctccgttccagggctcccgccgccgccatcttcccgccgtcgccgcgacgcccaacggaacaaaggcagggccgcgcggtcgccgtcacttccgggggtggggcgggcggagctgcggacaggtgaagcattccgggagcagaaaggcggctccggcccttcgttgcgaggcttccaccgggagaatgagggtgggcagcgaggaatccagaagagaagggggcaggggaggcagactctatctgcgggaaccttccagtggccggctggaacgcctccggagggcggtgctcttttctcagcggccgcagggcagggggcggggccgggtttgtttctgtttctaaaacgcggggctcagtcgaccaggaggggcgaggtccggggagtcccggcctttcggcgtcctctgccggatcccgggtttatggtcacctctccctcggttagggtgtccgtctgtaaatctttggcgatcctcccttcgctcttcagtggcgacacttgggatggcggggtgaggaaggggtagtgagggaaaggcctttggttttggtctttcccctccccaagagactgtattcgtgtattcctgtataatgaaacgtaatgtggtaaaccttggtgctgccacttgctgaggttacctgagtgctactcacttggatacgtgaaaggaatttgccattccttccacccgtgatcttgcacttggctgtcaatgcagtaagggcccatagtgggtgtttagaagatattgtgggagtagatgttcaaaatcgaggaaaatgctaatctccagcggggaaggttttgttccttagtgatagccaatagaagttaaagcacttctattaccagtgaccacaaccattccctgtcattctccgtttcatttatctggttccgaccatcattttctatctttccacttcactccctctgggacaccaactttggcagtgcagtcccctcattctacctggaatccattgttctacaaaatcttcactgtcccacacttctttggtgtttctttcttatcctgaataccattaaattacttcattgcctaactcttcatcggtaaaaactacaacttcgactacattcaaatctgtagctgaacatgactggagaaaactatacacccgggtcgggcgtggctcccagcattttgggaggccaaggcgtgaggatcacttgaggtcaggagtccgagaccagcctggccaacatggtgaaacccggtctctaccaaaaatagaaaaattagccgggcgcggtggctcacgcctgtaatcccagcgctctgggaggcagaggtgggtggatcacgaggtaaggagtttcagaccaacctggccaacatggtgaaaccctgtctctattaaagatacaaaaaattagccgggcatggtggtgcacgcctgtaatcccagctactcgggaggctgaggcaggagaatcgcttgaacctgggaggtggaggttgcagcgagccaagatcgcgccactgcactccagcctgggtgacaaagcgagactgtctcaaaaaaaaaaaaaaaaagaagaaagaaaaaaagaaaaattagctgggcatgatggtgcgctcatgtaatcccggctacttgggaagctgaggcaggagaatcgcttgaacccggaaggtggaggttacagtgagccaagatctcgccgttgcactccagcctgggcaacaagagcgaaactccgtctcaaaaaaagaaaagaaagaaaacagaaaactatacacccatactgacatgcctccctgtaactccatcaggaccatgtaccttgagtgggcccataatgctgcccagcaaacacattgtatttgccttctccatttactgttctaaatgaatatttcataactcctataacctccattgcctcctttgtcatcctgactctcagcttgcttcttcatttagaaaattaaagcagaggctgagatggaaggatggcttgaggccaggagttcaagacaagcctgggcaacatacccccatctctaataaaaatttttaaaaaactagccaggcatagttgtgtgcctctgtagtcccagctataggaggtttcttgagcccaggagttggaggatacagtgagctacaatcctgccactgtgctccagcatggccagaaagacacccatctggaaagaaggaaggaggaagggaggac

SEQ ID NO: 915085 - DNA, 4001 bp, Homo sapiens
gaactgagaaaatgtcacggaaaacataccctgttcacgctttactatttagactacggttctcttctgcactactagttctgagtttatgctttgtcatctatacaagaacaaagtaacaatcttactgatgtgtacagaaccaagtgtcaactaattcaatttcatcaaatctgaagagtcaaaaagaataattttacccaagtatttcccagtacctttatcctgtccaacctctagttttggtttttaaataccctaacttcctccaccaggtaaacatactgtaacccagttaactcgagtttcttttcgaatttgtaagaccgtcacagggaatgatcactgctctctttttgctctttattccagttagcttcttcctccaaaacggagttttatttcctcaccttattctactataatacttcactttgaattctgtacctgaaaggagccatgagttccgaggtacaactactacaaacggactcctacctggctttctaagtcttatcaatatttcctgctttctattccagtactgttataaatccctaactgactccgagtcctcatcagctgacacaagtcaaaaaattcagatttagaaagggaaacaatggcttgtagttttaccgatttgtttccgatacataacaacgctgacgttctttaaccatcttctaagtttagttctcaagctctaggttagggtaccactaacgaagcttccaccttacccgtgaacagagctggtagcaactaaacggaaaacgctgtgaagactacatctacgtttagctacctaatgtccatgccgcaccgacctcctaaagggaattcttaataatgggagactgaaatatccagggagggtgaggtagtagaaaactgtttagactgtcaaaaatctggcattggctaatcctgcctgttactccgggcctcggtttccccatctacaaaactgatgtaaggtagggggattgacttaaacaatttctaaagtccttatggctatagtaatccagaaactcaatctgtctcctcatctggctttacactgaacacgtgggaaaatagaaaagaaccttttgctccaccgaaccgactcctattctcagatattatcttaaaaatctcccaaacttcggactcaccctaatcctcggggtgcccacttcccttatggagaagccaaggcaaataaagcccagtcccacatgacggtcaaggaagtgcggggcagaccgtattcagggtttcaaggcgctgaccccggaaaggccagcccaccgtggggtccttacaccactgaatgaatgagtacaaccagacagacacccactcgcgtgggcagcaactggagacctccaggcctagaccccactgatgtccattctctcccagggcctccaaagccgggcctcccgggctccgggcccccgggtcctcagcaccgcccctctctcaggccagaaggtgcgcgcagcggcgctagacttcgaagcggagaggccctgagacgccccgcgcgtccgcccgcccggaaggggggagaaacctgccggtctcggccgctgcagctcgggctcccgacttaccgcggttcggtggggaaggggaagtgtcaggagtcccctgctgccacccgccgctcacagagcagcgcgcggcccccacgaaaccgtcgccgccgccgctaccacccctgccaccgaccgccgcttcgggcgcagcgcgcagagggcccgactgcgtcacacgccgcccggcgtcagaggctcgttgcggacgctccgccctcgccgtccgcgaattggtggacgcggccgccactctgggtcgaccctgttattcattgggcaacgcgtcttttgaaaccgaactgaagggggaaggggcgagagggaagaggaggggcagaaggagttcggggaggcacagggtaggagcggtgagagggccgtggagtcccgcccctcgccgccgcggttggcgggagcgtgtcgtgacgtcacacagggcctctcgaagtgggcttgtgaatggctagattgggaagcaccggcggggtgtcgggaagggtggtgacgcaacatagagactccgcccccttccttggagcgccgcgactcgggctgagggagctcgggccaatcagagggacggccccagaatggcatggtaactattcgaccctttccttgccccggtccgccggcgctgctgggaaggcttcctagtctctctgcccgcacttcccgcccagaccacgtgcggagcctgagggccctcttggaaggtctgtctgtccaaagagtttgcccgaggcttcttcagggccctaaatcctgaccctattctctcctgacccatgctcgccccagcactttctttccctccctgaatttctaggatggacattaggagcattagagatgccctaagggactggcccaccaaagggcctggtacaaatgaggattgttggaacgtctttcccagctgcacgtggagaacccctaattctttttttttctttttcttttgagatgaagtctcgcgttgtcgcctagggtggagtgcattggcgcaatctcggctcactgcaacctctgcctcccgggttcaagcgattctcccgccttagcctcccaagtagctgggattacaggcgtccgccaccaggcccagctaatttttgtatttatagtagagacggggatttcactgtgttggtcaggctggtctcgaactcctgatctcaagtgatccacccgcctcggcctcccaaagtgctgggattacagacgtgagccacctcgcccatgaactaatttttttttttttttttgagatggagtcttgctctgtctcctctttctcccaggctggagtgcagtggcacgatctcggctcactgcaatctccgcctcccaggtacaagagagtctcctgtcgtagcctcccgagtagctgggattacaggcactcgccgccgcgcccagctgattttgtatttttagtagagatggggtttcaccatgttggccaggctggtctcgaactccggaactcaggtgatccgcccgcctcggcctcccacagtgctggccttacaggcgtgagccaccgcgcccagccgaacccctacttattcttaaaggacgggtatttcaaatgttcccatcttctcagtgatacatttgccaagctttcacagcgagttgagctaatgcttgggcaggcctctgttaaagccttgtcactttgtatcctattatttaccctcggttttctgtgccttgggctcttcttggaagtccttctggggcctagcccattagcagaaaactgatattacaagagtgaaaggtgggcattttctagaaactagacctgtttagtgactgagagtctcatagcaggaactgtgcgcagaaagcaaagcgtatactggccgggctggtggctcatgcctgtaatcccagcactttgggatgctgaggcgggcagattatttgaggccaggagttcgagaccagcctggccaacatgatgaaaccctgtctctactaagaatacaaaaattggtcaagcatggtggtgggcacctataatcccagctgcttctcggtttgctgaggcacgagaatggcttgaaccagggaggcggagattacagtgagtggagatcctgccactgcgctccagagtgatctcaaaaaaaatttttaaaaaacctccaccactactcctttgtgagacatgaatgcaaaattgaactgggcttttacctaaaatgtaaatgagtttaaagccatctgggttttcggtgatggcaagggattagagataattgatttatttgtttgtttaaaaaatgggagactgggagtggtggctcacgcctgtaatcccagcactggggagttcaaggtaggaggatcacttgaacccaggagttcgagaccagctcgggcaacatagtgagt

SEQ ID NO: 915086 - DNA, 4001 bp, Homo sapiens
ctctccgcacagtaacatgaatgcgatctcgatcatgccaagtatcaccccgacggttaggtcgggtggtataggggttgctgtgggtaagcagagaataaaatgaccacaaatgctaggaaagtcttctcaaaggccttcctgcactgttagtgggactacaactaagactgtttaatcactaagctagtcctggcatttctcactctaacaggtgggaaaggaaatgacatggacagtaaaagggccatataatctcatgagccactaaattcaaaccagaccaactggtcactcactatcgtactcggggaccatcctgggcatcactcattgccacatctccatcatcttcctcaaggcgggaagaccgaataccagaaccgcctcttccagacctacggtttccttcaccatatttccaccggaagggaccccggcctttcttctttctttgagggaaattaacgcgttcatcatcgtgttctagagttagaaacaggaacacaaattagaagtaagtaactggtccggtttggtgtggcaatcatagcttctagtactctgaactattggaagagatacatactaacgacagaggccatctccatgcaaactccgctccctatccacaggaaagaaccctctctgtgggagggcagcatcagggaaaagttactggaaaactgtgtagggcttttgaaaaatgaagtagaaactggaattagagagaagcaggatgtagaaatgtgagacccaaaagtgtaactgaacacaaatcagacctctgaaagccacctgaaatctgccactcagtactttgtctatacagtgcagacgccagttacaaatatgaccagtttaaggatcctctaaaaattctccttgttctcaaactgccactttgaagttttgtgaggagctcttcgtttccatggccagaaatgtcctttaactcaggagacaaattctagactcaggctctagtggcagtgccaggctagggtgcttaaccagggaccctggaatgctctccaggaagatgaccttctgattcatgctgtgtaggactggcgtcttaaaaaaggtccctaactcccaaaagaggtctgcctaatacccagcactctgtaaacaatgaatctcaacaaatgaccctaggaaaaaagaacatagaaggcgcagctaacattcactgagaactttctccagtgccggccactatgcttcaggcacttgataggaatgatctcatttcccctccccacacacactcttaagaaatgctgttgttattccacattaagggggtggaaaacgagagttttaaattcacggtttcaacctccaccacgcactcctaacttactacaaagaactaacacccagtgtagtgttcagactagaatatccagttgatgtgtaagtctcgaatattaagccaaagcccaggcccgagagttcaagaccgactggacgcagtaaaaaatagggcatcagggcagcccacgagcagggcactcactcacattaaaggaagagtcaggccgccaaacctaactgacaggcatcaaccacccacaaagttcaaaggaatcccgtcaccctacccccgagccatccgctccgagccgcaggtcccccaacaccaggatgccagcaggaatccaggagtcaacaactcgggtgtccacctcgagtgcccggccccccgcgcgccgctccccgcggacgccgggcccctagcggcctcacgccccgggggctgaggcctaggccggcgccgcccacccgcgccccagatagccagttcccgacccgaagaccagcacttaccgctgtacgacttcccctcgtccgccatgccacagcgaagatcaagggcgggctcaggcgctggccgctacgccggcaaacaacctaactcccaagcgctcaggaccgaagtgtccctacgccgggcgccaccgcatttatacagcaaagcacgtcgcgcgccgctgacgtcccaggctgtgggcggtgccgccgcccggagaaagcgcggccccctgcgcgtgcgcacacttaaggccgtcgttcgaggggcggggcctggccctccacgccccgcccaagacctgaacttgcggaaccccggctggcagccagcatgtccccgcaccttttcatctgtccgctgacgctgccctggcagcttcagagttagtgctagagcacagtgctgccgccgcagcccagaactcagtgaggaagggggccgcacaaagggcttcagaggaatggagaccgcgcctccaggtgggagtgatggctcagacccctaccggaatctagccagtgtttcagctcggctccttgtctatacctcgctttcttcgcctataagatggattaacaaatcacgaagttgagaattagaatgtgagctcgaacgttgactaattaagggctttttttcctcgagggcttgactcggcaggtactatgcctggcacatggtaaaaactcaacatatatttgtgaaataaatgaatttgtgttatgaatttcccccaccccgccccgccctgagttgctgagtcaaatgatacgacatctgtcaggggtttggcgagcattgtcttcacagaccttccatcaatggcgtcccctactagaaacccatcgtgtcaacggggcagacagtgaagctcaccagcagtggcaacttgctggagatgccgaggaggacattttaaaatatcagggccttgggctctcctagacccccaaaagcaccaccaccagcccctgactgttgtctctatagcttcaacttcctttggaatgtatgagacaggggcactcgagtgacctcagaatgtggttgtgagtctcggtcaggaagaacaaagcacactaatctccctggacggtgggtattctgggcaggtgtctccattctctgtgactggctttgatttggtgaagtgcttggagggaatcaaaagcctcaactggagttgggaacaaattcttcaccttccactcctggaagcaggcagagcttctgcctcgcttagctcaaggaagaattacggccaaatagttggaggatacagatgaaacaggtccaaacactgcttgagatagtcctggaagttgcccccaatcagggaccccctctgggatcctgctcccctgtgtgaaaggaagtttccacgctaatgaagtgttgcaacacttggttctcccctgcctagaggcagctgtgtgtcagagcccaaaatagcctgtgtcagcagtgatacctggcagagccattagcccaaccctttcagttctggtactgggcagtgggctctctccactcgctgcctaggcccttcgacgctcccacccagaaatgatgacatggctagtgaggctgacagtcttgctgtaattgggagaaaacgagctgcagcacatttggcagattgagtcaccagcagccaatgtcaggggttgtgcaggcagctgaagggctcagggctccctgcctcacatggtgaaagaggaagaaagaggtcaattgggaaaattggtccctggggctgcttcctctcttcactcacaggaaggtgggtaagggcatcatctccctttgctgccaacgcttcctttgggagaggctggagagggtttataaaaatctcctagtggaaacaacctcccccactggcccccagctggcctctgctcccttccagtcacttcacagcagagttcaaatctagaaccctgtgtgtttcataggcctgagggtggtggggggaggacagggtggccagaggcaaggggtgggggatcaggggcagtggtcattcttagcagttccagggaaacagggcctttctcccaagtaccctgcacaggctcagtggcagcactggccacttgccttcccaggagggtcccaaaccccaacagagtgcctcagagtagagagggttcaagcaaggaagaccacaaagatg

SEQ ID NO: 915087 - DNA, 4001 bp, Homo sapiens
acaagtgttatttatttatttttgtttttggtggttaaaagcatcagcactttgaatatgttacctcattttccttctatttccctaactgccctttgttcctctcttgctttctctctagaatctagatctctcaacccctcactgccccagttgctctctgacgcttaacagatcaaatataacatcctctagcttttctagttgctctcaaaaggagactataagcaagtctactattttgggaaacataaattttatttataattataaatataaactatacacacatctatgtatatgtgtttatgtgtgtgtgtatatatatatccatatatatgcacattctatatgtttttctttttatttcattttccaaacaaatatctgtggctgatgtgtagaaatgcaagtgctttattttaatagtgcttttatataggcacacatagagaacaaagatgattagaagtggccatattgggtacgtttgccttgttttcatagttagtttcaacattttactatgtgtaattaaatatatgatgttggatttgtgatatttgcttttcttaatgccttctattagattgaggaagttctcttttaagaaagtttgtgaagtgtttctattactaatggaagttgagttattgacaaaggccttttctgattcattgaggtaattatatgaatttttaaacttttatgtttaaatgtgatgtattacattcgtatattttctaaagctaaacaatcctcctgttatggacttaagctgaactaggtcacaatatagattggatctttatacataactctgctgtgctatgtaagagtacaaattaacatgatcgttttgaaagcagaatggcaatatttctgttagtttgtgtttatctatgccctatgtccaagcaattcattctggatacatcacagaggacttctcagtcaggtccataaagaatcacatacaaagtttgttttcagttgattatatgtatagctgtaattgtagggaattaaatagactttaatatgtattactatgaaatggttaagaaacatgtagtggatgtgtattgtgggatactatccaacagttagatacaactcactagatttacctgtaatatgaagagctcttaaaaacagctctaagtgaagaaagaaataaacataaatctttatcacatttttatgtaaattaaaaatatacatacaaagcacaatacatggatacacacatactcaaagacaaaaattaaaaaagaatccttcctgcttttctggctttgtttatgactcatcctactgcccacctggggtggcctgcccctgcaccaatctagactctatagtcagtgaatccccagctcaggggcaatctctacaggaaactttccagcataactctagaccacaacgatctctcccgtattttgaattcctgtgacatattcatacattttccacccaaacaatgtcatacataaaacaaggcaaagaaatatcagttgtaaacaggtatttttgatgtccttcttcctctctccaactagatgttaggttgagtgactgtatccatgcttgcttcccacaaagcactggggacttttgctggttggttattagagaaatattttatcttgatgctgtctcaccgtcaaaaccagcctatccttgtcagtaagagaggctctcactatcagtttttttttttgtttcccacactttcttctgagctttctcccttttcttatctttctctgacttgagagaacccctcagcagacacagtctttctaatttcttttgctttgttcttccctgccctccactgaccactggcaagattagaaatagagaaaggcagtctccatagttttgcttactcacctgttttaatgatctctcctatctgggtggctggaaaagtacctgtgagttcttaactggctcttgtggctgtgtaaaatgtttttgttccttgtctgtgaacacatttattttcatcagtctgttttcctcgtaaattggcttatcttggggtggagatttgaagaggcaataaacagtagtacaattaactgacaattagataattccacagcctctgttaactgggtgttactcgggtattctttgagattccttctctctccatgttactggtgacccttgggaatggaaaacctcttagttctgaaacagctgtggtccttgaagtcatagtgtaaaaataccccaagtgactctatggataggctttcctcagaaaatctgaagtctcacgacaactccaaacaagagaacaaattgtcagtggacaccatgcagagaactggtgggtgattgagaattctttttttttcttttttttttttttttggacaaggttttgctctgttgcccaggctggagtgcagtggcgtgatcatagctcactgcaacctcgaactcctgggcccaagccatccttctgccttgggcctaggggctacaggtgcatgctgccacacctggctaatatttttaatttgtattttgtagagatggggtcttaccatgttgcccaggctggtcttgaactcctgggctcaagtggtctgtcttcctcggccacccaaagtgctgggattacaggcatgagccacttttcccagctggatcttttatcggtttgaaaaggatatctaataaatggggaaggactatttgctctgagttagggaaaggggatatggttcattaactcgtcattatcataaacattatttaattcaccaatacagtaaatgttgctgtaacttctgctatgccaaatgcctgtaacatgaaagggaatatatgggtgtatatgaataattaggcctattaatccttctttcccctctaacccctggtcaccactggttttcttactgtctccatggttttgacttttacagaatgtcacatagctgcaatcatacagtgtgtagctgtcccagattggcttttctcttagcgatacggatttcagtttctctgtctttttgtggcttgatagcttatttctttagtgctgaataatattttactgactacatattggagacctttctctcatgcctcatgcccttccctctggaaccttcatatttgtcatgtgactgttacttcagctctgtaacataaatctaacttcatctctctttctaagcctggatgcccagaccctgtgccaatttgtaagatttagttttgaagatcacaagtattattagtactgtgctaagtactcataggattaaatgaattaatacatgtacaacatttaaaaacagtttctgacacttagtttaagcactaaataattagcaactactactatcaccaccccaactactactatttatgcatgggagtaaattttgagattggcttttttctcccactcagcgtaacgtccacgatgtccatccaagttattgcatgtgtcaacagttcatatgaacatattgcctcactcacaattaggcaatattgtttgttaccttggtttctttaaccaatattgtttctaaaacctactcctcactactcaatttgtttcttatcttgtaaagtctttggtagctctttcagaggggaccagtattagactgagtacatattttttcttcctaaatagatgataaatttacttgctatagaattaggtgaaaaatatttttcttcttagccttgaggatactgtttcattctcttcatgcatccaatgtcatttatgaaatgtctgatgtcaaagttagtataattgtgaatctttgtagcatttttctcttcatccttggtattatgaaattttatgcagatctttttatcttcatcatgtttggcgcttttaatggcccattagacctgagatctaatatctgttaacttttctttcataattttgatcacactttccttttattctgtattctgcaagaattcttgagttaacattt

SEQ ID NO: 915088 - DNA, 4001 bp, Homo sapiens
ctctgaaggctttttttaaccagttcatattaccggctgaatgccctagactgtggtgcttcttgtttgaagcttggaggtaagtctgtgttagacaaaggttagaaagacacttttaaaggtagttgggttcaaatgtaaacgggcctcgaatggctaaacaaaggaatttgttctttatactgtcagtggtgaaagtatttgatcaggaccagaagatgataaaagcagagtttctgaaagattatgtttgtactaaatggttgggaagaaaagaaactggaagcaaggtgagttaagaaaaacttacaaagggaagagccaggagacactaaactacttaaagaataagaaaacccctgtgaagaaggcagaggactgaaacagaaacttaattagtttgaaatctcagaggccaagggaggaggagagaattttgacgcaggatggttacagtgccaactagtacagagatggcacaaatccatctgccattttttaaagaaaaacaataataatgtatacattgccatttaaaatagtaataataatatatgcattgccaaagggatttatgctgaacagtgaacccctgatccacattctcctgctaagatgatatgcttttaacttttatttcttgccatgataaagggggtcattcaaatgaagtcaccgtgaccttctgtgaaattcttaaaaatgaaacttcctacctttgtgtggtcttttgaagccaagtaaatgatccagaaaattaagataaatgtcaacatcagcagtaattttcgagctatggcatttggaaacaaagtgagtatcctataagaaaggacaggagaaataatcacattaaatcaaataagtacgacatggctccgtacactttggttcctcttcagtaatttccagaacaaggtgatgttatcctgggttttccaaaagttcctttatatcttctattgtcaatcagaaacaaagtgtttccctgaggcagggaacaaaactcctagaaggactcctggtttctgatactcaggttaattctttgggtttcgaatcatatcacatactggaacctgttttcttgtcgaggtctcagcatggacaacaaggttttagattatttaccagaaaaaacagtacccccacccccaccccacccccaccgtgtcctctagtgaatcctggtctctaaatctctctctctgatacacacacacacacacacgcacacacatgttgtctggtaccctctctccctggtcttatctgcctcaagagcttcattataaaccacccatttacttttttaggcagcttgttgccaccccatgttatctcctcaagccaaagcagttgataaacactgccaaaaagagtgaaagttacagtctttaaaaaactcagtgttgagtggttagaatttcagtgttagtttttaaaacccagaatcccaaaagtatgtggcaaagagctaaattatggcaatctttaccaaacatttttgaccaggacccatagtaaaaaaaataaaaacaaacaacccccccaccccagaaaaaaaacatcataccaaatccaactcaggacacatgaatgcatacacacaaacacacacacacacatacacgccccaaaactctcataaaacaatactatctacactgcacacaatgcactgtgatttttttctagttactgttttattccattgaattgtattccattttaaaagtatttttatgcccaaataaaacgattttactatcctctaaagggttgcatcacaccatttgaaaaacaccaaatggtctatagttctcccctcccttccctgacgttagcttggcagtaagagttggaaagtaccacacctatggatgagtattttctccaccatcttctcgtgttctcacaggaattatagtgtccagagactctccttgattaaagcagtctttgcatttatcttagggttggagtttccctatgagcttcattgatcaaaagctgacatcctatttgtggccacagcgtgccagctggaatcataaacctcccttattatgatctgttcctgcccaacccacaccacagagccagaaggaaaaagccatgaggaagctctgaagtttgtttttagagactggacatctaattgcagcactgagtcacctttggttaaggctttacgtgtttatagacagagtgctcttcccttgctcatgcctttgtatggttttcacgtaggattagtcacctccacagtagcaggaaaagtaactgaaaaatcagaaagaagaaaaacagaagccctgagtccacggttcctgaaggcctgagaattgattcagctgggtcctctcaatttttggagtgctttctttgtaaactttctcttgctctaaaccattgcatacatcaagcagtcccacagcgatgatttaaattcaatctcaggccataagaggaacagccacaggtctaaatctcactgcaacttgaatatgtaacaaggtaagagaatccaaaagagcaaattctgtggatgtaggtctcatgacactaaggattttcagtggtcacactgcaactacctgccaggtggccctgctaccaccataacacacgggccacactcagtatgcattgctctgcatgagagtgtctagatatagatctctatatacagatatagatagatgatagctatctagatataaatatggatatatacatgtgtatacttcatagatatgtgtatatttatatacacatagcatttgtttgtttgcatctaagccagcacctctagccaccatatatccctccatgtctatataacagcatggatatcagaactgtaatcacagcatattggagattggcacagagattcggtagataatttttaaagaaatttattgaaagaaaaaagatatggatcctgccaattcttccccactccttataagacatgttcttctcctctgccttgtgctgcagtgttatgacagttataatagtgtccagaattgtttttcaactttattgaggtacagttcgcaaataaaaaatgtatgtgtttacagtgtataatgtgatgttttgatgtatgcagacattgtgaagtgattactacaatcaagctaattaacatatccatcacctaacatggttatttttatttgtgtggtgagaacgcttaagatctagtctctttgcaattttcaagtatgcaataaagtattattaactatagacacaatgctgtacaataaatctctagaacttattcatcctgtgtaaagtaaaaccttgagtcttctgaccaacatcccctatttgcccctctccctgaccagaccctcagcaaccacgattctactctatttatatgaatttgacatttttagatttcacatgtaaatgagataatgcaatagttatctttccgtgttctgtgattggcccattttacccagcataatgtcctccaggttcacccatgttgttgcaaatggcaagatttccttcttttttaaggctgagcaacacccaactgtttatgtgtatatatgacacaatttctttatcagttcatctgttgatgcatacttaacgttgtttccatgtcttggctactgtgaatattgctgcaattaacatgggagtgcagatatcttcttaaatactgacttcttttcctttggatatatacccattagcgggattgctggatcatacagtatttccattttaaatttgttgagtaatctccatactgttatccaaaatggctgtactaatttacattcccatcaaaagtgtacaagtattccctttctccctctcctcaccatcacttatctttcgtctttttgataataaccatactaacaggtatgaggtaatctctcattgtagttttaatttgcattttcctgatgattagtgaggcttgacatttttttcatatacctcttggccattagaat

SEQ ID NO: 915089 - DNA, 4001 bp, Homo sapiens
taagcaacctaagtgtccatcaacagacaaatacataaagaaaatatggtatatatacacaacggagtagtattcagttataaaaagaacaagattctgtcatttgcaacaacatggatggaactgaaggtcattatgttaagtgaaataagctaggcacagaagacaaactttgcatgttcgtttttatttgtggaagttaatacttaaaataattgaagtcatggagttagagagtagaatgatggctaccagaggctgggaagggtggtgggggcatggaggagaagtggggttagttaatgagtacaaaaatatgattagacagaatgaataagatctagcatttgatagtataacagggtaactacaatcaccaataatttattttacatttaaaaatagctaaaagagtataattgtcttgtttgtagcacaagaaaggataaattcttgaggcaatgaataccccatttaccctgatatgattactatgtattatatgcttgtatcaaaatatctcatctaccccataaatacatacacctactttgtacccacaaaaattaaaaattaaaaacaaacaaatgaaaaccaaaaatatagatattctgttcttcagatgttcccttaaagaaagtaaaaagatgagctaagcattgaagaagataggtgcaatgcatttatttgtgacaaagaaagaatgtgtatgtgtgaacacacacacagtatttatcctctcacatattgcttaatgattatcaggtatgttgtttggtatctagctattcaaactcccctcctataatctacaagtcttgtagtttagcctttcctagaacagatgaggtaataagcaaaaataagcttctgtaaaccacataaataaagcatttcctacctttgtggagttctggaaaactgtaaaaatgatccaggaggctaatataaacaacagtgccaatagtgacttataatttatcatacttattttcatgattaggatcctacaagagacaatacaaaaacaagcacaaaaacatacaacaaaacagaaaagcaaacaaacatgggaaacatttgaaatttttttggctcatgattactttttagcctcagataaataactcccagaaataaaccttcacccccgcaagctgtacttggtatctcccaggtgctctcttttagctatctgcttgtacattctacagaacagataattcatggagcccactgtgatctttaagaaatcgagcagcttaagggcctgaaggatgcaagcttgctcgtgtctagatgaagtctccagactatttgtcacctatcaggttccctgttctattcccttaaactcaagggcagacacaaaatactccagcaaatattaacactgagaaccacatcattacagtgcctgttgaatgcaaattagtttttctgtttcattaatgccaatctattaatatgtcctccttttctgttttagcaggctttctagcaccccctcaagcttgaaaagaattattttaaaacatttcttacttaaaaaaatttcaggctttatcagtatttttccatgattcatcttaacatttctctttgcaccggaattccaagttctcttttaacttggaactttaaactttaacatcagattgcttgaatgctgcctttctaaaactttccatccctcaaaatttaccctcccctagaagcacctttcaccccagatccctagtttatacatgggcattagatgtttctgcacccaaaaataaatgtcacacctttccctcaccttcccaattttacaaattttttcatacctttagtttacagattgttcaatcccatacatagactctctggcgagctaggtgttgagaatttcttctgaagccaccagtgtgctactggcatacctcttgtctataccaaaataaattgcagatataagttgcagtttgtttacctttagcatggattcacaaccttctgcttgtttcagctaagacagaagtgtcagccacgtcagctccaccttaaggaggggcctggatcacaaactgtagttattagctcaagcagaggtaggaaggagaaatgaagtgctctgcatagtaggttatatgatttcaaattcctgaagttttataagtctaattctagttacaataaataactgatgagaaaaagagtgtttgataaataattgtatttagttaatacaatttgataaatattatagttacaataaataactgatgagaaaaagagccacaagtttgaatgattgagagtaatcatcaacagaaagtcaaactttctagtttccatctagcgttatcatcaagacccagttggcaggattcaagtgcgtattatctcatacatagtaggtttcaatacaatttgctgaattgaactaaaagaacttcaaatataacatagggaagacaataatattaattgcatctgagactaacagagtgacagcttgtagtcatgggtttgaatccatctgggatttgtattcttgatctgatgaaaacagtgctggaaagagcaggcacccagacagctgcaccagtgcccacaggaagcagtagctgctggccctgtggctccgtccatgggttgattactgctgccctacacaggagggcatgcccatcatctttccatcttatttaagcatgcccatcaatctttccagtcttatgtttttaaaaagatggaatcaagaccagtttcacaactggtctacttgtttcagatcttgaaattcttccaacatctttgatcctgttctaccaaattcaccttaacaatacttctttatgtctttacttgatgacctttggaaaagctgttttaacattataaaactgggtgtaggattgttaaatttttcactgaggagcctataataagaaaaaagtatttgcagtgggtttggtttggctgttccttagaggactgatgccagcaaccacccaagttcacagtctactctgagacatatagatttatagattttaatttggtttggtcacatagattttgaaatctaatgttaacctggagtctgtttatgaggtaggcacaatagatatgcttgacttaaagaaccaagagtacaaaagaaagtttgaatgatttgtgcaggtcatctgatgagctttgaaacagggctgaatccaagattcctttcattttgatctctaacactgtgtgtttatagtgtatatgtataacaacataagcacaaagaatgaaaactaggaagttggaaaaactatcttgaagtctttataccatgtgtgaattgggataatattacttgaaggatagactctgattaattaagaaaaatattgtaaccctggtataaccactaaatatttcttttaaaaagtggtatacataataaatcaacaatgaagattaaatgaaataataaaaaatgtttgattagcccaatagaaggaaaaggaggaaaaaaagaagtggaacatagcaaactgtcaatatattcttaaattcaaatatatgaacagtgatctgaaatctgaatgatattaaccaggggtggacaaactttttctgtaaagaatcagatagaaaatattttcggagaaagaaactataaacaagaaaatgtaatgggtatattaaaattaaccttgtgatattcagttggaattagaataatcagtatgcactcagttttttgatggataaatatgcatttttatgcatacatgggttcatgcacacagatgtatattttcaagctctgtccatagagaagccctagaagcaatgacacctagtgcctagaccttggtttcttaattctccagtaaagggagccagaatttcttggagaagtggctggttgattccatcactttgtcaggggatatgaaatgagcctggagcatctcggggtgctaggaaatgccttttaaaaaatggaggtacatgtcaaaatg

SEQ ID NO: 915090 - DNA, 4001 bp, Homo sapiens
gctaactttcaaggacaaagggcttggacagaagattagatccccgattcctgatggatccagccactaacatagatttttcaggaacagaacacacttgataaaattctcctagggtttaggtggggaggcagggtgcctagcttaggcctgcggagtaaggatgggctacaaagtcttcccatttgtgaacgctcactaccccaccccccatctgcctgcttatgtccaatgtcagtgccaactccgtggccctggggcaatcagcggtcaagcctcaccccccaaccccacccacctctagcggtcaagcctaacccctcacccctgctaactatggcaatctggctgggtccctaactgacttcccaaactccgccacctctcctctaaagcgccctgtctctacgagggaggaaagacaggcagcttcagcaagggtccccggggccccgggctcccccagctatctaatcggcttcacccctgcactcccccagggacagagcctcacagggcctctctttagctgggggaaggagacagaacgctccttttgaatacctaagacttacccaccctcttttcctccagctttcctgctgctgggtcactgttagtcactcaccatccaggcccatttcctgataatcccccagccccctgggtgcaaggcccttcttattccctccaacacagacacacacacaccaagagcgggctggtctctaactcccaaaccgtaatctgggacacacacccacacacccacacccacccacccacccacccaccgggctggtctctaactccctaaccctaatctgggccaaaataggggggttggctcgcttctctgccaggcagagtgaagggcagcacttctcccagagggagggggcctcagctggggtctctctccaggatcctcctgctgcaagcgccccagccttccagaccaaagaggagacagggcttctcccggcttgagagggaccaggggcaaccagctctccccagaaaagtgaaacagagggagaggtgacagagggactccaaaatgtcagggctgggaggcctcgcagacccctcagtgccctgtacaggggtgagaagccaggcccataggaggaaagaggcttgcttgctctagatcacacagggagaacccacagtgagagcccacagcgagaacacttcgcctaggactttcccactagagcacaggggaatgactccaagaagggagtccagtcgttagtaggagttctggaggagggttagcacctggggggctctgggagcgctggaggagggagtgagaaagggaagcagaggggttctttggagagaatgaaggggtgggccctggggagtgggcaaagaggtgtagagaagagcccggcgtgaccttgggccagctgcgtctccctcctgggcccgtctttccgtctgcaggcaagagagcgcctgggatcccggggggctcaggcttgaaggtgccaccccggcgagtgagggcgcctcaccttcttgaagtcggcggtgaaggagacgagggtgccgtcgggcttgcgcagctcgaggctgatgctgtccgcgtcgctgtccgcctgcaggctctcctcggtcacctggccgtccggcagccgcacgcggacccgcagctcggccggcgcacccgttcccagcagcggcgcgagcagcggcagcagcagcagcagcgcagggcgcgccaggggtaccccgggaaggcgcatccccgggggccgctgccgtccgcggccccggcgcgccgcgtgggggcggggagaggcgcaggcaaacttcgcccaaagttgggggctagttcggggcgcccgggagccgctccgccgggggccttggccgcggggtcgcccgcgaggtggcgcggacgcacgtgggtagcgctcagcagggcgcccccggcggccccgaggcggagacggcgctgccccggcccggctccgcggccccgggctccagcgctgcgagcctgtgttttgcacttttcattcaatcccaccccccgtcacttccttcagaaaacagaaaccaccaggacccgccttaaagagaccgcgcacctcgcggcccttaaagggcccgcggctgctctccgcacttcggcgttggccgggcagggggcggggagagggggcagcggctccgcggctttgtgcgagcggcctcctcgacctccctcccgcccggccgcgcggagtcagcgacccaggcggagtcagaagtttgctctcccggggcaaatcccttccttccagcaggggcaggacgggtgactcttcccccgccctgcaccgccaccccccccccccgcttttttttttttggcttgcttttgtgccacgtggatgaaataatcgggcttggatttttaggggttttgtttggtctttcagtttctctgacagcgaatttctaaaaagcttctgcaaaatcagacctcgctttgcactctgccttttccctgccccacactgggagggtggatcgggggttctcgcccagctttgccacggccaggtgttagaccttgatgggtcaggtcacccactgggacgcggccctcaggttttgtgagcccctgtgcctctttccttttcagtcctgcctcccgtgcttcccgcattcacggcctttcctcagtcctgcccaccaccgcagacccggttctttctctctattatagactatgaaaatccagggaaatgttggattccaggtcacttgggagaatttccagggactcgggacgctggcgctccacgacagtggctttcccacaagccacaaggaaacatgcgtgccctgcggtgcaccccaacaataagaagggtgaagaccaggagatctggattgctgcctcctctgattagttgtggaatttaggcacgttttaaaaattctttgggcttaagtgtccccgtgtgtatcgtggaagctgctcagacctacactgtcctgccagtcccaggcaagggaaaaagccccacgaagatgctcaaaaccaattgttccctgacttccattttcacttctgttgggaccttgattactgatgggtgaaaactcccttctctgcagcctccttcccttctagggcttccccagcacagggccatgtgaactgcagggtccggctagaatcggcctcttgctatcatccaggggcccttcccgctacccgctctctgctgcctagatttaggactgaagggaatttaagagactaccaagtcagccttttccaaatttgcctttcctgaagaatcacctggatgcttgttagaaaatagattcccgaatccctaaacccatggaatcagattctagggaaaagaactgaggattagcatttttgacaaggcccacatgatgctcgacataagtggttgacagcaggtatttggcagatgtttaagcatagagcgtctgggccagacgcggtggctcatgcctgtaatcctagcactttgggaggccgaggcgggcggattgcctgagctcaggagttcgagaccaacctgggcaacaaggtgaaatcccgtctctactaaaatacaaaagaaattagctgggtgtggcggcgtgcgcctgtaatcccagctactcgggaggctggggtaggagaattgcttgaacccaggaggcagaagttgcagcgagccaaaattgcgccactgcactccagcctgggtgacagaggaagactccgtctctacaaaacaaaacaaaacaaaacaaaacaaaaacatagagcatctgaaacaagcagcatccttcctggagaacctggctcctaaggagttcatcttcacatccgggagataaggcaggctgttagggaataattggattagcacaaggattgctcccctaaggactcccactcttagctggcaaccgtttagactagagatgcccagggtcttgaaattggcctcccgcctgacaggatg

SEQ ID NO: 915091 - DNA, 4001 bp, Homo sapiens
tgcccctcctcaccactgcagtgtaaccccagcacgtggcaggtgcccagagggtgaagggctgagggggctgaggggcattggcaaggcagggccgaactggtgggtcctgggttccgggggagggttcagatggttgggggtgattctctgttctcagttggggtggcccttgccttgtgtaggtcgtcgctgaagccgcccagcttgctgcggcccttgatggaaaaggagggctgggaggccttgccgacggtattgggccccattaccatgggcagcatgtacgcagcggggcctgcagggtggacgtggagcctcaggccggaacagggcccactgctccttccctggggctctcccccaactctggagatcagccgtcgggctgccccatgtcacacaccccacccaggatccccaggtccatttggctgaggatggttggggctgctgcggacctggggtgctgtccactcggaatgcctttgtccgggcagagatggagtggctgggtgctgagtcgaacacgtacttggtggatttctctggaaagtagtcacctggacaaggagccaagggggctgctgggacaagcaggtgggtatgcagcccagtttgggggctcaaggaggactccccaacattctaggcgtggggcctctgggctccaacacaggtggtgaccaagtcgggtcagggggtgtccaggatggaaatgctgacttcagggctggtgagacaaaggctatttttgagcagggagagtggggtctgacgtcggcctggcagagaaaggtccaggtcggagctggactcttgggccagagtcttctctgcccaggcacgatggtgacccctcaagagagaaagatgggacgggaggggccaggatggctgagctctcccacacccttgctgacatgaggttaggggcacccagcagggaggggcaggcctgaggctgcgcagggcaggagcctgagacagggtcactaacctggaccaggagtcagcatggtcttggtttggtagcgccccaggatggagtaggcagggccaaggtccttgccagtcctcagtatcttggggtttacattgtaacggggccctggggagcagttctctgccaggagcatgggggccccacggaagctgtaggccggtgcacgcagcttggtgggcgtgtgcttcatgaagcctgtggacgcaatgggccctgagcagcccggagcctgacctgcccttctccccgctgggagtcagggattgagccccaggcccttcccgggacccccacctgcccgcctggctcctgaccctctcccacagtctctcaggctcttacctgttgttggtggaatcaggtacttgggtccagggctgctgtagagggccatgatgggtccccgggggcgatggggcctccaggtacccatccatacctcctccgtcatggccagctctgtccgtaagtgagagggttaccaggtgctgggaggcccggccctgtcccatgccggcccctgatgtccccgaccctgctcttgctgacactgaagggtaagacctgcggaacctgctgcagcatcagtggggatctccagctgggagccaggagtcagggacagtaggagctttctgcatgggtctgtgagctcctcaccagcttaactgtaacccagagttgctgtccatgctggcccttaactcaccactgttctcggctctaagggagccctgggccggtttctcctacttggagtggtcaaagatggggaacttcttgattgaggctgagctgaggggcagggagggggccgcctgggagggaactataacttcttcagtgcagggacagcactcagagcagcctagagacccatcctcatcagagactgtcctttcccccctggccttggtgccagggagttcccgcaaaaggagcatggagagaaaggccttcctctctcctcatgggcttacagaattggggagaggtcccccactctaaactctagaatgtggctctgtgggatgacaggttctagattctgtctatgtgaccaagacaatggcttctgcctttgatcccctcaccagatctcaccaccaggtccccccaacaggacacccctataagtccccctgaccatgttcccctcaccatgttcccctcaccaggtcctcctcaccaggtcccctcaccaaggctccccacccatgtcctcctcaccaggtcccctcaccaggtcccctcaccaaggtcccccccatgtcccctcaccaggtcccctcaccaaggtcccccccatgtcccctcaccaggtcccctcaccaaggtcccccccatgtcccctcaccaggtcccctcaccaaggtcccccccatgtcccctcaccaggtcctcctcaccaaggtcccccccatgtcccctcaccaggtcccctcaccaaggtcccccccatgtcctcctcaccaggtcccctcaccaaggtccccctcatgtcccctcaccaggtcccctcaccaaggtcccccccatgtcccctcaccaggtcctcctcaccaaggtcccccccatgtcccctcaccaggtcccctcaccaaggtccccccctatgtcccctcaccaggtcccctcaccaggtcccctcaccaaggtcccccccatgtcccctcaccaggtcccctcaccaaggtcccccccatgtcctcctcaccaggtcccctcaccaaggtcccccccatgtcccctcaccaggtccgctcaccaaggtccccctatgtcccctcaccaggtcccctcaccaaggtcccccccatgtcccctcaccaggtcctcctcaccaggtttccctaagttccctcaccagaccacccctcaccaggccccctcaccatgtttctttcaccaggtcccctcaaccaggcacccacccatgaagtccccctcactgggtcccctcaccaggtcccctgtaaccaagtcctccagggccccctccctagggctccctcagccaaatggaaatccaggcagataccatgtaggcaggtgggacagagcacagagccgacagcaccgcatggcccccttgccaggctcagacaggacagaggtgtggagaggagggccggggcagtgaagtgtcagggctcagcacccagggtggccaaggatggggcggttccactcagctgtgcccccagaagagaccatagattgggcagctgaaatgctggaaggttctggctgtgggagagtctgggatccagggtcaggatcagggtctgtgctggttgtggtgggtgtgagtcagtgtgggcgctggggctgccctggctgacctcagaggctgctcacctgcggctcccaacccccttggacatgggtgtacctttttcttggccttgtcaggggtcctcttggggctcgacaccagctttcagatgctgagcacccccgccctgacctagcccatgggcgacatggggtctgtgtccacccagtcctggacacttcctctttctggggctcccacctcataccgctgcctctgccgcccgtctccctccggacgccccctccagacgccccctccggacgaccacgcagtgttgtctggctctgtgctctgtccacctgcctacgtggcgtctgcctggatttccattttgggtcttgcctgtggtgtgcctgctcctgtgtggaccctgtgtgtacctctgtggggactttcacacgtgtgttccttgagtgggatcctctgtatgtgggtctgtgtgtgtggctgtggccctgtgttcctgatgtccccatttgtgtgtacctctgtggggactttcacacgtgtgttccttgagtgggatcctctgtatgtgggtctgtgtgtgtggctgtggccctgtgttcctgatgtccccatttgtgtgtccctctgtgggggactttcgcacgtgtgctccttgagtaggatcctctgtatgtgggtctgtgt

SEQ ID NO: 915092 - DNA, 4001 bp, Homo sapiens
gaaagagagacccaaaataattccctaaatccctaccctcttttttcctacccctccgacactggcttctcaggctgggaatgctatcactgtattgttaagtgtctgcgctggccaacagtgactgccacctgcgacttggcttcacctcaggtcaggactggggtgggaagatctatacagatcatatccttgtctttttcaaatccacattcatagctataaaaggatcagtctgtacttcatacccttgacaagttcttaaggtagtgaaagacaatttgcagggatttggctggctttactcccaaggcaagtcggtgctaaatgcagagggatcctgactgagcatcattctggcacttctaaggaggtgaggctcaggagggagcaagtgaagaagcgcaagaggccgctcgtctgggaacacttcatccactgcctccaggccccagcctgttggctggacgcccttaggaaatgcattcggcctgctatgtggaattactttaccctgactataactagaagaacatataatttggacatgaagatttttcaggaaaatgtataaaataattattagcaataagagggtctttgaaagaagataaataatttatcaatttagcttgtacaaaagcaagccattaagtatgaataatcaatgccagggtgtggcaaaggctagggtggagggttacatttgtccctgggagcctgtccaggctgccaaaatgttgggttttgcacattttaatgaggtggcagcccaaatgcattctttctgtttaacttggctgaaatctgctcacttctaagtctaaatccagttcagcaaaagaaactaagacttctcagtacattgatatcatgactttttacagtgacctaatggtttatcataaaagacaaaacgaaaagctgaaatccattatcagcctgaaacactaaaacatgaagaaaaagtaaccaacatttttaagtttcatattttaaaaaatgaactatggtgaataataacattttagatacataccattatgccaggcagtattttagctatggattaaatcttcaggatagccttacaacataaattctactattatccccattttacagatgagacaaactgccaaatcagagcacaaagtgcaactgtgcttaaggtctggaagtagcacactggactctggagttcggctctaaactgccagactatgagcattttaaagtgtaactttggcaatgtgtcatttgctatctgggaaaaatacaacccagtagatagagaagcatgggtaaaaataaggtacttctgggaagcctgttacttatccaaggtgtacagatgccacctacctccaagactcgaaagcgctggtagatgtaatgcaccatggctgggtcctgggtacactgcggcgggggcagaaaagctgcaaggaacagaaccagcaatgcagaagctcctcgaagggccaccatcatcctgcaaaacaccaagcagggcagtctcttatgctgtggctcttctcaaggatgtctcaagggctccggtggtgctctcctgctctatccgctgctgtggcaaatcctctaaaaacagcgttttgcacagcagagagcaaagtccgcttgttattccacccgatacgtgagctcagtttgccagctagtgatcaagtccagctgttggcaagttggtccctgaggccttgtagactgacctgtggcagagagctccctgggtccagcatctgttgccctcacccttgacacatgcggaccctccccaggctagtggttgcaagctgcttcctggcttaattgtgtgtgcattggggtggggggtgaagatggcttccccccgttcccttcccccagctatttcctttttacttttgctttcctcctccctagtggattctgcagtccaatcgcaggccttccccaacacaaaccacccccaactttttaaagttggactctcagtttagtttctggcaaaaattcccaggatccttttccagaagtcctattgggagaccccacccctcatccagactcccttcacattcctgcagctcttaaaggcacagccaggaaaaataaacatggatctaccactatctctgaacagccagtgcacagggctacatcgccccttgggcagaaaggtacaatgggctacaggcctggccatccaggctgtcagctgaaacatctcaggatggagctgagaataatttgattaagaggaacaacaacaatcattgatacagtgatgcttccagggtcaagccatcaaaaagtgaaacgcctttgtaaggaaatccttgagttttctcaatcactggaggcagaattcccttcatgtagctgcaggccagaaatatgtaggactaaactcctgcaggccctggtccaattgaagataaattataaccctaggacaaggtggtaaaatctttgaatttgtctgtgcagtccagccctcttcttatctcaacctgcctttccatgggaaaggccaggacgccttggggttctttctcaatcacctgccaaactgagaaaggctggggcatctatggaatgtgaaaagaatgctctccaggagtcagaaggcctgtgtttccatttggtcctcacaagagacgctaatagatacctttatcaaaacatttcacgtaccccataaacacctactatgtatccacaaaatttttttaaaagagacacatagactgagaattttccactggtggtccttaaacttccttatgcccggtaatatttctccccacccttcttccatatggccacagctcctaactattcctcctcaccctctcggtaaaaatcccaaacagtagttcatcatccttagaaacaattcctcatatttcttagaaccatctttgcactattccctaaaccagttgaacttcagctgaccctgcctcctaaatccttattaaaaattctgtctggctcacgctgcttctccaagtgagaatattctctctgaaattactcatgcctagcatttttgaataaagtcttaagggtgctctagttgatttacttccacaaatgcctcaagtcctaactctgagactgtgaactaagatggataaggtccagtggaggaaaactctgattgtatctaattaacttttcggtggtggtggtgtgggtagttctttcctgggttttctagagcatgcttacattactttttcaatgaaatacacatgccatacttacagagtctaaagaattactggagagtctgtaagggggaaatgcagtgggaagcctcggttgcagcagaagtccttgaggtgctttcagggctgctgttgctcttatctctgtggagtgggctccaaagaggttggctcaggactggcaggcaccatctctgcccaccagtgattcaggcccagcaccactttctctgcggtcaccaccttcttcagagggacactcctggcctctcagctctgactgcccacacctggtcttaactggagagcttcatttactttttgtaatcccaaacagggacagcaaatctcacagctggaacccataacccattaggattgatgacccatagttcagaaccagagtggaaactctcatattctcgtgaccagaggtttcataaagaaaaaccaaactcactttggagacagacccagccttgactcgcagtggcctactgaagccatctttattagaacagtccctcctcagtgggtgccgggtggataagggtgaaaaagatggcctgccgcacctagacctgcagctggacgaaatcagttagctccactgtcttcattacacgtaacctctggccttgaccgttgctattactagccaggacagtggacaagcacagtgacttctcttttctcctctgcaagtgtctgatccttccgcttttctaccccggtatcctgagaggggaaataagctccttt

SEQ ID NO: 915093 - DNA, 4001 bp, Homo sapiens
cacaggggatggccctgaccctctggccctcagtgcatctgttccagagccgcaagttccttgacagctttgcttcatgaggggaaatgtcttggacacatccctgactggctgaggacaaaacacagggctggccttaagtcagggtgctggggacagtggcttagctgtacttggctgatgttaggtgcaggtcaggcactcccccaaaagggggggctctctgggactgcgcaatgcgaaggggaatgaggctaagagtcagaactgaatctgatgaaaattgtgcctcagtttccccatctgtttggtgagtgagttgcatccaatgaccccagaggttaccattctgccgtcacaccactgccgcctgcagcccacttgggactatcagccgtcgtaactgcccaccacgccttcgccctgcccccctcagctgcattgaagaagcccaagaaatgccaacagatgctatgtcaggacgaagcacttgccttccctgacctgcaagctctaaagagcctgactccccagcaggggatacctgaggccctggagaatccactctctccagctccaacttccctcaaggcaaagggaaccccctttactaatccactccctgtttcactatctgaactgcagtctcctagctcagcaagcccccaggccaaggtcatccggaccaggcccctgttaagagccatccttgaaccagcagcaatgatgaacagataatctaaaactgcacttgttcctagggtaggaatagacctctagaatacatccatatgaatacagcacactctgtctcatggatatgtgtgcgtagagacagatctctgtgtaacctcccccttcacttctccaccctgaagtcaggcccagaagagccacagctgggcctacacagcctccagggtgccagccactctccactgcccaaatccacccctgcagcaaccctgccccatatcctgagggttgtcgacgtgttatgggaccagcagcccagacacaggctccggcaaagggcaccaaggccagggagcagtgaatgccggcttgctggactccccgtggagacgccccatcatctctgtctccctgactctggaggaagtggatgctgggtttttcaatctctgtctctgtgtctctcttggtctttctcagtctctctctcccacaatgaagcagagagaaggcagatggccctggcctcactgtccatgcacactggcccctagtaggcctctatcgtctatagcaatgcagcagccagtccagcttctaggctatggagcctcagaatcttcttcctgtgagctggagtgctggccccagggagaagcagaggaggaaaggtgtgggactcagggggcctctgggcaagcagaggacaggctgagcagcgagaataatggccccaaaaatacaggggggaaagtggcaggggcaggggagagcacaggtgggctagaggagagcagcagctggcagctgctgtcagagctggttaaaaaccacggaggccttgaggttggcgggctccacaccctcgccaaaggtgacgaggaagtacatgaccttgcggatcttggccaggtccgacaggcgctccccaaactccagggcgtcggcctcattccaatctatggcatccgagtcctccttgcgccagaagatggcagtggggtccagcagctggcgtgtcatgaggttggtgaggtcaggcgtccagttctgcgaggtgcctgtgatggtgaccttgcccggcttgtccagcacgacattccagcgctcgaactgtagccgctgctgctgggtgaagttgaggcggtacacagactccgctggctgcagcagcttctccccatcctggcgcttctccccgcgctgcttcaggctctccacgcgtagccgcatctgcctggtcaggccctggtccaggaccagcggcatgtccagctgcggctgctgcggcctgtcctccgccatggcccaagtgctgctgccaccaacgccaaggacccaagtgggctggagcctggggccgtggagagaagaggccaccaaaggggggccccacctactttctgcccttccctcttcccctccctttgccactggctcttcccagccccactcagttctcaaaatggggtgtgtgtcaggggtgggagtccccatctgcctccactccagtccccgcagaagcgataatgcaggccctgcaggcaggcggaaggtggcaggttccttggggaccaggtcgctgatgtcaattgctgtggcaaccgccctgactaccagggctgggctgggtgctggcttgtttgtgaagatgagagcacttcgtaagtgcactgatggggagggtggtggggaccactcctcactggaggtacacaggagaagatgcaagacccgcaggagcaggtggagaaggcaggaccagagagggcttggtgattggagatctgaagtcacctaagttaaaccttggagctacccctgacgcccgcctccctctcactcctccacacccaatcaccaaagcctgtcgattctgcttcccaaacaccccgggacccttcccctccagtcccattgacaggatctcagcccagctaccgtatctctcacccagacccgtggttctcaagacttgagtgagcatcagactcactctcaggacttaacacacagattgctggaccccctcccagaactcctggtttatcagggctctgtgggcctgagaatctgcattcctaaccacctcccaggtgacatgctgctgggccagggactgtgccttgagcattactgacccggatgacactgatggctggctgtgccgcagccctgcaccatggccacaacaggacaaggcttcacttctacccaaatcccaccacttactccacctgaattaatcctcagtttcccccaggggccgaggaagaatctggcaaatgtttatatccccagggcccggggcggaaccagaagctcagcctttatactggggaaatgaaagaactggagtgtgagtggagccggagttggggagagagtggggatgggagttggggagcggccgtcgccacaacacgccacacacagaaaagaggacagagtcaaggccaaggtatcacaacggaaaacaatctgaagggtctagtggaccacaagcacggtcaattgtgagatggtggctaatcaatcagtgggatcctgggctacctgaacagcagaggggcaccaagggagacagaatacccggtcctgttaaaaccacactgcaagccctggggtcagttctgggggtcattggcagaaattcccccaagggtatttgagagaaccatacagctagatgtcaaactgcctgatcctcacagaaccttttgctttgtagctggaggggcaggggagaggggaacaacttggctaaggaactaccatgggaggcttccctttcctccacatgggggagctgtttctaaccttcccagcaccacattctgctttttatttgttgagttgctcagtttttgcctgtgacacacagtcctgagagggtaggaagtgtgtcttgtcattactctaggccagcaaccagaacggggcctgccacacagaggcctcagaaatgcttgttgaatgaatgaacgaatgatcgaatgaatgaatgaatgaacggatgaatgagtgaatgacactgacaagggacaggtgatgtgatggaccacgggacacaagcccaaggccaagaggaaggtgggcaggtggggagacagtacacaggtactggccagggccaaaatgaagtgagcaagatggctggaaggtgaggtcagagagactgggcctttggctgaagacctccagggagagcagttccgggcccgggctgtggcatggcagcaggtgactgaggcggctgaaggtgaaggctgatagaaaggagatggagaactaagacaagggta

SEQ ID NO: 915094 - DNA, 4001 bp, Homo sapiens
aaaggaaaataaattccagcagctaagattaaagatggatggaaaggagaagtgggcatgacacacagaaagcccatacttatgatttcactgcattttttttcacagtaacattagaaagtcgagttttgggggggtttttttgtttgtttgttttgagacggagtctcgctctgtcacccaggatggagtgcagtggcgctgtctccgctcactgcaagctccgcctcccaggttcatgccattctcctgcctcagcctcccgagtagctgggactacaggctacaggcacccgccatcacgcctggctgacctcgtgatccgcccaccttgggctcccaaagtgctgggattacaggcgtgagccaccgtgtacccagcctgtttttcagacggagttttgcttttttttttttttttttttgagacagagtctcgctctgtcacccaggctggagtgcagtggtgtgatctcagctcactgcaagctccgcctcccgggttcaagtgattctcctgcctgagcctcccgtgtagctgggattacaggcgcccaccactacacaaggctactttttgtatttttagtagagacgaggtttcaccatgttggccaagctggtctcgaactcctcctgacctctggtgatccacccgtctcggcttcccaaagtgctgggattacaggtatcagccaccgtgcccagccagaaactcagttttagtctgacgttctatcaaatagctgagaaaagcctgagaaacacacatagatactttcactgcagcagaatcttcctttgctcaggcttcctgaaagacagttagggcctaaacaccctacccaccctaaatagccagaattcacagtggctctttctctccatgtgctgttcatttcaataattaactgttaactgttacctggtgagcttcactgatctaggcattcttaaaattcatcttaggtaaaatggaaaaatatcaggagctatatgtgatctttgcttccaaaggtattacaggccaaatgggtaagaaattgacgtatcagtttcaaagaaaaaccccctttcaaattaccaaaaaaagtctacaaaaagaaaccataaagaacataaaaagtaatattgaaatgctactttacagattacatttagtcaggccttggagctggcaagcatttggattccaggcaaaacagaaaagatacattggaatcaacttgtagacagcaacgcgctgacttagctttctcctattaactttgcagaaccgttgatgagtttaacatgggtgaagttcagagcagtctttttaagggaacaaaacagcaataatatcagcattaagcaaaaatatgagtctggaagcaggaagatcagctaagatgcaactgaatatcttacaatgtgatacaatcaagcaccagtaattggcaggggtttgaaatgttagactgaaagagagccaaggactattcctgaagaacctctgaaaatgagtctcaagttagagagaagaccaaaacagagagagagagaaataaaagcctgagaactgggacatttaggcagaaagagaaaatgtatcctccgtatattgacacaagtctacttggcctgaaagcgcttcttcttctagccagttagaataagatcagatttcttcagggagtaaaacacctgcatggaaagcgatcattatgattaactccttcgaggaagcattctctaaaacttgttatttaccatggaggttctcagcaccggtccaaatcaagacagcgaggagcatcaagacttctaacgccatggagaccttcgtctgagcagacctccagcacaggacaactcaggaaacaaggagtggcgactggtttaagtgatttttatatggcatcccatgctcagctgcgttcgttttcctccttatttgggtagttcacaggatgctcttatcacagtgtcagctacctaaaggctgagactctcttgattatccaaacactgaagctcaaagagacatatcaagaaaaaagtgttatttgataacagtctttacaagtcctgttacaaacatcaggaggatggcatggcacacaatgcttccagtaaatactaaattacaggaaactgttcttactagctaacgttcaggtgttttaagtttccatctaatatgagaacagcctagatctttcatacttgaaatcaaaagactattatttcttcatttctatgggtttggctggaagaagcaaagcagacatgataaactgacttgaccaggaacataaatctctaggaggggacaggcacccaaaggaaagtcaagtctattggtattaggaaagttgacaattccctctctgttgattctttctaaattaaggtgttggtaactttagtcatttcaaacctgagacaagagaatattttatatgcatatatatacacataactgtatatgtataataatttatatttatgattttttcaatactgaagtagaataaaagttccagccaaagatttttattgtatttttttaaaatgttagtcacggcctgaatgtgactgcgtggttttaagggtaattgaaaatcaaaggctaacagtaaataaaattcaaagaggctgaattaaatgcctattattgcttttagtcatatctgaattatattttcaatgttacagtctgctgtcaaatgactacatgcacagagcttccctatgcatttaagaaggacttctatttctgacattacattctcttgtggacagtgagatccccaaagctgtgacccacacagtgctctgcatcaggaaagcctggagaatccagtcgcccaaccaccaatggggaaagagtattagagaaagagaagggcaagtctacatgttattttttcatctttcatttctttaaacatttttctgatgttaagaacattttcaggatctaaaatttattaacttcatatgcagcttttaaatcttgcctatgtaaacatctaatattgttccaaaaggaatcattggccagtttcttgtatttcagtttgagaaagttaaacaagctaaggctgctgttcatacgctgtaaaaaggagatatattctctctaaacttattgtgaataagacatagcaaatgtaaactgtcttgctcaagtcaatagcgtacaaaaaatatctaatatatgactatttcctgtatcttgaagcacagttagtaacaggactttatgcaatgtttcaaggattactcaaagccgcagaatgaacaaagttcattttccaaaaattccaattttaatacagaattttactgtgaaacagtaatggaatttaaatataactttaatgtaaaatggagataaagcagagataaaacaaatattttaaaacaatttataacttagggaaatgttgcaactatagtacaaaaaaactttctttttcctggaccttttgagagcaggttgctggtaagatgttcccttgactgtaaatattttgaagtatatatccaacaaataaggccattcttctactagagtgcttctcaataattggaacttagatgatggaggggtccatgggatcagatctattttcacaataacacattttctttttcataatgtcgacatttgcacaggtgtgcaaaaacagtggtgggaaatgctcctgcctcttgagcaccaatcaaggtagtagcataagaatgtgttagtttgttagtcaccattgtattcttcacccctgtgcactcacagtaaagggaaaaagccagtttcacttaagtcttgaagcagtaaaaagtatctgttttattaaatgccaaccgttgaatgcatgcctttttactattcagagtgataaaatagaaagtatgcataatacacttttgctgcgtatcaaagtatgaagagtgtctcaaggaaaatctgtgcagttattggagctgtgagctgaactagccacttgttacat

SEQ ID NO: 915095 - DNA, 4001 bp, Homo sapiens
gcaggaaagtttgtcttctcctgccacggacccagtgcacccacctagctccctctaccaggctcaggcaggtactgagtgttccgttggctctgccttccctgctgagcacagcccccaggctggaccccctaggatgctgctggaatctggaataacaacaacagcaacccccactctgaacttcttggtcagcctaaaacaaacagctgggaacatggttatgcagagcccatccctgctttaaaaagtgccatcttcacaaggtgttacaaaacattacaggctggattacttgttttagttgatcctctcttctttctccccagtaaacttccatttttctgatttcactttggcatcttaggactactcagggaattatattattaaaaacaacactgaaaatattcccacaaaaccctaccaagtaatactgaatatagaaacataaaactgtatgttttacctataaaaaggcaggtaaggttttaaaatcttagcattcctgtctgtgtatatatgtatgaaaatttaggtttaagctaatgtttaacacaatgcatttatctcaatttgggggaaaaaaagagatcctgactgtgcgacggtttggtatgaaaaccgacacttttgctgctgcctaaaaccttggcaagcataacctagccccttcggcattgtttgaaagatgcctgcaggcattcagttgtctgcttgcaaaggactcctgtgcaattatcaaatctattaagatgccttcaattttgcaacgcttctgctaagctcattttggtaggattgcagcatcttacctgtgtcactgcagatttgttttccccaaacaaataactgctgtgagaggtgggatcacatttaaatcattagacaaggtggggaaggggctggggagaatcaggcaaatccaaatttccaaccttccctcagcagggacatcccaaattctgccaagggaaattcatattcctgacgtaaggaacaggaaggagatactgagaggattccgaatttcaagggcataatctgcccatttggtggaaggataaagaaaggacggcaggcagtagagggcctgtgttacaacaagaaatgcaggagcagatgagtgagctgagaaggagggatggggcagggaaggagctccagggggagagggtaggggagagcagttccgaaggaagggagggaggaggagagtggggagaggtggagagggagagagagagagagagagagagagagaaaagaaacagagagagagacagggaggcgcagagatctggactgattcagaaacagagagagaccaccacgactgagagagataagagggtgccccttccaccctgcaggtcccaacataggcagcaagaaggatttatggctgggagttcaaacccctcttctcctacccccaggaccacagctggttaatgccagttggtgactttcactgaaacagcagtgcctcacagcatggtgcagatctcgaacccagctcactggatcccccggaacagagagcaaatcccgtgctgaaagcatctgcgcgcgtgtgagcgagtgagtgtgtgtgtgcgtgcacacagcaagcctacctctttcactcacatgcatctcacactccctgtcctcaccccttcctccttgcctctccatctccccactgcctctcctgctctcacgtcgtacaatcaccccagggagagaaaacacccttcccctgtacggtacctgggatgaagagcagggcagttgtcgccgagaagacgacccagtaggcaggatggtacatctcgacgctgcggtgctctcagctgccgggcttgctactgcttctgctgctgctaccgctgctgccttcctctgtgctgaattctgagcaggtttaaatccaatgtttgcaaagggagggagagagcagaagagagagagagcgcgcgagagatgggagcaggcaggcagcgtctctgatttcttttcttgcacacaactggtaagaatcatcagcaccaatctgcacagggctcagagcagtcctccaaggcacgcattggctccactctcctgagcgacggaaggagactttcctgcttggaaggcttgactccaaggggagtcgaagccggcccctcactcaccccctcaccggagcacagccctgcgtgttgctatctgtgtgagtatgttgatgtggggctcacgtggacacgtgaacacacacgagctccttggtgggcagtggagagggcctggcactgccagcagggctcagggcacaccaagaaagaaaggttgcttggcagaaatgtgactaatgcccatgccagttccttatcattcttccttcttcctagtctccaggcagggatggagcaggaactgctacccacggggagagctcagacatttaaatctgcaccctacccctccattcggccattaacagcatttggaagcagttggttttcccagtaaggagatgggcatgttacggttttaaaccaatgatgcagggagaattggccagttccccacaatcagagcattctgaaactctaccaaggcaagatgctatagaagctcaaacaattgctatgattacagcataggcagggacagattcagattagatctcaaggaggcggaaacttgctgaagtcatcggaaatcttcacaaggagaaggccacagaaggatacctgtggcttccttctgttttttttttttctgcttctccttttcagggtccagtctgtcccttcctctggaatggcagtttacaccggcagtttacacaggatggcagtatctctgggtgtaagaaacctcagaactttcccctgctctaaaacggcctgcttgccctccctaacacgtgcttgtaagcagcacaccttgctggctgagtggtgctgccactgaactataccctgaacttggagggtctgtgatcaaaatagcaccaagtattagagaagggactcagcagacgatttctgtcccaggtgctctccgaagacctcaagtggcttggattccttcccagctccacgtgtccacaccttgaggtctgtgagggacactccacaggaggtctttctcccttcctcctttgctgcaattcccaaagttttcccaagtgacctactatgggcaggtattcacctctatcactttagttaatcctcaccagcgtccttccttgtaggcattatgacccctgaattttcaactgaggttgacagcgattcagtgacttgccacacagctaatgagttaagataaaaacccaggtctgtcctgcaaaatccacacagtttttataaagcagccaattgccaacaagttctttgggcctgactgagcgcctctctttctataaaataaatcatgtttacttttaaagaagtaaaacaattgattactcccctccttatgaacaagtcagaaaacttcagcagtaaaagagaaaacagatgatgattgtatcatccgctgacacttatgaagtacctacttaacatagtcattttttcagggatgagaatatgaagaatatgatttgttctcgtctataaagggcatacaatataagtcaggagatcagccaaaagttagcattgtgactttgcgaatgtacataaaaataataggacacgtacacactgttagagtcaaattttgtagacctcatcactgcaaacatgtcgttcacaagcaaattgatatgtgaatccttcaggcaatgctggaatcctgcagaaatccagaattattaccagtggctgaatacgctggagaatacaactggcttgaaattgtgggagagaccagataggccacagaaatgagatagacatctcatggaggggaagagagcagacacaggtagaaaccctgcaggggggagttaggggaggagatgggagaccaagagagaaagaccttgagtcctagaccagtgatttagaaatttc

SEQ ID NO: 915096 - DNA, 4001 bp, Homo sapiens
ccattcccaagcccagctgctcaacattagaattgaagatcatgaaaacaggccaacagctaataaaaaattggtagatggaagctggccctctgctggtggaatagtcttactgcatctcagaaagcagaaagctcaagttttgaagtttctggtttaattttgagggacaggaagaggacagaggattctggaaaattcacgactgagatcctattcaatgctagacctctttgcccccagtggcacattagatggtaaagaggtgtgtggcagcatcaacatccctgaacactggtaatatttactgacattttcttggttaacatgtattataacccgtgtgctgcttatatctttaagccaactagctcactgcaaatgcgtattgggaaatgttccctgattcctcatgggaccttctttgaagcaatgaagtagggatattacattctagtctggggcaggctgagtggtacccacatggccaggaggacttttccttcacatctccaggaagggcctctctattctccttttttctccatttgctttgggcttctgagaaacagcacacaggattctgggacctgttctctaactaaaaagaagatccagctaagtatcacccaaagtggcagaatccaatcttcacccttgggcttagaaaaagaattctggtgtcccagagacaggtctttcctcctccagggagaggcttgtctagatgcaggaaaggttccaccagaaaagccaagggaggaacaggaagaacccccaccgtcacactgtcctaggggaagccaggcattttggctgcagaatctgggtcaggatgttttattgtcaccataaccatcaaagtcataggcagggcaaatgcattcgccctgtgtacattgtgagacatagttaagctgggacgtccctgaatctgtctcctaggaccagaactgcctcattaaagggataaaagatgatatctgctgagctggtggaaagtggtggctgcatttttattaaagtatctgctgcagcaagtccagtccccaaaggttcatattccaagattctccacctctctgcctggagcatgcaagtgattctctgtaactcattaaggtaaaacaaaaagctctcctattgtgcttttcacacagaagtgatgttgttgcataaaagctacatgtttcctttccttggacccagtctgcaaaaataaaactgctgtcataatttacaatagggaccctaggagcactacaccaggtttggcacgagtgctgggtcttgaggagactcataacaggccgtgggctgacactggtaattccacagcctcacatttgaggtgcatctctgataagggctagcctggtggtcctgaggacgatcctgcctcatcatgtaccttctggcctgtgacagccatccaaggggctcaggctagccccccagtgtttcaaacccatgcactcatgttctcatcacggtgcccaagcaggagagaatctagcctgtcgtggcttcaaagaaccatggagtcccacacgtggacttcaaggttcacgcataagatcctggaccagcatagccggagcacaggacaaacctgtccaggggcacggcagtcggcacggcagcacgcaagcgggcgcccctcgggcctgcacaaggcccactcgcgttccggtcccccatggagccttctgccccctcttccctcctctccccagcgaccacagcccaggggctcggcccccgcggaaggacagctccctacctgagggtggcgctctccccctgccggaccgtcacgttgtccatagctttggggaaggtggcatctccgctgcgcacgggcactcctgtgggtacaaggaacagcagcctgagagacacgaccacgaggcacttccagggcaggaacaggtacccacagacccccattctcgacagccacaacttcccaggactccggcagccgcacagtcctggtcccccgccccgcgcaccagcgggctcgggaagcggtgcggggaggagggaaggggcagagttcgccaggagcagggggaaggagaagagaggagtccgggctctccggagtctgagaattcttcctcagatcctgcctcagctttccagcctagcagaaccagatgccccctcctgcatccaaaaagagctttcttgacgctcccctggggaggagggaggcggccaggaggggagaggaagaagcaaggtgcggggatgaaggtcacagattgcgctttctctgcctctctcttcgagacgctactttaagattcagttgggcacgttctgcagagctctggcatcaaaagtttataacccaaagaagaaggcaagtgtctctgacatacaggagctgtcataaaaagctgcggcttcaaggagaggaggaaatggtttattagatcacacacatggacagatgtacgtgtcccccagccccaggtctcgcatctggaaccccaaggcggcaaaaagttccaaggcggggacgcgcagccggcgcagccagggtcgtccggtcggtggccgtcctctgcagcccggtcggcgactcgcggccagccgggggagcgccgcccggcgcaggctccgggcgcacggggagctgggcggacggcggcccccgcctcctccggggacgcggcacgagacgcggggacgcgcggacgccacgctcagcggccgcccccggcctccgcgccgccttcctcccgggagcagccccgacgcgcgcgggcccggaccgccggggttgtcatggcagcagctccatccctgaccgccactttctcccggtgccgcctcggagcgagcgggctggcgggcggcgcggactgcgcgctcatcccgacgggcgggcgcccaccttaacctccgccgcgcccaccgggctggggatgcctgcggggatgagcccgcaccgcgcccacttcgctccgtcccgacacccgcgccagcggagagaacgcggcgcccctcgcagcggcttcccctacagaggggcggggtggggggagcggggagggagaggggagggcgggagagggagttctggggaaagcagcaaactgaaaactgacactggcaccttccctcgccgatgccagcgcagaagttgacaaaccccgccctggagagctgaactaccctgcccacgccagatggggcaccggtgtgcgtgtccatcgcgctgcgaacggctccccgcccagccaagtccagccctgacggcgcgctgtcctgggcccgcgcagaggtggagtgcacccacctccgaggacccacctcggaaacgcccgtgcccctccactggacgcctgtccccaaagtggcaaatctcaatttctccttaaaacacagcatgcaacattgtccctgtcctacaccttatcgtggtaaaaagcaagggctgggaaaaacacaccagatcctaaaaagtagtaggactgatcctcctaaaacccctcacaggaagcggcgccgcagtggtgctgggaggtgactggggtgcttttggaagccagcctccccctttctttggtctcggatttgtctctttctgctctaaaccccagagctccgcttcccttgggcccctcgggaggccctctccgctcccctggcagaagcctccccgttgtattctaatttaatggttgctatgtgcatctgctctactgtattttctctcagagccttttgttaaattagactgggctctgcacaattggcaaaatgaaatttaattcaaaaataagcattaagctcttatcgtttattactttagttgctgaaggatacaaaggcatactacttgctttcagttctgagagaaggagcacaaataaatactgccccattccccattctaaaagggttagcccacatatatgtgtaggtctaaaatttttaattagagcatcttacctagaagggagaatacttatcactaattatat

SEQ ID NO: 915097 - DNA, 4001 bp, Homo sapiens
ctaccagattataagaaggagaaatcttgtggttaaagaagacttattctggagctttgttctcatcaaagcaaagctatgactgaaatttacgatattacttcaacaaaacataagaacctgaatatggaatagagatcttagggaagctcaggttgtttttcttgggaagaatctagtgtgaaggaaataattattggggttataaaggcatatgcatgtgaacttttgatctactctcatacatgcatactgcataccagtaagcttaaaagaactaacactgcttaagggcatgagaatgaagtaagatggtgaggagagttatgtgttgggaaagatcatgagattttctgtcatgaatgtagagtcagatctgcccagaagaggaaaagtgacaagatgatttttattgggttttaccctctgttactatgtgtgcccccatgttataatgactagcagtttcatattgtgcacaatgcacgtcacacagaaatataaacaccggccaggcgcggtggctcacgcctgtaatcccagcactttgggaggccgaggcgggtggatcacgaggtcaggagatcgagaccatcctggctaacacggtgaaaccctgtctctactaaaaaaatacaaaaaattagccgggcatggtggcgggcacctgtagtcccagctacttgggaggctgaggcaggagaacagcgtgaacccaggaggcggagcttgcagtgagcagagatgcgccactgcactccagcctgggggacagagcgagactccgtctcaaaaaaaaaaaaaaaaagaaatataacacctggaaatagttggccacagaagtgctgtcataccagttgaaacaaggaaaacaatgtaagtctacaatgggcaggcagaggagttttcatagttggtggtgctaggtcgaaactacttctctgctcctttctctccactcagctttccaaaagccatttcagcaacaggacttcatcttattggagatgtggaaagatgcagagaggaatctcaaatctgggactgattgtttctcatccagtaaaatgtagccttacttcctaaggtctatgggatacagtttctgagggctagggccttagagaccgtcctgctgagggcattcttcacctcgttatttctcaggctgtagataatggggttcaacatgggagtcataacagtgtaggacaatgatagcagcttcttgccctcaggtgaattatttgatttaggccggaagtaggtgaggcttaatgatatatagaaaagagagacaacaaggaggtgtgaggaacatgtagaaaaggctttattcttccctttagctgatgggatcttgaggatggcagcagcaatgtgagtataggaacacaagatcagcaagcaggggatcatgaccaccagaatggttccgacgatggcgtagatctcaaagagtgctgtgtctgcacagaccagcctcagcacaggtgggctgtcacagaagaagtggttcaccttgttggtgccacagaatggaaaactgaagagccatgtggtctgcacagtagctacaggaaagcctgggaaccaggaggcagcagccagtttggcacgagtcctttggttcatgatgactgggtagtgcaagggactgcagatggccacatagcggtcatatgccatggtagccaggaggaagcattcagccactccaaagaagaagaagaaatacatctgagtggcacagccaaggaaggagatggttgtgtcctgggcaagcagggtccccagcattttgggcacaatgactaggttgaagccaatctccaggaaagataagtttctgaggaagaagtacatggggctgtgtagcatggggtcagctagggtaaccagaatgatgaggcagtttcccatcagggtgaccaggtagatggttagaaatgtcagaaagagtaatgactgtatttcagtaggcagggaagagaagctcatgaggataaactcacttattcttgtccagtttcctgtagctataagtgtgggcagaagtccccaactgtggtcatggagaaagattattgattggaagtcagattctcaatttgtttttcagactcgttcttactgtcagggaaagaggcaaggtcagcacctcaggcagaggaagtgccttgggttgtctaagaataaaacacaataaatagtagccagagcctaatctctgagatgggcctgaatcagcttctagaggagctgatatttctgttcacaccttaagttattcagaaagggcatgcaaagtcagaatcacaagtttctgaagggtccatcaaaggatacattttgggagaaagtgatgtttctgaaaacacttaaacttatgaaacacaccaagtgtttataatctcgtaaaagaacacatacatttaaatttatcaaaactttagaaatatatttataactatcatgaagaatgcatataatatgttttctactcttcatgaacctttcttgactggctagaatttgagaggagggtgaaaggttagcatgtattgaggaccatttacatatgcatgtttttgttcttttatatctctggtttatacatgaggaaactgatcccagataatttaagaaacacaaatcacatggaagatcttgaatccaaaccacatctattggattacaaaacccttcagatttttactaaatcatgctttgttggactgtcatgccttatctgatgactaacttattaatttgtaggagaattagaattggcatttctgcaaaatcacagtgaagacagacaaagataagcacgagaaccaacatcattagcattaagatgtttaggagatttcctagacacaactgaatcccaattttgtattactggtttctaatttgcagttggttatctagaggctcttcttattgtattcgtaatctagaatattgaagtctagtggagaaatggtgatattaagctggaaaatgaaattgagaggctgggataaataaaaaaagaaatgaatgtggttagcaaactctggttaaaaaaaattaataataaaaattaaaaactttattaggaacagtaaaaaccagaactgacacaaagtaaaagataaacaaagatatggtcagtgttttggatatattacattaatagacttatattacatgctgagaattttggactttattttatagatgaggagattcacctgaatatttgaagctgcagagtgacattgtcataatgctacttagaaggatcactctgacattgttgatagaatgggatagagaagggatcaaaagctgtaggcctcggatcaagaagactaggtggtatatctataattaccctccgtctttacgcacaatccattttcaagcagcagacaacttatttaaaagaggctaaatattagtcaggtcttggtgaataatttgaacttcaaggttatgtttaaaattccagagaatctatgaaggaaaaaacaccattcttataaaagaattataatcaaactgatctaagatttctcagaaatgctaaacattaaatgaagcaatgtctacagtttttagctcggtttcagaaaaacaaatgtaagtttaaaaaataataaaagaaccaatgatgaaaagacagatcatctcaactagaaactctttcactgtaggccaggcgtggtggctgatgcctgtaatcccaggactttgggagcctgaggcaggtggatcacttgagcctaggagtttgagaccagcctcagcaaggtggcgaaaccccatctctacaaaaaatggagaaaatatccagttgtggtggcatatgcctgttgtcctagctactcaggaggctgaggtgggaggatcaccagagctcgggaggttgaggctacattgagctgtgattgtgccactgcactccagcctgggtgacagagtgagactcagtctcaacaaaaaagaaa

SEQ ID NO: 915098 - DNA, 4001 bp, Homo sapiens
gtttctaaatcagtggtctgtaaatgaaaaagatactgatattatcaaatgagaatttgagaaacttcccatgtagctctctggtcaccaacattggataaatatttggaaagataccaagagaaatccagtttgggattataatttgtgtaaggtcatgaagtagaaccatttttggccccccaaaatagatgcactttttttttactcatccgtggaacaaattttcaatccaaaaatagaaacatcatcaccttatttgttggtctcttgaagctctaccctgttaccaaagcacagtgagccttcaggccagtctgaagaactataatcattttgaaaagtaattctgcaatagctaataaaatttgtaaacacagatactcctcatcctatcagccgcactgtagcaaatctatcacacaggtataatgacatcagtacatatgagcatatggaacaaggcatttattgaagcactgtcttaatgacagtaatccaggccaggcgtggtggctcacacctgtaatcacagcgctttgggaggccgaggtgggcggatcatctaaggttgggagtttgagaccagcctgaccagcatggtgaaaccccgtctctactaaaaatacaaaaattagctgggtgtggtggcgcatgcctgtaatcccaactactcgggaggctgaggcaggagaattgctagaacccaggaggtggaggttgcagtgagcccagatcgtgccattgcactccagcctgggctggagcgaaactccatctcaaaaaaaaaaaaaaaaaaaatgacagtaatccagtagctacttggatgttcataatagagaaatggatgaataaactgttgtgtcatgttatgagaacatatgtatctactaaaaacaagtgacagcagttctttattgagatacgttttccaataaaaaaactcaacaaacttacatagtcatacaaaaaatgcagtctgttttcaccctttattaaatttaaatagagttcactcaggcagtggccaaatcttactcagcttctcaacacaatcagaatgtgtgtaaaatcacttttcttcgccatagttttatcaaagtcctcttcatctcactgtttcgtaagctatagatgagcggattgagcagaggggtaagcaacgtgtaagccaatgagatcagtttcttggtttcgggtgagtagccagatttgggttgtaaataagtcatattggctgtgccatagaacagggtcacagatgtgaggtgagaggcacaggtggaaaaggccttttgtctcccagtagttgatggcatcttcaggatggcaaacagaactcgaatgtaagacaagaggatcaacaagaaaggaaccataacaatcaaaatggtgcctgtgaaggcatagatttcaaataagaaggtgtctgcacacacaagctctagtaccgggggagtctcacagaagagatgattaatttcattggggccacaaaatggaaaactaaatacccaagtggtctgcacagtagccaccatgatccctgagatccatgagaatattactaatttcataaaaacccctctgttcataatcactgggtagttcagaggatggcaaattgcagcaaatcggtcataagccatcgctcccaggagaaaacattcagtcccaccaaaaagaaggatgaaatacatctgtgcaaaacagcccacaaaagaaatcatagttttctcagtagagagcaccaccagcatttcaggcgtaatgactgcactgaaactcacctccaccacagataggttcaggaggaacaggtacatgggaacgtggaggctctggtttaaggagatgatgactgtaatgatggcatttcccatcagggtcaccacataaataactaggaaaaccccaaagagctgcacctggagctcaggaaagttagaaaagcccaggaggatgaattcaaccacacagctttgattttgtcttttcatttcagtagttgaaacttatattgtttttatggacctggtatatcgagtatgaagtcgtaatcccatagctgtgagttcaagtctggaattcttgacagcagatgtaatgacaagctcattttgacagaacttcaggttggcacttttgaagaatggccaatgacttgtaatagtgaatctttaaaatacaaataaagaagtgaagtattttggttcagaaatcttgtttttaaagtacaaaataacagtaaatgttatctggcaacatctttgttttgtaggttgctctctctctcctctcttaatgccaagttcccctttaaaagcctctgctttctttccaaaaagtgaagcagtgtccttaaaggcaggagcctatacctcttcccttagttggattcttcaagcaaagagcaactgaacctgagttttggttacgcctggattgcgagctagtctggaacttggctgcagtcctaactctgccactgtctccaagatgggtctctgcctctgctgcacttgggttccccatctgtatgggttagaagcagcagaatgatcccttctggctctgacataggtgtttctctaatttgttgatagaaaactgcaggctgcaaggcctcaactccaatcagatgggagctgggctgaagggaacatggagtagtggtgggtgggcacataggcagcacacatgctgcctgagtcactttgggcctgccagtcccatgcggagatgaccattttcttcccaatccaactgcccctccagagccactctcagggcaaagcgacttcattctctctgctctcaaccagagcaacaatccttgtctcccagtattcccttcactgtcagggcccacaagtctttaaaatctggagtcctcctggcctcacgagtccatccccgctgacacgctccacctcactgcctcttttcctctcccttcacctcctctacctttaaacggaaacctaactggctattccatgttttatacccgttcctccaatctgtacctcaaatttctgacaaaataatatcaccctccctccgagaaacttcagagtctccccttatcagtaaaatacaatgcccacttctcaggctggcatttaaggggaactagagtgataacaattgctttaggaatgtaaatgagggaaacattacttctgaatggacagtgagggtgggaaaccataatcacaagatgacaagggtggaaggtccattaagcagaggagaaaaagcataaggaggaaggctgccttgctcagatagaaggtattcaatgacaccttagtactagcatggacctccaaactggactttgtgtgatgcttcaaaaaccagcagaattttactgtgggacaagaggaagccaggaggagaggacacagcaagctgaagacatcttgatttcatatcattaggacattagcagagaggaaaaggcaattgatttattgagtctgaccatagtgatattaaaaaccaaatatatgttttaactataacaaaattttttggatgtaaaaaatctcctaaaatagacttggcaggaaaaaaaaatgcctaagtatcattttaatagacaaaactacattttcagctccaggcctataaaaccaaatacgtttgtaaaatgagaaaatttagagtatcctactaaaaatgggcaacttttaaggagctgataaagcaaagttacaaaacaaatctaaattactgccttcatgagtaatttttttaagctgaacttaaatgctccatcttttccctttaacataaaacaacataatgctgatttagctaattcactgatatgttctactggctctggcattaactttctgtataatcttgggcaaataactccctcatcagggtttcatctttctaaccaattggacttatttctgaccgctttcaccccgctccctcaactacatacctctaagaattgatggtttgtgcaagcaaaccgt

SEQ ID NO: 915099 - DNA, 4001 bp, Homo sapiens
tgacttccacaatggttgaactagttttcagtcccaccaacagtgtaaaagtgttcctgtttctccacaccctctccagcacttgttgtttcctgactttttaatgatcaccattctaactggtgtgagatggtatctcattgtggttttgatttgcgtttctctgatggccagtgatgatgagcattttttcatgtgtctgttggctgcataaatgtcttcttttgagaagtgtctgttcatatccttcgcccacttgttgatggggttgtttgtttttttcttgtaaatttttttgagttctttgtggattctggatattagccctttgtcagatgagtagattgcaaaaattttctttcattctgtaggttgcctgttcactctgatggtagtttctttagctgtgcagaagctctttagtttaattagatcccatttgtcaattttggcttttgttgccattgcttttggtgttttagacatgaagtccttgcccatgcctatgtcctgaatggtattgcctaggttttcttctagggtttttatggttttaggtctaacatgtaagtctttaatccatcttgaattaatttttgtataaggtataaggaagggatccagtttcagctttctacatatggctagccagatttcccagcaccatttattaaatagggaatcctttccccatttcttgtttttgtcaggtttgtgaaagatcatatggttgtagatgtgtggtattatttctgagggctctgttgtgttccattggtctatatgtctgtttttgtaccagtaccatgctgttttggttactgtagccttgtagtatagtttgaagtcaggtagcacattactcatgttctttctttcagaaataggtcttagtagaaagtaaaaaatttcagtaggcataccgtgtcacctggaaagagtagaaacacaaaatccacttgaggaattcatttttctattttttgtgtgtgtacttacattttaccccttcagtttccatctaagccaatcatagtttctgagagcccagggtcctgtggataagccgcttcagtgcagccttcacttctttattccttgagctgtagatgatggggttcaacatgggagtcaccactgtggaagagagtgacagcagcttcttgctctcagaagaggcactggattggggtcggaaatacgtgaggatggcagtgctatagaagagagagacaaccaagaggtgggcggaacaggtggagaatgcctgatgtttcccctcagctgacggcatcctgaagatagtggagaggatgcggacataggatcccaggatcagcaagaaaggaaagagaatgaataggacagtggctgtcagagcctccagttcaaacacagaggtgtcagcacagaccagtgcaataacaggagggctgtcacagaagaagtggttcaccctgttggggccacaaaaagggaaactgaaaatccatgtggtttgcacagtggccactgaaaaccctgagaaccaagaggcagctgccagctgggcacaggatatgtggcccatgatgactgggtagtgcaaggggtcacagatggccacgtagcggtcatatgccatggtggccaggaggcagcactcagcagccccaaaaaagaagaagaaatacatctgagtggcacatccaaggaaggagatggttgtgtcttgaatgatcagggtccccagcatcttgggcacaatgaccaagttgaaacctatctccaggaaggacaagtttctgaggaagaagtacataggactttgtagtgcagagtcagctatagtgaccaggatgatgaggacattgcccattaaagtaaccaagtaaatggtcaagaaaaggagaaacagtagagcctgaagctcagtggacagggctgagaagctcacgagaacaaattcactgacaattgtccagttttcccacatcattcttctgcccaggacttcactgggcattcaaaatctaggaaggtagaagaaatctcatatgttatttatacctttattatattcttataaaggggacctcctgtggcctcattctttactttccttgttagagttgttgaggatcaaacatctatactctccaaaatataataaaacaaatttgaccattagattcacaatttttggggaaagaattctacttttccagacttaattaacatactatatatatctatacatgtcctgatttttctgttctctgtagagaatgggcaaaatcacagctttatgttcatgctcctaccttatctctcttcaataatggtgctaagaaaggcaggccaagcatttatgaagagagaggtcgtgacacataatgaaaagtggtgaggtcaggcaggtatattttttgcaaaacaaaaatgtaggaaggagaaaatcaaagaaactgattcagcaattactaaatgattcctgaggaggagatccgaatgtgtctcaatctcaagaagcccatactcaggaaggtttcactatattgtgagaatctcaatttctacactctgaaaattgcagtgtaaacaagaagacacacaacatagtcagggtggcttatcttgatcccagggatgagtattttccaagtggttgtatgtgtcaagatagcatcagaaccatggacagaatctagatgggttaagcatgaactttttcatcagctctcttggttgacttgtgtcttgactctcaagaaacttgaagctcacattttacatgttaataaaatacaacttaaatatgcaagtgtgactaatatgaaatcccatgaaaaggaaacaaaagatttcatcattgcattaataacgaagcttcaaaattgggaccctgaaattctttgtgatgactataaacatatggaggaataaaatctgaagcacttagcatgttgtctgctatactgtacatgttccatgaatgttaaccattataattattgatataatgctagacctatcttctaaatcttcttatccagctcattgccaaaactcactatagcccctactattcaatctctaaaataaaataattaattcagtaaatattgattatcagaagataattctgtatgctatgctctgttttagatactgaagataatacattagtaaataaaacaagcaaaaatctctgccctcataaaactcatcatagggaagacaggttataaacaaattctgttaagccaggcacggaggctcacgcctgtaatcacagctctttgggaggtggaggctggctgatcacctgagatcgggagttcaagaccagcctgaccaacatagagaaaccctgtctctactaaaaatacaaaattagctcggcgtggtggtgcatgcctgtaatcccagctactcaggaggctgaggcaggagaatcgctggaacacgggaggcggaagttgcggtgagccgagatcacaccattgcactccagcatgggcaacaagagcaaaattccactcaaaaattaattaattaattaattatgttagtagaaagtatggtatataagagcaatggagaagaataaagtagtagagaaggagacaaacatttagaggtggaaagtgtcagggaaagctccactgagaatatgatatttgagtaaagttctgagcaggtgcaagaagtgaatttaggttggtgaaggaaagagggcggtaaagagaaaaaaatgagaaaatgctattttaatttttttgctgattcatattcatttaaaacaattcaaccaaggaatcacttcttttatgaaaacatccttgatacctcatctactttcatagtaagaatgagcatttatgaagcagcaaataagcaccacacaccgttctaagtgttttgcatgtattatcttatttgattctcacaacacctgaagatacagatagtattatacccattttacagtcaaggaatctgagacacagataagttga

SEQ ID NO: 915100 - DNA, 4001 bp, Homo sapiens
ataaagaaatccctgacagtgggcaatttataaagaaaaaggatttcattgactcatggttctgatggctattaaagcatggcactggcatctgcttggcttctggggaggaagaacttgaatcttactttgcttaattgtaaaatgaatttgcttttacaaatcccccattgttgactaaattattaacttctgatggcaatgattgtgctttatgatattttgtattttcatatcaacaatatataaaaacttaaaatttaaaggcactaagcaaatattaggagtcagctaagatccactgtaagccttgaaaaaagcagcattatgattgaaattatgtttgtgaaattttgaaattactttaacaaggattaagaacctgaaactgaatttgcaagagacaattggaaatagcttattctacctaggaagaatagcctaaggaaggagtcttttaaggctattgggcttataaaggaatatgtatggggattagtgatcctattttctctatccatgctaaatatcaacaaacataaaagccaacacttccttaggggcatgtaaaatgaaatgaagagcaagaattatgtactagaagtattatagggttttctactgaatggtgtcagaattttccaaaccaagatgatggccaagatgacatttgatacttctcattgtcttgcccattgtgtatccccaaagtcatattacaagtagtttcagattgtccacaatatatgtcacatttgtgctcattagcaaagtaaatatctcgaatggtttggccacagaagtctcaaagtgccaattgcaccaataagaaaaacagagtaagtctacgatgggcaggtaaagaaatttagcagatgataatgacaggtttacaccaacactgggctctcttctctccacagagctttccaatagccatttcaatagctgggtttcattccaacagatatgtgaagagaggcagagaggtgtcccaaacatgaaactaattgtcattcaatagaatttagccttacttcctaaggtctatgggatacagtttctgagggctaggaccttgtggaaggtcctgctgagggcattcttcacctcgctatttctcaagctgtagataatggggttcaacatgggagtcacaacagtgtaggataatgataacaacttcttgctctcaggagaattatttgatttaggccagaagtaggtgaggctagaagatatatagaaaagagagacaacaaggaggtgtgaggagcacgtagagaaggctttatgcttccctttagctgatgggatcttgaggatagcagcagcaatgcgagtataggaacacaagatcagcaagcaggggatcatgaccaccagaatggttccgacgatggcgtagatctcaaacagtgctgtgtctgcacagaccagcttcagcacaggcgggctgtcacagaagaagtggttcaccttgttggtgccacagaatggaaaactgaagagccatgtggtctgcacagtagctacaggaaagcctgggaaccaggaagcagcagccagtttggcccgtgtcctttggttcatgatgactgggtagtgcaagggactgcagatggccacatagcggtcatatgccatggtagccaggaggaagcattcagctaccccaaagaagaagaagaaatacatctgagtggcacagccaaggaaggagatggttgtgtcctgggcaagcagggtccccagcattttgggcacaatgactaggttgaagccaatctccaggaaagataagtttctgaggaagaagtacatggggctgtgtagcatggggtcagctagggtaaccagaatgatgaggctgtttcccttcagagtaaccaaatagatagttagaaatgtcaggaagagcaatgactgtatttcagtaggtagggaagagaagctcatgaggataaattcacttatttctgtccagtttcctatagccataagtatgggcataaatccccagctgtggtcctggagagagattcttgattggaagtcagattctcaatctgtttttcagattttctcttaatgtcagggatagaggcaaggtcagcacctcagctggaagaggaagggtcttgtgttggctaagaataaagacacaataaaacgtggtcagaacctaagcagtgaaatgagcaataggtcacctttctcctctcttttacgttccattttatatcttgttagcctatttactaaaacaaatctgatcttgtatcgtattttattttgaagttattcaaagtagaaataatagaggggaatggatgagtgagaatgtttatagggtgtggttgttttaatgcactttccccctcactcaccgtaagaattgtagaccacttcaaatcacgtaatacttattctttcttgccaaatcagactgtgggaaacaatgttagcagtttcctctttggtccagcatatctataattggcaactgattcttagtacctgcataatccactgactctcaaaattaagatcggagaggagtattgtactacaattctgtggaaagtgactgtgtccaaggagattctgactacttccctttcaagaacaggaaaattggaaaaaataaaacagactcccacaaaaaaaaactataaaaaatataagaaacattagagtgaagtttcaaaggaaaacattcatggataaaaagttatgaaacgagatagaatcttaaatgatataaaaggaaagtctgtatttattcaatttctatggcagcactgatgatacaatgattattcactgaagcttagaatttaatagataaaatatttaaataatcaattataacacatcacaatgaaagtcaaaatacaaaaatacatagtaccttaaaggggcacagggacacataacatcatctttaaaggctttctaggcaacagagatgaaaataatgttggctaaaatataggcataggcaccacgggaagatggtgttggaggccagcgacatggaagatgggcagctttccaacctgactcagattccgacataatggtcacacccagcaacaggctgcagcaagtgtggaaagtgctaggtggggacagtgcttataagggccttccagagcagggcgactgcatgtgcaccagtatcacattaccgagttgttgaaagtgtggattcaagtgaagagagtttttctgattcagatgatgatagctgtctttggaagtggaagtgatggaaatatgtaaactctcctcccaaaccagagtcttttcagtttggccagagcagtcagaaaccacctgtttctggaggaaagaaggttaacaacatatggggtgctgtactgcaggaacagaattaagatgcagtggccactgaacttggtatcttgggaatggagggcactattgacagaagcagacaatccgagacctatgattgtttgcttgctaagaaacttaagagggaatctctagagcatacgaaagggctagacaaacaactagctgaatatatgcatggtggcaaaaacaaacaaacaaaaaaatgggatcaaaggaagaggaaaaggggcaaggtcatctcaaaaggaaatgacctgtcaaagacaggctagggaacagaccagaaccaaaaatgaactataaaggttgatacgagatcacagaggaagattcccaagagaaagtggctgatgaaatgttattcaggttacaggaaccaaagaaagatccgatggctcaagcagtgaggattattgggaacaaaaggcaattgttctgctggaaactgctgaagtagaacaaaatggtggcctctttataatgaatagtagttgaagagaacaccaggtggagattttctgaatctcttgaaaaacactcctagtatcagcaaggaacaaattaaggatgttttctacatagaaaatcaaaaggaatatgaaaattaaaaagct

SEQ ID NO: 915101 - DNA, 4001 bp, Homo sapiens
atatagatttaatgagaagaaccctttctatttattatagcaatattaaaataggaagcaagaatgaaatgttatatttcaatgttgcaatgtgtctaattattcatctttatatataactagaaagactattatgtgattattttatgttggaaagatgcacataaatattgatatgacccaaggataatagaaaataggcacaatgaggtaatcatatttatgtcccacaacaaaaaaacacaatcatacattgtttggcctgtatgaggtgcatttttgccttatgaaagaaatttgaccaagtttcaaaaaatatagtttataagtggaaaggacagccgtactttaaatgaccttcaaaaatgatcacatgatgttctctactcaaaacactggaggaatatatattctaaaataaccagaagatatctagttttgaattatagactctctgggtccctgagtagagacattgtgttcctctcaataaataactgttctttcctacttatgtatggaacagattttcactacagaagcagaaaatctcatctcgttattgtaggcttcttggcatacaacatagtagagggataggatgggtgctcaggtcagtctgaagttgttaaaatcatttaaaaaagtaactcagtaatatctatgaaaacttgcaaactcacatttgttttgacccttcaaacctactttgtgaaagctattctgtaaaaattaaagcaccagaatttatgaatatataaaaactggttgttttagtattatctattgtgacaaaaaaataaccatcagtagggctactactaaacaaattgttgaaattgtgttatattcaatattaaggaatattatgcactggtgaaaaaactaaaaacattaacatataaagatgctcctgatatacaatcaaacttggagaacacaataaattagtcatactcatgccaaaaaatgcaaacttaatgaatctaaatttattaaatttagattgaatacagtcatgcagtgactaaatcttacatggcttctcaacacagtcagattgtgtgtaaaaccactcgccttcgccataatttcatcaaagccctcttcatctcactatttcgcaaactgtagataagcagattcagcagtggtgtcagaagtgagtaagacaatgacatcactttcttggtttccggtgagtagccagatttgggttgtaaataagtcatactggctgtgccatagaatagggtcacagatgtgaggtgagcggcacaggtggaaaaggccttttgtctcccagtggttgatggcatcttcaggatggcaaacagaactcgaatgtaagacaagagtatcaacaagaaaggaaccaaaataatcaaaaaggtgcctgtgaatgcatagatttcaaacaaaaacgtgtctgcacatgcaagttctaacactgctggggtttcacaagatatatggttaatttcattaaggccacaaaagggaaaactagatacccatgatgtttgaacagtacctaacataaaacctaaggcccatgaaaatataattaatttcataaaaactcctttattcataatcatttggtagttgagaggatggcaaattgcagcaaatcggtcataagccattgctcccagaagaaaacattcagccccaccaaaaagaaggatgaaatacatctgtgcaaaacagcccccaaaagaaattgtagttttttcagtagagaggaccaccagcatttcaggcataataactgcactgaaactcaggtccaccacagataagttcaggagaaacaggtacatgggaacgtggaggctctggtctagggagacgatgactataataatggcatttcctatcagggtcaccagataaataaccaggaaagccacaaagagctgcccctggagctcaggatagttagaaaagcccaagaggatgaattcaaccacacagctttgattttgtctttccattttcagtaatgaagtcgtgcattgattttatggacatagtatatacagaataaagccacagtccattagctaagagttccagtctgcattcaccccagaaattctggcagaagatgaggagcctatcctgacagaaattttctttggcaattttagacaatgaccaaatacttggattatattccaaatataaaaaatagaaatgaagaattctggctcagagatcttgtcaaataatatcaaaatttatttgatattatttgaaaattaaacatagccttaatggaaatataaatactttataccttaggttccaatcccataacattggtgcaagtgttctttatttaactgaattttacataaatgcaaaacttaagactacaaaaaataaaatataaaaaagcagatagattgaaaaagatatctcaacaaatgtgataatagcctaataatccaatgttacagcatatttgatataaacttatttaaaatattaattagattcaaagtacctatatatgacttggagaaagaaaacaacattctgtagaaacatagaggggatttgaattttcaacacaaccatattaggtgacctatagactatgtgaattggcttcaagcttgcagatttctgcccatcctggatctggccaattatattgggatttacctggatgtgaagtttttggggccagatctccaaggtctatccttctgaccatgatgacttaagaaaaaaaccatttgggggatcattgtgtaatttaaaagatttcactctctctctccttttctctcttctctcttcccactatactcgtcatcaaaaaattcatttaatcattaattattcaacaagcactgattaaccagctaccattttctaggctctgcacccttaggaatacacatgaatccagagctcaacagagagctaagcacactacataaaatagcttctaaccccttaaccagtatgctgcataaactagtacctccccgtaccgcataccccaggactttctctttctttctctctctctttctatgtgtacatatatatatatatatatatatatatatatatacacacacatgcacacatatatatacacaactgagtgattcagttcattgattttataacattatatggcatagaatataatatatcctctatcctttttttaagaaatatgtgtaaaatatattttaaatatttatataaatataaacagattaatattttatatatattatatatatataagctctagtaaggtatgtgtatgtgtatgtatatatatatatatatatatatatataaaatccctcactagagcttagctcccagagggcaaagattttgtttgcttctttgctctacacacactgcctacactacaaccctccctggctcataataggttttaaaccaacatttttgaataaatgaattttaaaataagaaaaacctagactctatttttaaggaatagagtgcctaagagaagtcagcacacaacacaattggaaattaataacacgtgctgtagaaatttaagtaagggaatgatgacatttgaagggggtggaggatgaacaaacacaatcacaggatgtcatgaatggaaggccattaggtcggaggaggatggcaggaggaggaaaactgacttgctcaagtcaggaggcacttggtgacaccataaaactagaatggaagcctactgccttttgtgtgatgttttgaaaaccaaaagaaattcactgtgagagatgaggaagccaggaagacagatggacacagcaagttgaaggcatacagtgctgtcttgagtgcagacctgtaggacattagcagacaggagaagacaagttactttatttctgaatttgtccatagtcatgtattaaaatcaaatgactgtatttaaccacaaaaattgtactgtattttggatgtcaaaaaacctcctacaattattaaaacca

SEQ ID NO: 915102 - DNA, 4001 bp, Homo sapiens
cccctggtttatcttaacaacttactgcaaattgggtggcttaaggcaatagcagattagtcactcatcagttctctaggctcctccaaaatcacaacgttggcaggaactcacttccttcaaaggctttaaggatgactcattccttgcccctttttgttttggtgaatcttgaccatctttggtttgtggttgaatcattccagtctctgccttcacctttacatgatgtccttctctgtttctctgcaccttttttcccctcaaacttcttctgcctctttgtcttttataataacacttgtcgttggacttcatgtgcaacctaaatcatggtactttcatttacaatctttagcttcactatagctgaaagtctttgtttttctaaataagattaaatttgaaggttctagttggagatttctattttgagggtccaacattcaacccaacacacataggtaaggctagtttaggatgaaaactaaatattaacaaagcaagacctgaagctacaaggaaagaaaatatgttatcagagacgagtaagatgtaggcagttagaggaataaacattctcaggatatttagatttaaaaatatatggacaaagatatgagaaacaagtagggtaaaatgcaaagaaaatcccatatcctttgtttccaccatcttagctatttttggtgtttctaatcagttaaatccaaacccaagggtcagagaaaggtggtaaatacatctgaaggaatgggaaggtgaaagaagatgtattacagagcctgatcctaacccctaattatatgactcactcagttatttttcattttattgctcaggtggtctcttaatcaacagttaaccattgatcttcagaatgagatcttggcaccttagttaaattgtgctccaactgcacagtagcacataactatattctgtgaataaaacaccccttgacataatgtaagtttgtatttaaatttcagtactcattattgaataccatagggacaaagttaaaaaaaaattcactgaagccacatgacaaacctataaagaaattatttctgtaatttcaagtcttcatctcatgttaataacttagctagtaattttctcaatgccaccatgatatctttgttcctcagggtatatataataggattcaaagttggaatcagaatggtgtagaaaagagaaatcagtttccccatcctttgaaactgatgtggtttgggctgtaaataagtgatagtacctgctccaaagaataagattacaactattaggtgagatgagcaggtggagaaggctttagcctttcctctggctgatgacaatttcaaaatgttggagataattttgccataagagacaacaatcaacagaaatggcaccgtgataaacaccaccgctactacatggactgttatctcattcacaaatatgtttccacaagcaagcttgagtattggcgggatgtcacaaaagaaatgattaattgtgttagttccgcaaaagggcaaaaggaaaatttggcatgtttccccaattactacaggaattgtgatggtccaggaagctattatcagctgaatgcagactttgtggttcatcactagaggatactgcaaaggcttacaaatagccacgtagcggtcataggccatcactgtcagaaggagacactccgtgcctccaagcataagaaaaaaacacatttgtgtagcacaagcaaacaaagaaatatttcctttctgagtccaaatgtccatgagcattcttgggataatgattgttacataacagatttccaaaagggaaaaattgctaagaaaaaaatacatgggagtctggagagcggggtgaatttttattagtagtattatgatgccattgcacatcaggatcatcaaatacataagtaaaaatatactaaaaagcatccagtggagattgggaatatcagaaaaccccaaaagaacaaattccattattgtagtcacatttgatttttctcttttagtttgctctccatctgcagatatagcaaattcaagacagttaattcatccatattttgaacaatattttcctcttgggttaactaaatgagatacaggaatatacttacttaagctcttaagtcattttcaccagtacttgctctgtttctagataataaactgatttagcattaaaatcaatttaagaaatgaaacctcaatatattttattatactgggatataatgcaaccagaggcattgagaagcatgcattgttgtttagaaaatattatggaggaataacatcttattatttcacacttaagagtagagttatagtgtaggcttttactatttcatctgagaatatcatttttctttgtattggtagtcatattccagtttttttaattcaaaatgttgcccttgaatattacgattaattcatactcaaaatgaattttaaacttttccttttatgcaccagtgagaatcaattatcttaaacaatttcttggttactgagagactaaatacatgcattattgttgctctacttcatgtctctctcctattatttatgctaaatataaaaacactaataccagtaggcagtttattgacttcccctgttattgccctgaatacagtgaatgctaaatagtaattaaattataacttaatcaagatgtagaaattcatcacaattttttttacatttcttttttttatctaagtgaatttctccattgtcatataaccaaatacagttcctttcaaccaaatacaattccttctctctattttcccttcatcctgttgccttattaaagtaaaattctttgattaaacccagctaacatttactctggccatctaagtggccagagcatataaatgggaccaaaaaattaaacaaaacaaaacaaaaacacactgtcttgcttcacttcatgtcaatgtcatccaatatgaggaaatcactgcttgtcaattcccattacacttgcttaacgtttgttctccaactttctaaacaaattctttttttctgtgtcttcaaatctgctgcacctatacctattttagcccggtcagccaatgcatttgacttaatacgttgataaatgaaagtgatcagacaaatactatctcatatttatacatttctattagtactagttttcaaaattgccttaaatgacttttcatcactaatgcaattttaccattattggacatctaattttatttaactttgtagtgaagagatacatgatttaaatgttaaataattaattttcagataaaggtctcaaaatttcatgcttttctgttttattagttgcatttctatccacaaacttgtaactattcttaaataaaatagtctgtcaacccaattatggcttacctttagggatttgcatgaagctgtctgtacagactttttaagctcttccttttctcgggaactgtaattttgcaatacgcttgcttgtttcaaacagcaacagctcttatataggaatagtcagactcaacctgggatgtgtcttctcttgagtatcagtttaatttctagaaggctgcttctgtttgtcaatcattctgattcatttttcaaaactactttaagtaaacttatcctcctcttcatctcctcatgaggggagttaattaaataccatttagttgtctagtattactttcaggaaaaagttaaaaattttccaactgtgtatttgaggcccctaatacttagtgtggatttgtctgccttacttctattccaataatttatccagatccaaattaactagacctttaaaaaatatatcatgtgtttaatcacacgaacatgatatgcttgatgtcttcgacatattgaacggtgagattctttttcagatgtggaaccctctgttcctaggttaactttttttgtggatattaaaacatgttaattctgctgagaaaatctatc

SEQ ID NO: 915103 - DNA, 4001 bp, Homo sapiens
ttctattgtcgtggtcttacacatgtcgcttaaaattaaattcagctccgggttctcatcctcagcactatcggcatttggccatggtaagttttgttgtgagggtctctcctgtgcattgtggaatgtttaacactcctgacctatagccaatagacgccagtgcctgtgacaagcaagaatatttccagacattgccaagtgaactaggagacaaaacagccccaagtaatctagatatttaagagatttaattttttatattggatcttaacaaacattaaaaatgggtgcaaatgtataaagtgcgtaaacaattatatatgtagttgttagatcattcgttatcattgctggatagtaatctattctgtgagtatacaatttctaattgattcattggtaatattttaaatattaatagctagctattcttgccaattaaaatagtgtttctagaaatgttttcagatatatatgtaaataggcaaatacatacacatacataaatatatgaaaacctatatgttaaatatgctaaatgtcatgtactttcttttgtatacatgtttggaatagtatatacacatacaaatatatagatacgttaaaaccaaaaacaaatttgaacagccacaattagaaaaatgatattttttgctggttttgaataatatttgttgctggttttgaactatgtctccatgatggtaaattcttaagtttatgtgtatatgaaatcaaacaaaacacaaaaaccgtttatcaatttataaacatgaattaatcatctatccctgagatttgattaaaatatgttttaaacttaatataaacctattgatgagaaatgagtcaataattcagaatataatcatgttcatcataaatataagtctagctgtgaggttaaaactgtcttagacaatctgtggaagaattataactgtgcaggtgttttggaataaagtttaacactgagaactatacatataatcaatttcacatgaataactaaattagattactatttttaaacaaactagtgtatttacttcctagtatttatttcctctgaggatgtgctactttgtctctaagtttcaacacagctttcttcacctccttgtttctcagggtgtacacaacagggttgagaaggggcgtcagcacagtgtagaaaatggccacaactccatccatggcatccatggagcctggcctcagataaatgacaacacagggaacaaagaagcaaaggaccacaatacagtgggaggcacaggtctgaaaggctctgcgcctcccatctgaggtgcggatccgcaggatggaacagacgatggacacataggacagcactatcaggacaaagcagcctgaggccactatcccaatgtccacaaagatgaccatcacgttggctgaggtgtctgcacaggccagtttcaggatgggcggtgcgtcacagaagtagtgctggatctggttgggtccacagtagggcaaatggaaagtcaatatggtctggacagcagagtgcagagagccactgagccaagtgccggtggccaggagggcacacctgctcccactcatcatgctggtgtacctgagcgggtaactgatggccaagtagcgatcataggacatgactgtgtagaggaaacactcggtgctccccaggaagtggaaaaaatagagctgagccacgcagctgtggaaggagatagccctgccgcttggggacaccaaggtcatcagcattttgggcaccgtgacagtggagaaccacatgtcaatgaaggacaggttggtgaggaagtagtacatgggggtgtggaggtgagaatccaccctgatcaccagcaggatgaggaggttccccagcacagtgagcacgtaaaccaccaggaagattccaaagaggagggcgtccagccctggggcatggggaaggcctgtgaggatgaatgctgtcacgaggctggcgttggacatttcttctcacccttggtctctctccctctggggatataaagagcacccagcatttagcacttaattgagaaatgagaatccattctctatgtggaaactgcatcaaccaggtagataattctggagttatcctgcacttcgcttgttacaaagcttccctcacagagatgatgatgaaattatttcagcctctctcacacacatgcacacaggtgcacacacacagagacacacatgcagaagaaagtagagaaacactatattagatttccattgatatattaaaaaataacacaaacttagtgccataaaacgtgtaaaatttttatctcaccctctctgtgggccaggtcagctggaccctctgctgagagtctcaacaggtctcaatcaatgtgtccccagaagctgaaatctcatgggaggaccacagtcctcttccaagtctattgcaggtgttggcagtatcccattcttgcagtttttgggcagaggtctctgtttttttgctggtttttggcaggacatatcaatctcattttacagaggtcaccctatgtcctaaaatcctcctcacctggccttcgatgacatgacagcttacttcttcaaattcaggaaaagaatctctgtccagtttactgtagcaaaatgttctgtaacataattgtaattggggtgatagcccatcatagtcacaggtcccatgcacactgaaaggttattaaataggaaatgtacaccagtgggcaggaatttagagggctccttgggattccacctaccatattctattttcattgcagagttcatgggaaaacttaaaagagcaagaatttaattgttactaggaatgaaacacaatacacataaattatccactagtttcctcatatgttattatatttgacatcactaacatcacccacctcgctgataaattatcagcattaaataaggttatatatgtatatatacgtacatgcatttccaactgaggtaccaggttcacctcactggggagtgccggaaagtgggtgcaggacagtgggtgcagcacaccatgtgtgagccgaagcagggcgaggcatcgcttcatctgggaagcgcaagggatcagggaattccctgactaaatactatccctggcaggtaataactgcttgataaatgatagtgagttttatgacattgtgcctcgcagcagtgttatggatttgccattctttgtcttagatagagttcatatattctctgagtgttttcagagagtccttaatctaagagctatgtctttgtggactatttcatgcccaatattgttactgatgtccttactattgcctgcttttaaagggcttctcctaggtctcttagagaaggtaagaatctcagcacaactctatagtgggattcctacaacctcccacctcccaaattatccagagagcaccaagcttcatacatgactggccctgtttctcttacactaggccatcccctgggaggttctaagaacatgatgttcatatgtgctctcccaactacaatctactagataggggctagctttctgttgtacatcactctatcctagatgtgtaaatgtttcctaatattggcttcgttagagataacattttgccccccatgatcttcccctcctccacatattcataaccccaggcaatgcataataaaagacaattctttcaagtctatgtttcttttttaatacctgccacctaagacaggaaaacagaaccaatgcaagaggaaggatatatattggcgtgatgtccagaaaagctgagattctgtacaattggtattcaggttgaaatgatgtttttaactgcatacaaaatgttttcttagtctaggcttgttatgaattgttctgtggggaagactatgaaactgattcactgatatggaagaaaccaggatatctgcagtttacagaacccaggtaaaatgtatcctgacattaccaccag

SEQ ID NO: 915104 - DNA, 4001 bp, Homo sapiens
gcagagttggcatgaccaggatacctgtggtatttaaattaaacatttattttgagaaaaatttatttacactttaaatatatgtatttatttggatgacagattataaggttcatggtctgagccttacctacccagagagtgtacagagtccatttcatatactttaagtcaaacaaacgaatgtgacttgcagacatagtctaattacatgggaaatattatctagtactttattctaaattaagggatactcttaacagtttttgactgcatatttttgtctctaagattatttgatcatttttgtatatttattatttatcctctggtacttataaaaataattttaaaattgctgaaaatggaaacttgccattgaggataagagattggcagctccacaaatatggaaggaaagtctagatagttgtcatcagagaccaatacaatgtgtacagtgtatacagtgcataaatggacaaatatttactctcagaaatctttcaggccaaagtaagaaaaaaatattaaagagttatatggtttttattggcccatgaatgtgaataaagccattcttcttgagaaccaagcctttttgtctagtattttctaaagtaaaaattttatcttatggatattaaattatgtagttatttatgaatgctataatgaatttttcaatatagaaagtttaaaacatgaaaagatttttataaggctttgacttaaatgacacaaaataaactgtaagaacattatactgaataacaattctggaaaatatttatataagaaaataaattacttttctgattacttaatggaacgtgaaaagaatagactattatcctttctcttagattatcaccgtgaaatggctgctttaactaggattctaacaaacactctgcagaaaaaaatgaaaaattaattaactgtccaattaaaaattaagactgaataattgaaatgctccattcaagtataatgcttatgttgaaggtttaatttaattacaaataaaaaaagaaaagttagccatatatggcctttcttaactattcaccctgagcaaatactgacccatttttcagcttcaacagagctttctttacctccttgtttctcagggtgtacacaacagggttgaaaagaggagtcagcgtggtgtagaaaacggccacaaccccatgcaaggcgtccctggagcctggcctcaggtaaatgaaaagaccagggccaaagaagcaaaggaccacgatacagtgggaggcacaggtctgaaaggctctgtgcctcccctctgaggtgcggatccgcaggatggaacagacgatggacacataggacagcactatcaggacaaagcagcccgaggccactagcccaatattcacaaagatgaccatctcgttggctgaggtgtctgcacaggccagtttcaggatgggcggtgcgtcacagaagtagtgctggatctggttgggtccacagtagggcaaatggaaagtcaatatggtctggacagcagagtgcagagagccactgagccaagtgccggtggccaggagggcacacgagcgcccagtcatcatgttggtgtacctgagcgggtaactgatggccaggtagcgatcataggacatgactgtgtagaggaaacactcggtgctccccaggaagtggaaaaaatagagctgagccacgcagctgtggaaggagatagtcctgccgcttggggacaccaaggtcatcagcattttgggcaccgtgacagtggagaaccacatgtcaatgaaggacaggttggtgaggaagtagtacatgggggtgtggaggtgagaatccaccctgatcaccagcaggatgaggaggttccccagcacagtgagcacgtaaaccaccaggaagattccaaagaggggggcgtccagccctggggcatggggaaggcccgtgaggatgaacgctgtcagtagggtggcgttggacatttcttctcatatatggggctctgttcttacagaaaggaagggagatagcatttactgtgagcatgttttatatgaaatatggcaactatatttttctgattaagaacaatagggttaaattattttttatattttataacttccttttgcttcagtataggtctttgaagaggaatagcactttcttattccagtaccagaataagccatatacaaaagaggaggaaattaacataaaatcagccaaattttgaaaagaagaacaaattttgtatcctattttctgtagaattggaaaagatatactcaaattaacaacacttaggtgctggcaagctctttccggggataagcctttattcaagcatctctctctgtttttctctcaaacacacacatatatagatacgcatgcacacacacattctctctgtgtcaacacacacacacacactttcacacatacaggttcagtctctttgatcattagagaatttccattacaaatacaaatttctaaagcaagcttcattctggatggctgggagaaaactgccttctcagagctctctggccagctgcagaactaaggcaggattccagcagtggtttagcattatgtggagccggtcttctgttcctttgtcttaccctagatcaggggtcctcaaactccaggtcagggactggtaccggtccatggcctgttaggaaccagtccgcacagcaggaagagagctgccagcaagcgagcatcaccacctgagccccgcttcctgtcacgtcagcaggggcattagattctcgtaggagtgggaaccctattgtgaaccgcacatgcgaggaatctaggttgtgtggtccttatgagaatctaactaagatcctccccctccccaccccaggtcccaccctggtccatgtaaaaattgtcttccattaaaccagaaactggtccctcgtgccacaaacactggggacccctgccctagatcataccttcctggtcatatacaaagtttgaccccaagctaatgcaataatgaacagtaccatcattttctttagcttcccttattctgtgtctctttctatttatacattttgtattatttacttctccagaattttaggcaattaagccttctctttctaaagtatgatcaaataatctcacaacacattttgagatagccaagaagaatggaacctgcttgagtagtaagaaagactaaactttctctgatgtttgagtttcagaatggaattaaaataataatatagttattacaaaaatacaaatgcccttctaaaaataaaaaaagtcttttatttccattatttctaggatttctattatttcaaagctcagactcaaagtttttctttttttctttaacgtggacacaatgtcccagacattatattttcaagagaaaataaattaaaatttatgaagaaatataaggaaacgtggttgaagacctggacctctctgatagaaaagaagcatttcattattaatttctaaaatgcttctgtcataaatcagcaatacattttttgtggggggggctctgacagaagcagacttttccatcatggaattcagctgcaactgagttggaaactcagagttgcaatgctaaggtttatagaaaaagcacttcattgatttatgatttcacaaaatttttagtcttctacagaaccacaaaaagttggctctgtaagtcatgactaagataatctagcttcattagccaaagctgacgaaaaatgaagagaaacaaaagtatgaccataaatacatcataatcacctcccctcaaaaagtgtctaataacgaaaaatgctgaagtgttgccaatttttgctacttaccaattttacaactaggttttggatcatgaagcaaaattcaatattgaaagaaaatgtcagttcttgataagtggtataatttttcttttcttgcaaagatgaaaccacagaagaaac

SEQ ID NO: 915105 - DNA, 4001 bp, Homo sapiens
tgttgaatcagaattttacaggacaatactccctcaactcttacaaccacaccaacagggctccagtaaataacagtaaataaaagagttgaagagctgaaagagttactagtcacagactctctttgaggactagtatttaaggatacttaaaataaatgggcaaggcaaaacaagacactagaggaatttgaagcctttggtccctacaaacatgacacacagttcagcttctagccagactagattaccataaatctcccttctaactgcctatttgtctcagttcctattacctgaaacaagatgtctagctttcaacaaaaaattataagacatgttaaaaggtaagaaaaaaaagcacagcctactgaaactataaaaatgctagaagaaaacctcaggaaaactcttctggacatggtctaggaaaaaattcatgactaagacctcaaaagcacaggcaacaaaaattaaaatcgacaaataacacttatactaaaaagcttctgcacagcaaaagaaataatcaacagaaataacagaatgggagaaaatatttgcaaactatgcatccaatagggactcatatccagaatttacaaagaactcaaattacttaacaatgaaaagcaaataatctcattaaaaggttggtaaaggaaatgaatagacatttttcaaaagaaaacatataagtgattaacaggcacatgaaaaaatgctcaacatcaataatcatcacagaaatgcaaattaaagccacaaaatcagtcagaatcaccattattaaaaagataaaaaaataacagatgttagcaaggctgtagagaaaagggaacacttatacactgttggtgggaatgtaaactagtacaacctctatggaaaacagtgtggagatttctcaaagaactaaaaatagaattaacatttaatctagcagttccactactgggtatctacccaaaggaaaagaattcattacatccaaaagatacctgcccctgtatgtttttcacagcactattcacaagagctaagatatgtaatcttccctagtgtctatttgctctgagaatgtgctactttgtctttcagcttcaacagagctttcttcacctccttgttcctcagggtgtacacaacagggttgagaaggggcgtcagcacagtgtagaaaacggccacaactccatccacagctttcctggagcctggcctcaggtaaatgaaaagaccagggccaaagaagcaaaggaccacgatacagtgggaggcacaggtctgaaaggctctgtgcttcccctctgaggtgcggatccgcaggatggaacagacgatggacacataggacagcactatcaggacaaagcagcccgaggccactattccaacagtcacaaaaatgacagtctctatggctgaggtgtctgcacaggccagtttcaggatgggcggtgcatcacacaaatagtgctggatccagttgggtccacagtagggcaaatggaaagtcaatatggcctggacagcagagtgcagagagccactgagccaagtgctggtggccagaagagtacacgagcgcccagtcatcatgctggtgtacctgagcgggtaactgatggccaggtagcgatcacaggacatgaccctgtagaggaaacactcggtgccccctaggaagtgaaagaaatagagctgagccatgcagctgtggaaggagatagccctgccacttgggaacaccaaagtcatcagcaatttgggcaccgtgacagtggagaaccacatgtcaatgaacgacaggttggtgaggaagtagtacatggtggtgtggaggtgagaatccaccctgatcaccagcaggatgaggaggttccccagcacagtgagcacgtaaaccaccaggaagactccaaagaggggggcgtccagcgctggggcatggggaaggcccatgaggatgaacgctgtcagtaggctggcgttggacatttcttctcacccttggtctctctccctctgggaatataaagagcacccagcatttagcacttaattgagaaatgagaatccattctctgtgtggaaactgcatcaagcaggtagataattctggagttattgtggactttgcttgttaacaaagcttccttcataaactaatgaagtgatttcctagtctttctctgtctcacatacacacacacagagacatatgcggaagaaattaggagaaacgcattgtcttagattttaataggtgtataaattaccacaaacttaactggcttaaaacatgcaaatttattgtctcgccctctctgtgggtcaggtcagctgggccctctgtttagctctcatcaggttttaatcaacatatcaccaaggcctgcaatctcatctgaggttggggatcattctccaagcttcttgtggttgttggcacgattcggttccttgcagttttaggactcaggttccagtttccttgctgtttgttggcaggacacgtaactctcaacttactgaggtcaccctaggtccaagaaagtcctagctacttggccttcttaaaacaccacaggttacttcttcaaaaccaacgagacagactctctccagtttgctatggcaaagtattacataatgttatgtaatgcagtcacgggggtgatattccatcatattaacaggtcccaggcatactcaaaggaaggttattaaatggaaagcatatactagacagcaggaatcttgaaggctactgcaaattctacctaccacattcatttttgcttccttgctcatgggaaaacttaaaaaaaaacaccaagaatttaattgttagtggctgggaatatttgaaaactgaacagttcagctaaatcattttctagtttcctcatatgttatttgacattactaacatcacctacctcactgagaagttataagcattaaataagatgatacatataaagtactaagtactgtgcctggcaggtagtaactgctcaataaatgacagtgagtcttatcacattatgccttgcagcagtattacagaatttccagttttggtcttaggaagaaagagagtacatatattctttcagtgttttcagagagtccttctgaatctaagagctaggtcttcttggactattttgtgcctgatactgttactgatgtcctcactactgcctgctttcaaagggcttgtccttggtctctcagagcaggtaagaatctcagcgcaactccataatgggattcccacgacctcccaaatgatccagagagcatcaaggttcatgcataactgtcccctgcccccatttctgctaccctagaacacttcctatgtggttctgagaacatggcattcatatgtgctctcccaaacacaatccactgggtagaggccagctgtctttcatactccttctaccctaggtttctaaatatattctaatattggctttgttagatatcatgtgttgcctccaccatcttcctttactcctcattctcataaatccaggtaatgaatgatctcacaaagaagacaattccatcaagtctctctcttaattaagacctagaatctgagacaggaaaaacgggaccaatgtaagaagagggatctatgccaccttgatgtcaagagaagctgggattctgtataatggaaatcagggccaaaataaggttctttgcttaatattaatattaatacaaaatattgtcttagttcaggagtcttactaattgttcagtgggcaaatactatgaaacttgttcaccagtgtgagagaagccatgatctctgcccttcagaaatcccagagaagatacctccagggaatgtggcttaagctagtttaaagaaaggtttttgaaatatgtaaataaatagcagaaaggagattactgcaatcaccaacatggatatcagaacttttaaaatagaaccaagatactctgaaatt

SEQ ID NO: 915106 - DNA, 4001 bp, Homo sapiens
aaatattttatttctattgtcatggtcttacacatgttacttaaaattaaatgcagctccaggttctcatcctcagcactatcgacattttggccatgataagctttgttgtgagggtctctcctgtgcattgtggaatgcttaacacccctgacctatagccaatagatgccagtgcctgtgagaagcaagaatatttccagacattgccaaatgaaccaggggacaaaacagccccaagtgatctagatatttaagagatttaatgttttatattgaatcttaacaaacataataaaataggcgcatgtgataagtgcataaactattatatatgtagctgtaaatcgtacattatcattgctggatagtaatctattctgtgaatacacaatttctatttgattcattgataatatttaaatattaatagcttgctatttttgcccattaaaaatagtgtttctagaaatgttttccaatacatgtatgtaaatagacagatacatatacatacatgatgaaaacctatatgttaaatatgctaaatgctacagactttcttttgtatacacgtttggatttgtatagacacatacaaatatacagatacattaaaaccaaaaagaaatttgaacagctacagccacaattagaaaaatgacctcaaatatttgttgctatttttgaacgatgtctccataatggtaaattgttaagtttgtgtgcaaaaaaaatcaaacaaaacacaaaactttttatcaagttgtaaacatgaaggactcaaccatctatcccggagattcgatgaaaatatttttttaaattaatatgaacctattgatgagaaatgaatcaataaatcagaatataagcatgttcctcatacacataagtctagctgtgaggttaaaactgtcttagacaatctgtggaagaattataactgtgcaggtgttttggaataatgtttaacactgagaactatacatataatcaatttcacatgaataactaaattatattactatttttaaacaaactagtgtatctacttcctagtatttattctccctgagaatgtgctactttgtctctcagtttcaacacagctttcttcacctccttgtttctcagggtgtacacaacagggttgagaaggggtgtcagcacagtgtagaaaatggccacaactccatccacgacgtccctggagcctggtctcaggtaaatgaaaacacagggaacaaaaaagcaaaggaccacgatgcagtgggaggcacaggtctgaaaggctctgtgcctcccctctgaggtgtggatccgcaggatggaacagacgatggacacataagacagcactatcaggagaaagcagcccgaggccactagcccaatgtccacaaagatgaccatctcgttggctgaggtgtctgcacaggccagtttcaggatgggcggtgcatcacacaaatagtgctggatctggttgggtccacagtagggcaaatggaaagtcaatatggtctggacagcagagtgcagagagccactgagccaagtgctggtggccaggagggcacatctgctcccactcatcatgctggtgtacctgagcgggtaactgatggccaagtagcgatcataggacatgactgtgtagaggaaacactcggtgctccccaggaagtggaaaaaatagagctgagccacgcagctgtggaaggagatagccctgccgcttggggacaccaaggtcatcagcattttgggcaccgtgacagtggagaaccacatgtcaatgaaggacaggttggtgaggaagtagtacatgggggtgtggaggtgagaatccaccctgatcaccagcaggatgaggaggttccccagcacagtgagcacgtaaaccaccaggaagattccaaagagtggggcgtccagccctggggcatggggaaggcccgtgaggatgaacgctgtcacgaggctggtcttggacatttcttctcacccttggtctctctccctctggggatataaggagcacccagcatttaccaattaattgataactgagaagtcattctctatgtgaaaaccaggtagataattctggagttttcatggactttgcttgttacaaagcttccttcataaagctaatgaagtgatttcctagtctctctctctctctctctctctctctctctctctctctctctctctctctctctctctctgtcacatacaaacacacacacagagacatacgcagaataaattaggagaaacacattgtctcgatttcaatgggtgcataaattaccacaaacttactggcttaaaacatgcaaatttattgtctcgccctttctgtgggtcaggtcagctgggttccctgttcagggtctcaccaggttttaatcaatgtatcgccaggggctgcaatctcatctgaggctgggatcatcttccaaccttatgggggttgtgtgcatgattcaattccttgtagttttaggactgaggtcccagttttcttgctgtttgttggcaggacatatcactctcaccttacagaggtccccctaggtgctagaaagtcctagctacttggtcttcttaaaacacaacaggttacttctttgaaaccaatgagataaactctctccagtttgctatgacaaaatgttatataatgttacataatgcagtcaaaggggtgatatcccatcatattaacaggtcccaggcatactcaaaggaaggttattaaacagaaagtgtataccagtgggcaagaatcttgaaggctgcttggaattctatctaccacattctattttcgctgccttgctcgtgggaaaacttaaaaaaaaaacaccaagaatttaattattagtagcaaggagtatttgaaaactgaacagtactagtaaatcattctctagttccctcttatgttatttggcattactaacatcacctactcaccgagaaattataagcattaaataagatgatacatttaaacacgtagtactgtgactggcaggtaataactgctcaataaatcacagtgagtcttaccacattgtgccttgcagcagtattatggaattgctgtttttgatcttagagagaaagagagtacatatattctttcagtgttttcagagagttctgaatctaagagctaggtctttttgtactattgtatccctgatacagttactgatgtcctcactactgcctgcttttaaagggcttctcctaggtctctcagagcaggtaagaatctcagcataactctatagtaggattcccatgtcctcccaaatcatccagagagcaccaagcttcttacgtgactgcccccacccccatttctgttaccctagaacacttcctatgtggttctgagaacatggcattcatatgtgctctcccaaacacaatctactgggtaggtgccagctgtcttgcattctccttctatcctaggtttctaaatatattctaatattaactttgttagatatcacatgttggcccctcaccatcttcctctactccttattctcataaatccaggtaatgaatcatctcacaagagaagacaattccatgaagtctgtgcctctcaattaagacctagaacatgagacaggaaaaaaatgggaccaatgcaagaagagaggcctatgccaccttgatgtcaagagaagctgggattctgtataatggaaattgaggcagaagtaagattttttacttaatacaaaatgttgtattagttcaggattcttactaattgttcagtgggagaacactatgaaacttgttcatcgatatgagagaaattatagtctctactcttctcaaagcccagttaagatacctccagggaatgtggcttaagctacgttaaaggaaggtttgtcaaatatgtaaataaattgcagaaaggaggctactgtaatcaccagcatgcatatcag

SEQ ID NO: 915107 - DNA, 4001 bp, Homo sapiens
atctggatccagaccctcacctgatagattgcaccctccctcagctcttatgggagaggtaattgcttgtaagaactatccctggagtcctctgggcctggctgttcctcagggtgtaaatgagaaggttgagctgtgtggtgtccactgtgaataccataaagggaagtggattttacctgagggtttatttggggttggaacacaaccccatgtacatgaagaggtaacagccattctgctgcaaaactatgctgaggtaggagtagtgccatagtagtgctacctgctcagtggatctgtgagcagcagccctcatgaaggtgtaggaggtcgtgaggaaggtggaacagcaaagactagtgtgagagccaccagcacagagggctcatgcaggcagggctggcatagaccagaggtaattctccataccctagcaaggctggtacatagtaggtgattagtcaatgaaagaaaattcctagcccctttctggcatgaagaaaatgaaagcaaccagttgggatgtatggtgcaaaggaaattaatgcattaagtaagctattgtttgtcatatactgatacccaaaacaataataaaatgtgtttatttgagcaaaatatgtctttatgaatattccttacttaaggcaactttcacagggtaaattacatcatctccccaggaggcagcatgcctatcagcctttattcacagtatgtatggggtgttcctaatatggcaattgacataggtgagctgcaaatccttaaagtagagctaagtaaactagcattcctacgctgtaagttctgtccaaattttcatatcttagtcaaagcacttcagaaaaatgagcatgaattgtgaacttggggcaaatatggcaaaaaagaaacatcaagtgcacagtgtgagaaagtactacagttctgtgtcatttagagttctttgacacagcaacagacagacacccagcccagtgcccctaagccttcagttggcgtcagaggctgctttacggataatggcactcctcagagcacctttgacatccttgttcctaaggctgtaaagcaaagggttgagtaagggggtgacaaaggtgtagaccaacgcgatttggctgtcctcatcctctgaggtgctggaccgaggacgcaggtacacgaggctgcagcagccatactgcagcaggaccacggtgaggtggaaggagcaggtggagaaggcccggcggcggccctcggcagaacggatgctcaggatggcacaggtgatgaacacgtaggagacgcagatgagcaggaaggggatggtcagcacgaggatgctcacgacatagaggacagcctggtgcacgcggatgtcagcgcaggccaggcgcaggacgggaggcacatcgcagaggaagtggttgatttcctggtggtggccgcaaaagggcagggtgaagattaaggcggtgagctgcagggaggggaagagggccaggcccagggccccacccagcatctgcgtgcacagctcgcgggtcatgatgagggtgtagtgcagcgggtggcagatagccacatagcggtcataggccatgatcgccaagaggaaacagtccgtgctgccgagggtgacaaagaagaacatttgggccccacatccagccaacgaaatgggcttctgggcccccaaaatgttggaaagcatcaagggtactaccacggtggtgtagcagagttccaggaaagacaggttggacaggaagaaatacatcggggtgcggagggtgctgtgtgtgcacaccacccagatgatggctgtgttgccacagaggatcatcaagtagaggaggaggaagagaaggaagagaagaacctggaattcagtggctgtggtgaacgcacggaacacaaactcagtgggctcagactggttgaagacaagtttccccacaggcatgtcttatgcaaaagaataggacgcgctgagctcttcttggctgagttgctttatttcttttttttctttttgagacggagtctcgctctgtcgcccaggctggagtgcagtggcgggatctcggctcactgcaagctccgcctcccgggttcacgccattctcctgcctcagcctcccaagtagctgggactacaggcgcctgccactacgcccggctaatttttttgtatttttttaagtagagaccgggtttcaccgttttagccgggatggtctcgatctcctgacctcgtgatccgcccgcctcggcctcccaaagtgctgggattacaggcgtgagccaccgcgcccggccgctttatttctttagtaaaagcaggagtgtacaattttatttggaattaactatttagtagctagtttccaatcacggtgcatgagaatgaattcacgatatagggtttggtatacttttccttggaaatcctcatgaatgggatagacagtcatctgcagaaattcctgggggcaagacatgtagacacatgtagatgttccttgtgaaatatctccccccaccccgatattttcaatccaattgataagacttaattattttgcttgtatttaattacagtgaagagttgtatggttgcacatattttaaaattagataaatgaatttgtcttttacttttttcagtaagcactctcattgaaatataacatacatgtggaggaattcacaaatcctaagtgtgaagcttgatttgtttatttattttaacatcgtaaatacgccagtataaccactacaaagattaagaaatagaacgattccagtgacctacaaacatccttcatgttctcagtctttatgcttcacaaaagtaaccactttttgacttttatcattacagattgatgtaactatgtttcaacttatatatgaaatgctaaagcatgtactttattgtaactggcttcaacattatgtctgcaaaggttattcttgttgttctgaatcaatcctttgttctttccattgctttatggctataagttattcactttacattcagttattttgactccacatacaagtaggaaaacacccattgttacaatcttttctgatatgtactcttcatatatttcctctcttttgaacattttatctaaatttccaacaggaagctaaacttttggactcaaatagtttcaaatgaaagggaagtgaacagagtcaggttaaaattaaagtggagcttcctgagataagaaaagacaatgaggaaactaaaaatgcaatagcacaattgaattatgcattaacataatcaagagaataagaaagacctttgcaagcatctgggaagttaaaaatacctgtgaattaagcactttcaggttagactacaactttatttttaatacaaaaatttaagagacaatacaaaatatctacagaattttaagaaaaacaaattggagtgaaagaattctgtatcaaagccttagtgatttatgttcaaaagcaacagaaagactttctcagatttggaagggcttaggaattatttcattctaaatataattttaaaaatccctcaacaaagactatgagttgctgcatgattaatcagagtaatcagaacatatactttaaggttgggaaagttgtaatgtaaaataatatgctttggaaaagcaaataataaaatatgtatttaatattaaatagtgcaaatattgttaaaagcaaaaaagaattgctgagaataatttttaaagatgtgcataatataaaatatgaaaactaaaataattatgtatatttaaaaccacaatttatataatagaaaaactgatagggagggatgggagaaatgaaaatatgctaatttcctaaacctatgtacaaaaagactccataaatattttatttagatgtgactagagaaattagtcacaaccatatatatccaaacacatatttcaaacatatttctgaataataatcatcaatagaataaaaaccag

SEQ ID NO: 915108 - DNA, 4001 bp, Homo sapiens
tgcctagggcataatctgaattctttaggttggcattcaaggacattttcatcttatagaataggttaggtgaatacaacacaactccttcctcttgtatggtaagctggtttaactaaaaccttgagttatcttttataattttgaagtctagaaatgccctttcttttgtagttgccctataaactcaatgaagatattaaaaccttgctaatctttcagaaacaatttgaaccttagcttgtatcataagctctctttgatttcttcaaccagcttggtaagaaacatgagcgcctattttacatgacacttaatataactattttatttagacctcataatatcctacaaagcaattattttaaatcttactcttaaaagtggagactaaaactgcaattatgacatctgtacaaaattctacaactagacctggttggatcagtattagaatactggtaggttcaattgacaccaaaacccatgttatttctatctctcaatgtggcctaaagtatatactaccatgagtgggagaataaagaaaatgtgactttctaagtcaccttggacaatcacttttctccttgtattttatcattttaaaaaatgtggtttctaagctgggaaatatgtatacaaaggttttttcattgccttttatatttttgtttacagtattctgtatgtatttaataaagttatttcataaaaagtaaaacaatcatttactaatacaaatgaggatacgaatagcatttcacatacctctgaaccatagaacatagattttggagagactctagacatcatctaatccagcctcctcattttctagatgaagtgtttgcaagggagagagtgaggtagaccatttggccaaagctgggggaaagtgtgtgactgagttgcaactcagttattctgatttccacctgaatgatttgagatgtgaatagttgctttcctggcaggcaaattgtgagttttgatagcacagactatgggggtgggctgcctgctgtagactctcggaagctgctgcacaaaagcctttgcagagcatgcttcacctccttgttccgcaaagtgtaaatgaatgggttgagcattggagttacgattgtgtagaagacagcaggggccccagctcctgcctcactggagcgaggctgcaggtagatacagacaggtggcacgtagtacaggagcaccccagtgagctgggcagtgcagggggagaaggcccgctgccggccctgggctgtgcggatgcgcaacacagctgccacgatgaagatgtaggaaataacgatgaggatgaggcagcctgcagccacgatgccaatgctggcaagcatgactagctcattaatggtggtgtctgtacaggcgagctttaggacagggggtatgtcgcagaagaagtaggcaatgtggcaaggcccacagtagagcaggcggaaggtgagggaggtgtggattgcagcgtgcgtggcacctatggcccaggtgattccagccatttctgcacacatccttctgttcatggccactgggtagtgcaggggttgacagatagccagatagcggtcataggccatgactgtgtacaggaagcactcagtgctggccagaaagtggaagcaataaagctgtacggcacagccctcaaaggagatcaccttcccatccagagtcagcaggcctgccatgaccttgggcactgtcactgtagacaaacaggcatccaggaaggagaggtgccccaggaagtggtacatgggtaagctgaggtgagagtcagagcccacagttaggaggatgaggagattcccagccacagtgatgctgtagatgaggaggaagaggaggaagaagaggctagaatgtttagcggtgtacctcaaaccctccaggaagaagtggctcaccacagtctggttggggttctccgttgtcatggtcatcttctcacacacagagcggctagtcatcccctttgcaacaaaactgacattaatggaataaatagctgtatccctttcctgagatgtcattatccatcaagccacaccaccttggtcttacccagtaagcaagagaaagatgtacaagttcatcttacagttttgttctgctctagtctagtgcttccttgctgtttatttcttcataatgaatctttcaatacaaaatctgcagttttggtgaggtatataaaggactgtaagaattatttgcagaaatgcactccctaaataatgacaataaaaatatggattataaatcctactctcaatgagtattttttgcaaatattccagaattgtgatgcctctgccctcctactctatgtaccctgccatgctgtagatgtagaaaggcaggttcttattgctgtgtcatcagggagatgcatcctattttcaggtgagacttgcctggagttttggtgctattacatcagccagaaacacagcagccccacccattactcaaccagaggagttctttggaatttcagttacccacaatcctcaagtgtgtaacaattgaggcttggagaatagactgaataattatcaggacaattttttctatacactttgtgttcttcctgtaaagctctgtttcaaaatttggggaattgtttgccttttcctttcttgttgagcctttccactggactgtaattgagatttaaagagttctctttgattcttccatctttcacctcgttagcctaacagatgttgcattaggtgaaaaatttccttaaactgctttttttccgtgttgtctcttcaattcctgtggattttacctaaacccacctcttcatattttacacctagattttcacaatggtattttatgtcccatctcttccttactccctgatataccaaatgattcagtattcaacttttttgtgccagttttcttaaaaaaattcgaatatatcttttcttactgttccttagtgcctgagatataaagtgtatctctgtcctacattcagaattatctgtaaactatttccattatcatgaaaaaaatctttatcttctgcaatcccctaagaaactcctgttatccagggatgctatttgcctcatctcctcaatttgccataatctctctctgatcttgtcacaggatccttaggatgtcacttttccagacagaaacctctgtggctggtggttcctctgcttgagtttgctcatggctgctgggttcttttcacccacttggcctggcaggctgcacttggctcgtgctaccagcctggattccatgcttgccaagggtgggagaggcgagaggtgtgtgagtgagcaagcacaggggtctggccactgcacacagccaggcacacttgctgctgtggtgggatgggcagctccaggtgccagcagaggcaccagcttcatgtgaggctatagctggaccaggcatactgcaagtggtttccattatgggcaccagcatctggacgaggggaatatgggggcacccaaaagctcagagatgccaggaactgcagagcccaaagagggtattacagcctgtcacagccctggctcagggagtcctgaggtctgggctccaagaagctcttctttccttctcgtcacccacaatgcagccaatgagggggtgagtttgggggtttgtgtttcagtctgtttgtgttacagccctttcagtcccaccaccccactctgacctgcagctcctgggctggcctggcccacctctgcttcctgtcccattgggtggccacccagcactggcagagggtgggagggctatagtgttacagcagctctggcttggggagtcccgaggtctgggccaccaggagggtcaccactttttactcccatagtccgggagcatgtcaccacccacagcttggcaaatgagccaggaacatgttacagcacctttagctccccctgttcggtgggtcccaagttctcatcctg

SEQ ID NO: 915109 - DNA, 4001 bp, Homo sapiens
gtctcaaaaaaaaaaaaaaaaaaaaaaagaagaagaaaatatagcttacaggtcatgaaaaataacagtccctcagaacaaaatatttccagtgtaatgtggttatttgggggtgaaatttgcacaatgatatggagctggagaaaatctagaaggtgactggtataatgagaaggttcaaatataacctcctggaggaagagttggggtacttgttttagagaaaagagcactgaagatttacagaagatacaaaacctgtcctaatacatgtgaggagctgttatgtattaatataagagagctctagagtaaaaacaagaccagggggagaaagttgtttgtagatagagaccttagctcaaggtaagttatagtacttaatgactacagttgtccagtaaggaatgaagcatcttatgagttaatgctctctctccttggaagctcaagcagggtcaatgactctccaagatgctgaagaagagattcttaaagaacataagatgcaatgatgctcattttcttcttctcctgtgttttacttgttaaataatattttcctccattattagtatcctttttattactggggtactctttcaaagttatgaacactgacatgagttttcattttggtaaataaaacaaaaaatgtaaagttttttttctggcaatttttttttttttttttttttttttgtgagacagagttttgctcttgttacccaggctgatgcaatggcacaatctcagctcaccgaaacctctgcctccctggttcaagtgattctcctgcctcagcttcccaaatagctggggttacaggcatgcaccaccacagccagctaactttgtatttttagtagagatgggtttctccatgttggtgaggctggtctcaaactcccaacctcaagtgatctgcctgccttggcctcccaaagtgctgggattataggcgtgagccacacacccacctatgcatgtcctttcagcaaaattattagtagcatcccatttcactctcagaagtgtcccaatttaagtaaatcataggatcatcctacctagaattttctcaatgctttccttagggcatctttcagttccttgttcctcaaactatagatcaaggggtttaaaatgggagtgataaatgtgtaggccacagataccacccggcccatctcaggagagtagctggaactgggggacaagtatataaagctggtgcagccatactgcaggaggaccactaagatgtgagaagagcaggtagagtaggcttgctggcgcccttctgctgaccggatccgtaaaatggctaccacgatgaagacataggagatggagatcaatgagagggggatgctaaggacgatgaagctgatgatatacagagcagtcttgtgaacgcgtgtgtctgcacaagccaggcgcatgactgcaggcatgtcacagtagaagtggtagatctcatcattgtggcagaatgggagatggaagattaaaatggtgagtggcagtgacaacaggaaccccagcaccaaggagcctaccagcagctccacacacaaggaccagctcatgatgagcctgtatcgcagagggtgacagatcgctataaactggtcataagccatgactaccagcaggacacaatcagccccacccaagaagacaaagaaaaacatctgggtgccacatcccgtgatggaaacaggagttttgcccattgaaaggaggtttgccaaggccaatggggtgatggaagatgtatagaagatttctagaactgccagattagccaggaaaaagtacatgggggtgtggagggaatgattgatctgaacaatgactgcaattgtagcatttccaccgaggctggtcagatacatcatcaggaagaccacaaaaatcagcatctggacctcagggtcaggtgagaatggacgaaagaaaaactgcatctttgcagttttatttattccttccatgagtagagtattggacctaagaggaaagatgacatgggcctcaaggcatctctggtttcatatgatgctttcccaacttctccattcagtattcaggcacttgctgagaaacctcagggatgatgtgcatgttttcattttatagcagattatatagcattataatttatacatttgccacctcctcatctttcctctcccacctcccaagtaccaaagactgaaaaatcctcagtggcagggactttatcttttttattttattttattttttgagatggagtctcgctctgtcacacaggctggagtgcagtggtgcaatcttggatcactgcaacctctgcctcctggattcaagtgattctcatgcctcagcctcctgagtagctgggattacaggtgcccgccaccatgcctggctaatttttgaatttttagtaaagatggggtttcactgtgttgaccaggctggtttcgaactcctgacctcaggtgatccgccagcctctgcttcccaaagtgctgggattacaggtgtaagccatcacgcctggcctggtgatctttattttaattccagtgcctagcacagtgcctactgtatagggttgccaagaagcatttgctgaacaaattaatgaataaagcaaatttaaagttcaaagttacaaaatgggtaaaatagggtattgattaattatataagacaataaataaaaaattttaggattgtataggcagatgtatgccataatttaaagagaattgtgttgctggcatattatgaaattgaatcataaactctgtaatatatctcaaaacctagagactttgatttacatttttcctttatcctatatgtccctacacactgatagttcatctttcaaagagtctctcctatctgttgctttggtcctttcccatttccttaatcagctttctccattgttatcttccatgaggattcctgtgatagctatctattctcccatctcccttctcctccctctgtaatccatcctgctctctattatcatgttgcttatatgcttagaaattttcagtgccttcctattgcttaaatgttgaccttcacagtcttctgccaattattccagtctctcttggagctgacttttttagactaatcctgctatggcgcttaaatatccctgttacagaccacatggtctactcattggcctcttattcatattctccctgctgcttcatatacttccattctccttccaactagaaatactttctcctctcttttgcttaatccaaatcatacccaattttcaaattctaggatatgttgttcttttatgaaatctccctaggtcactctctttcctttctctgacgttttacgttgctcagtattatgagtttagtgctaccaaactgtattttactgtatctatatgtcctgacccaattacattttatgttccccaaggatgggggctggacctctgtcttatgaaaaattatcatttctttcataataagcgcaaggcatggtgaaaagtgctctattatgcatttgcccacttaatctataaaaccatgttagtaggggtgtactatcatcatccctttttaacagatgaagacacataggcttaaagaaattttaacattttctgaattcacatagctagaaaatggaaaagtcacggtttgaacagtttgtttgattatagagcttgtttgcttaaccttagtttataccctactttctccctccatactttttatctcctaagtagctttgctattaattgattacaattcagaactctagatggtctattggaaaaagagtacctaagatctaggactgaaaatgttggattatagtatttccacacttgagagacataattacaataataattacaatacatgattactatggctatctagtaaatgctgctccgggcaatgcagcaaaaagaacttcccttttttctcttctaaggagcagag

SEQ ID NO: 915110 - DNA, 4001 bp, Homo sapiens
ccctaggagactgacttctgtggactgattcacccagtctcccctcccttcttgctgccagttgagtttggtccatggagacagggcaagaaatggaagattttgagcaaagagacgctggggtatttgcctccctgtctcttccttgcatggccatagttctgtcatagtttctttttatttctgatgccacagtttctaccaagtggtttatctgcttagatctaactgtcactggactctgataatgttgcacccttcttctatggcacaccttttaagtctagggctgagaaagcttcctgctattgctagcgtgttagtgctctgccacattttattggtttccttacctataaccactgcagataaccctttttaaatatttttttagttaaaaatctattgagtgagctatctcttctcagctggtaactggacaaagtattatacttgccactttatatcactttatgctcatgtagttctttccaagaagagaaattacagagtcaaattgtagaaatatttaaaaatctttggcacacataaacagtatccatataatttataccatcttttagatgagttttaacaccaaatgatagaaatctcagtttcatacagatttggtgggctggaaccaaatacttgcctgataggctgtcccctcgtctttcctagctgttctgggaaaggcagttcctggtaagaactctccctacggcccctttcatctcactgttcctcagggcatagataagtgggttgagcagtggggttcccaatgtgtacaccagtgagatgaaccgatcttgcttggggttgtagctggagctggggcacaggtacatgaaggcacagcagccatactgcagcagcaccacagtgaggtgggaagagcaggtggagaaggcccggtggcggccagcagccgagtggatcttgagcagagcagccactatgaaggtgtaggaggtggtgatgaggaagaaaggcacagcaatggctagtatggctgccaccagcactgactgctcatgaatgtgactctgagcacaaacaacatgcatgactggtggcacatcacaaaagaagtgctcaatgccctgagcctggcagaatggcagagagaagatgaaggccaccagttgtaaggacaggaacagaccactgatgactgatgccacaaccaagtggacacaaagagtcaatgtcatgaggagagggtactgcaacgggtggcaaatggccacatagcggtcataggccatggcagccaagaggaagcaatcagcactgcccagtgcaatgaagaaagccatctgggtggcacagcccaggagagtgatggtcttctctgactgtagggtgttggccaggatatggggcaccaccactgcagtgtagcatatttcaatcccagaaaggctgcccaggaaatagtacatggatgtgcatagacaggtttctgtgtgaatggacaccacaatgagaatgttcccagtgatgatcaaaccataaaccaggctgaccccaaggaaggacagaatatgcagttctgggcaggagggataggccaggaacacaaattccatcaacactgagtgattttcccaggtaattgagctaacagtatttctctgtggagagctacaagtacagaaggaagaatcagactgaagataaattaagttacactctgagccatgaatctaatgtaatcagcactggagttagaaactggaaggatcaagactagttctttttcttttctccacttttaccaagtttctccacattaatatctacacctcaatttctacctgccaagagttgggccaaactatgtaagatactattgaagaaaaatggcagaggaagtgggtgggattcaggagctattttcagaaagagtggaatgaaaattcaattctttcagcaaattcacaagaaagtgtcaaggaattcttggggctagaaatcattaaggtaagggagataagccatttattcattcacttattcattcacatatttattaggttggtgcaaaagtagttgcggttttgccattttgatggcaaaaactgcaattacttttgcaccaacctaatatttacactcaatatctcctggggtattgaataagtgatatgtcaatgtaactctcaaaactagtgatgggaagtgaagaaagaaaaaaaattacccatgaagcaaagggctaacagaggcctgagtatgacagtgtcagggatacgcctcagaaagcaaagccctgtctactattggtttttctatccttatctgaccagaagtataaggcttgaaggaaacaaggtgttttatcatatgtttcctcctggcgtgggtggaggtatgagaaaatatgtgatcccaagatgttggaaatctaagaagccttcctgtgaatttgggcatgattatgaaagtctaagcccatctatttttcatatttctcagaagctaatgtgaaatctgggagaagccatatcttttccacaaaaaccttttaataaacagacgtaatttgcaaagggcatccattccacttcttttcccagaccaactcatattaaataaggtggaaaagacgtaatgtgtggccttgtttcaacgtgccaaattttaatatttcctgtcattgaatatgagatttgaagagaaatctctacccagaggcaccacttccagtaaaaattattcacacaaacccacctcagtgtcacaagcatggggaaaaatatgagtaggcagctacaaatattaagagcacctagggcagaaatggctctctgctgtttttccaacagctaacaagtggtatctatttcagttggtctcttttcctgagctgaacttcaataatgctttgagtggtttctaatgccacttagcatattgcacattatactatatcatgtggaggaggggcagtgtatcaatgtgaaatcagcagtgaagggaagtgatgtggtttgaataattccagctcctggcttcatgatgttaggtaatatataatttctctaagcctcaatttctgtatttgaaaaatgggaataataattatacttagacaaaagaattgctgtaagtttaaatgcaatagtaatgtaagatatcacaatgaactgtccatagtaatggcaacctaataaaagataatcatcattattatttataaattcaagggcagccattctgctttatttacattttgatcatcccatataagcacgcctaatgttgtgcaaattttagacactcaataattatatgtcgaatggataatacagcttgaaaatgttatttatacattttcttcattttctactttcactttgccgtgcaatgaaagatttaagattattcataatcaaatcacttgtttaggagtccttatataaaacaacttcgtatctaagatttgggctgcactgtggaaataattctatcattcaagaacatagcatatggaagtctacaacaggcacacatctaaaggctagtctaccatctatattattatacagagacagtttgaaatctgtgtcacaatgacaacttctgagaattttattgtagtctattacattcatatcatcttttcaaaaagttatattttgtttttaattgacaataataattgtacaatgtgatgctttgatacatatacacattgtggaatgatcaaatcaggctaatcagcatatccgtcatgtcatatagttatcatctgaatactgctctctataatatttgtaatctgaacactccacctataataaaatatttaaaatatttacatcagagctattataagtcataaattctaactgcaagaagggacctcaaaaatggccaatttgatccccagttattagatacttgaatttccaatacagtgtgtagacactgggtcaccttcaatgcccagggaatcccattatctcctggtttgcttgctctgctgt

SEQ ID NO: 915111 - DNA, 4001 bp, Homo sapiens
tcaatgaaataaaaccagaaaaaacaaacaaggaatcaaaatattaaaaaatgaaggttgaaattatcattttgctgatgttactatttttctcctggcaaaagaaaatcaagtttgaactattatactaacaaaagagtttagtacagaaatatgataataacaaataaattctaccctttttcctacatatctgtaaacaaatttactttagcaaaaaacatcatgagacactcaagaacaacttaataatctatatgtttaaaatagaaagaaaactataaaatgtcattaaaaacatataagaagacttgaacaaataaatgaagagacattacaattataaacattacaacttgaaaaataattcataccaaagtctatagtaatatagattgtaattaagatgtgagatgtgggttttttaaagtaatttttattttttatgcataaattttttatttattgatacatgtatttttattgacacattgtcccccatatttttgggtaatgtgatattttgataaactcatataatgtataataagcaaattagggcatagggatatccatcacctcaaacatttatcttttctttatgctgggaacagtagaattattctcctttagctattttgaaatatacaatagattatggtttactatagtccccctaatgatttatcaaacaataggtcttatttcttctatctaactgtattgttgtacccattaatcaacaactcatcacctccattccatcttcccacccctgggccctggtaaccaccaatctactctctaaggatgcgtgttattcttgtgacttaccatggcagttacaggttttgtttccaagacaagagctaagtggaaaagctccaaccccttcagaggttggaataggagacagatacctgcaagttcatcaaaagttgaaccatcacaactgtgccatacgctctgggctgaatcatttatctgattatgtggactaaaagaatgtagaggtccagggcatcaaagggaagaaatttttctattgatgagctttctcagggcacctttcatatccttattcctcaagctgtagatgaaggggtttatcatgggtgtcaccacagtgaataggacagcaccaatcttatcagtgtcctcagggtgagtggaggaggggaaaaagtacacgcctacaatggttccgtagaacagtaatacaactgtcaggtgagagccacaagtggagaaggctttccactttccctgtgtggaagatactctcaggacagctctgatgatgcagacataggaaaagaagctgagtgtaaaggggaagatgataactgataaacccacaataaacaacacaagctcattgatcaatgtatctgaacaggacagtttgagcagaggggccaagtcacagaagaagtgtgggagagtgttgtggttacagaagagcaattgaatgagcagaagggtgtgtgtcagagcaataatattactgaggaaccatgagatgactgtgagcaaaatgccgaacctgggccgcatgagaattgtataattcagagggtggcagatcgccacaaagtggtcataggccatggtccccaagagcaaattgtcaatgacgacaaacacaatagaaaagtacatctgtgtgatgcagctctcataagagatggattgactcttggtttgaatattcaccagcattttggggactgagttggaaatggaggaaatatcagcaaaggatagattggcaaggaagagatacatgggggtatgaaggtacgtatccaagctgatagccacaatgatgagcccgttcccaatcacagtgaccaggtacatacccaagaaaagcacaaagaggaggttttgatgctcatcctgcttgaaaaatcccaggagaatgaattcagtgatggtggtttggtttccttgatgcatatttctgccgatctgaagaaaggaactaaaagtcttcatattcctacaagaaaacctaacatggtatcatttggctgcagccattgcagtaagtcacttgaataaagtttcttctgcttattaagtggaagtgctacttaataaggaagtatttcagcagtgcagagatttggaaaatgccttagaaaaagacaggacatggccgaaacttctcaaaaaaactgttttaaactctaacaggattctgaatgtgatttttccagttggttctaaatgtagtttaaatcccgcaaactgagggtcatagatgaggcataccctatattctaaacatgttatatacacctgcagaattaacttaaaaatgaccaaactggttgccaaaccacctttatcctttaaatctaagaaaacagaaatttcaagtctcgtgaaagtgaagagtttggggaagtaaacacaactgagggttaggaatcactatggcagtgtacaccattgtgttggtgcttcatcccactaacgccgggggagaactccaaaacaagtgcttttggagaatgagtacaagaaggagcaaccagggttttacttcatctgtggctacatattagcctcaagaaaatttagggggcacacatacacttaaagacttctgtttgcctcttgcttttaaaggggctcactggatcaggctacgatggcaggggtaaagagaaaagatggtggggatagagggaaaagatggtggttagtagggcaatctgcattttcacccatgacatggcataaatatgtgaatttcccataggacacgtgatgctataggaggtcattggagtcaagtcaccttgttgagattccaatccagaaacagcctatcagggcagaggaggctgtagcaataagaaaccatgaggtgggtctcttatgaaagagagatcttaaagagatcagggacataattcattgcccttgtcagggaaccgcataatgaggcagtcccaaacgggagcccctgacgaaccccaaaatggtctcaagagacaccaggcctgccacatataaggcacaagctgctagtatctatggcaacagatatgaacacttttgccttttttcccactcctgttcttcctccttgacctgataaaactgaaaaagaaggaaagaccaaaatgactaaaacaacaacaacaatagtaacaacaacgggtttgtgggaagagaggccaaagagcaagggaagaacatatgctcccacctttccactgtatgacccaagctacacatcagatctgagctcacaagggaggacccatgctttgaattgatagtgaagctgaagtttaaaattgggctggacttggttttttaatacctggaaatgggtcttcagtatcagttaaacatttttaaaaccttaagtggccagaaaggtaaacggctctcacaaggtgtcatccaggagaagggaagagagactggacctagtatgattttccttgtgatttattggaaataatatcagcttgggaacaaagagacatttgtctccctctcactttatccctctcttctacctatctccaacatcacttatctctcaaagattttctttccattcagaggccagaaaagagacaatcttcgtctctgaaattcctgaaaactgaaaggcattagagattgaagcagagatctgaagtctctttcctcctgaaatgcttggcttacaaatcagagacaagagaaaacacatgcagaagggagaatccacaacaaaactgaaatgagctaaataactggcaggcatctatattgaagatacagaccggcctgtggttaccaaggcctgggctggtttgggcttgactagagagggaactgtatgtttctgagtgacaatctctgatctctgctttccgttctacctttccacttaccagtagtcctgcacaaattgttctgaattcttaaggtgactgtctagctggtcaagaccaatgctggattctgaagagattcacctctgaatg

SEQ ID NO: 915112 - DNA, 4001 bp, Homo sapiens
acaactgtgatgaattgggttctgtatgatggaaataattgaatttcaattatttcaagtttagtcttgagaaatgctgtgtaccatcttaccctcttggagatttacatgacaatgaaggttcttggaagttgtccagttattacattgtgcttcatataactcagagttgccaaaaattatttgaccatgggaatcttcattgttataaccactaaacatctcactgaatagtaccttaacaaaacaaactttgagaaaaactgacctaaagaaatgtagattaaagaaagaagtagtaataactgtcttcaaagctacaaaggctagactgtaggcactctatgcacctgtgatagtctaggttatgaataatttgtaccaaagtttataataatatagattgtaattaagatgtgtttttaaattaattttttatttatgcataaatttttaatttatcaatacatgtatttttattgataaattgtcctccatagttatggggaacatcttatattttgatacattcatataatgtgtaataatcaaattaggggattaggatatccataaccttaaacatttatcttttctttatgctgggaacattggaattattctcttttagctattttgaaatatataatagattactgtttaccatagtgccccataatgatttatcaaacaataggtcttatttcttctatctaactgtattgttgtacccattaatcaacctctattcaactccactccacttctctgctactgggccctggtaaccaccaatctactctctaaggatgcgtgttattcttgtgacttaccatggcagttacagattttgtttccaagacaagagctaagtggaaaagctccaatccccttagaggttggaataggagacagacatctgcaagttcatcaaaagttgaaccgtcacaactgtgtcatacactctgggctgaatcatttatctgattatgtggactaaaagaatgtagatgtccagggcatcaaagggaagaaatttttctattgatgagctttctcagggcacctttcatatccttattcctcaagctgtagatgaaggggttcatcatgggtgtcaccacagtgaataggacagcaccaatcttatcagtgtcctcagggtgagtggaggaggggaaaaagtacacgcctacagtggttccgtagaacagtaatgcaattgtcaggtgagagccacaagtggagaaggctttccactttccctgtgtggatgatactcccaggacagctctgatgatgcagacataggagaagaagatgagtacaaaggggaagatgataactgataaacccacaataaacaacacaagctcattgatcattgtatctgaacaggacagtttgagcagaggggccaagtcacagaagaagtgtgggagagtgttgtggtcacagaagagcaattgaatgagcagaagggtgtgtgtaagagcaataatattactgaggaaccacgagatgactgtgagcaaagtgccgaacctggcccgcatgaaagttgtatagttcagagggtggcagatcgccacaaagtggtcgaaggccatggtccccaaaagcaaattgtcagtgacgacaaacacaatagaaaagtacatctgtgtgatgcagctctcataagagatggattggctgttggtttgaatattcaccagcattttggggactgagttggaaatggaggaaatatcagcaaaggataggtaggcaaggaagagatacatgggggtgtgaaggtatatatccaagctgatagccacaatgatgagcccgttcccaaccacagtgaccacatacatactcaggaaaagcacaaagaggaggttttgatgttcagcctggttggagagtcccaggagaatgaattcagtgatggtggtttggttttcttgatgcatatttctgctgatctgaagaaaggaacacaaagtcttcatacacctacaagaaaatttaacatggtgtcatttggctgcagccattacagtaaggcacttcctttaagctgatgagcaataaagcttcttctgcttattaagtggaagtgctacttaataaggaagtatttcagcagtgcagagatttggaaaatgccacagaaaaagacaggacatggcagattcttctcaatgaacatgttttaaactctaacagaattctgaatgtgattttcccagttggttctaaatgtaggttaaatcccccaaactgaggatcataggtgaggcataccctatattctagagatgttaggtacatgtgcaggaattacttaaaagttaccaaactggtccccaaatcatctcccttgttcaactttatgccttaaatctaagaaaggagaaatttcaagtctcgtaaaagtgaagagactggagaaggaaacacaactaagggttaggaatggctatgggagtgtacaccattgtgtgggtgcttcatcccattaacgccgggggagaactccaaaacaagtgcttttggagaataagtacaagtaggagcaatcagggttttacttcatctgtggctagatattagcttcaagaaaatttagggggcacagatacacttaaagacttctgtttgcctctcatttctaaaggtgaggggctcactggatcaggtcgtgatggcagggtagagggaaaagatggtggttagtagggcaatctgcattttcacccatgacatggcataaatatgtgaatttcccataggacacgtgatgctataggaggtcattggagtcaagtcaccttgttgagattccaatccagagacagcctattggggcagaggaggctgtagcaataagaaaccatgaggtgggtctcttttgaaagagagatcttaaagagatcagggacataattcattgcccttgtcagggaaccgcataatggggcagtctccaaaagggagcctctgacaatcctcaaaatgatctcaagagacaccatgcctgccacatataaggcacaagctgctagtatctatggcaacagatatgaacacttttgccttttttcccatccccattcttcctccctgacctgataaaactgaaaaagaaggaaagaccaaaatgactaaaacaacaacaacaatagtaacaacaacggttttgcgggaagagaggccaaagagcaagggaagaacatatgctcccacctttccactgtatgacccaagctacacatcagatctgaacttacaaggtaggacccatgctttgaattgatagtgaagctgaagtttaaaattgggctggacttggttttttaatacctggaaatgggtcttcagtatcaaagttaaacatttttaaaaccttaagtggccagaaaggtaaacggctctcacaaggtgtcatccaggagaagggaagagagactggacctagtatgattttccttgtgatttattggaaataatttcagcttgggaacaaagagacatttgtccctctttctactctcctaacattgtctccctctcattttatccctctcttctacctatctccaacatcacttatctctcaaagattttctttccattcagcatccagaaaagaggaaatcatgtctggaattcctgaaaactgaaaggcattggagattgaggcagagatctgaagtttctttgcttctgaaaagcttggcttagaaatcagagaggaggaaaaacacatgcagaagggagaatccacaacaaaactgaaatgagctaaataactggcaggcatctatattgaagatacagactggcctgtggttatcaagccctgggctggtttgcacttgactagaagggagaattgtatgtttctgagtgacaatctctgatttctgctttccattctacctttcctacccaccagtagtcctgcataaactgttctgagttcttaaggtggctgcctagctcgtcaa

SEQ ID NO: 915113 - DNA, 4001 bp, Homo sapiens
aaacagcaatatcccccaaaagagtgtcatgtaattagccatatcattttatattatttttaatcttcaaaatgcaactcacagcttttgttcacatcttttgttttcaatattctcagacttatagacaaactaatagtagtgcagcataattaagctggtgagaaaatgcattatgttgtcctctccatctttagcacaaacacacagacacactgacttaaatatccacacccaccatgcatgtgaacactgcaatggttggaatgttacaagatagccttggataatggaaaatcactattttgcttgtttgtttttgtattagcaagaaataagcaaagttgtttatcatgaaccttgcttatggactaccttcacctcctattttcttcattttattaataattgcattttaggaactataaagtatctccatgtcaaaaaccaacaaacaaaaacaaacaagcaaagacacttgttagagtgtttcatatggctgatgtttagaaagaaaaaaaagagcaagtacaatgcaaatacaagcaaactactaccagttggggcattagacaagaagtctatataaccttttaataaggtcagttggtctaaatttgtgcaaatctcaagacatctccccctttgatgtctgggttttacttacaccacccacttgaaactttcctttctctggttcttttcctttccctgatccaatataaacttcgaaggttaggggtcatgtcccaaggtgggaacccatttaactaaataccttcctgggaaaataaagattaaattttaaatagagtgaagagtaattttagatagtgtaaatcatgccctataaattacttcatggagagaagatttaaagagcatttgacaaatccagttacattccttcacttttctattaaatgctatactctgcactgtattggttttaccattagtatttgattcataacatgaatcttttgactctcaggagaaggaattctggaagctagccatgatccttccctagagcgtggagtgtgctggcagcatgtattttcccaggaccctcctcaaggcccgcatgacctccttattcctcaggctgtagatgagtggattcagggctggagtgacaattgtgtagaaaacagagatgatgttgtcttgtctggtgctgtggaaggaactgggcaagacatacatgaatgtggcagctccatagaacatcccaaccacagtcaggtgggaagagcaggtgacaagggctttcttcctcccctcatttgatggcatatggagcacagtgagtagaatttgtgtataggaggccagtatagcagcaagagagggaatcaggaaggtcacacccatcacatataccatgagctcatatctggaggtatcagcacaggccaccttcagcaagtgtgggatctcacagagaagatgcctgatctcctgggccctgcagaagggatagtgcatggtatacacggtatatattagggcacttagggatgccaggatccaggacgtggccaccatgagccagcaggctcttgagctcatgagggtcatgtatgtcagaggatgacaaatggccacatacctgtcataggccatgaaggccagtaggaggtcctcagcaccacccattgtcagtgccaggaacatctgaagggcacagcctccaaaggagatggtgttttctctgcgcagaaagtccgcaagggccttgggagtgacaacagatgtgaacaggaggtccatgagagagagctgcccaagcaggaggtacatgggcatgtggagccgggcttccatggtgatagccaggagcagtaggccattgctgatcagggccaacaagtataggattgtaattgtagcacagagcagttcaggagacccactgtcattcagaatccccaccaaaatgaagccacttcccaaggtgaagttccagagctccatgctgtggtttctttcatcacctagaacaagatggatacttcatgaatttttgctaagatgaactctagttttgaaatatcagaggcttcttaggacatgaatccactgagatgttaccctttccactgataactgactttgcctctcgatttctgaatgtctgacttctcactgtattttgataaaagttccatctaaatggagaacagacatcacagtaataactaaacattaagagatcacacataaaatcttatttaggacattaaacctgaacatgtatctttccaaaagcaaaaaattatctttctcttaagattaaagaaatattctgccacacaaatccttgattatccttgtaactatccagttagttttcttcatagacttgttttgatatgaaattccaaacaggtacagagactggttttcaataaagcactttcacttctttttccgtagaacttacagccacatttgtttgcagtactcaaggcagtagatgaaagcctcattagtaggctaaaacttgtccaccttagttacttctctcttggccagccccacgttctacagaagcttgagagagaagggataatggactgcctgagacaagagaatgttgtgtttgagaagatgttgcatttagagctaaatactttagggtcaatacaaatgtgtttatttaaaacaggttatattaagatgtgagcttggaagggctctgaaatataacatatgagggctttcctaggaagatcaggatgtttgtgtttgggagaaatggtgaaagggagcaagagagcatctattatatgctgtaattatgctcaataattctatcccctctcctgcctttgaccagatgttcactctcccttctgcagggccagaacctttaaacttggtagaaggaccacaggaatagggaggaactgcttttccagaaagcagctgttggcattgtggtacccaatcccatggagaagccaaggagaaggacaagggcctaagattgacaggagtctatgtgcattgtgaaactggatagataaagccaactgtgaacatgcagttaaagattttgaagtgaagcatcctttgtcaatcatttccccatatatggcatctatgttttcatatttcactggtttccactagcctcttatggggccattagtaccttaatggttaaaaggtataagaacatgcaatggacatatcatcactttttagatggccctttaggatattcatcatctgatagatgcaaaaatgcgttaccgggagccagcagagcacacagggtctaaagacaagtattgcgatttccaccaggaagcagatacccatgcctgggctgtagcacagtccttattggttctcttttcgggttcagaaaattaagaatagacaaattggaacaggctatgaagcccaaacattatactagggaatctggcagaccgagtagttcaagttcttagggtatgctttggactccatttttcctactcagcttacctagaggcacaccttcccctgaaataaatacaaagtccttacctcaggttgtgagaagcttagctgtccgaccactcagactttcctagggattgtttgaagttcaaggatgttccagtcgaaatgggaagaaaggacgtggctttcttcagcagtgttcagttggtttaatattgccaagttgggttaagtgtctgaaaagtactagtgagatcagatgtcagggcccttctattccttccacttatctgcaggtctaccctagagatagcagtggatgcaggcagacagctaatacagaatttgggtagtttcctatataggaagaagattactttcttgttctcacgcctgtgaagaactagtagcaactactttcatacaggttgccagggagagagcccctctagccctagagcagttaccagactgagttcttgggttcagatactcagactttccttcattcttgctggggtcagggagcaaagataaaa

SEQ ID NO: 915114 - DNA, 4001 bp, Homo sapiens
attcattctttattttagttttaattttaggcaatgtaaaaatgcccattttcaaaaagactgtcaaaatttccaagtagaaatatctttctttatccttttccattctttctttctatttatttatttatttattgaaacggagtctctctctgttgctcaggctggagtgcagtggcgcgatctcagctcactgcgacctccgcctcccagggtcaagcaattctcctgcctcagcctcccgagtagctgggattacaggcacccacaactatgccccgctcatttttgtatttttagtagagacccgggttccacacgttggccaggctggtcttgaactccttacctcaggtgatctgcccacctcagcctcccaaagtgcttggattacaggcgtgagctactgcgcctggccacactctttcaatgtaattatttatcattactcaagtaaccaatgtgaaggtcccttaggtctagagtacaaatgcagtcacataactcttattcatttccactaactgctcaaataatcatctacttaataaacaggaagtctaatatatcttctgaaaattcttccctctattagtagtttaagaatctgcttcaaagggagtagtcctcctctgatgctgagaggctattggaatttggtcagtccaaaactactgctgcttctcactgctatgtgatgttaaaatggaaagctaatcccctaccatgtctacttggtaatgtgtcaggacgatgcctaccacagagtgagtctacaacacccattcaaggcttttcccccatctggttatttttataacatgggtttccaaagtcaggatgatgtgtgccaaatgagtttaactcaagatcattgtacacaccagattcacagttgaaaataaaagtaaaatttaaaaaatgtatctatcatctcagagtacagtattgaagaatgagtgagtagagaattttatttggagcaggaatgagtgagtagagaattttatctggaggaggaatggtgagaggcaagccatgatccttccctagagcgtggaatgtgccagcagtatgtattttcccaggaccctcctcaaggcccgcatgacctccttattcctcaggctgtagatgagtggattcagggctggagtgacaattgtgtagaaaacagagatgatgttgtcttgtttggggctgtggaaggaactgggcaagacatacatgaatgtggcagctccatagaacatcccgaccacaatcaggtgggaagagcaggtgacaagggctttcttcctcccctcatttgatggcatacgaagcacagtgaataggactagtgtgtaggaggccacaatggcagaaatggggagcaagaggaaagtcacacctgtcacgtatattataagctcatacctggaggtatcagcacaggccaacttcagcaagggtgggatctcacagagcagatgcctgatttcccaggacacacagaaagggaggtgcatagtgtacatggtatgtcctatagcaatcagggatgccaggatccaggatgtggccaccatgatccagcagactcttgggctcatgagggtcatgtatttcagaggatgacaaatggccacatacctgtcataggccatgaaggccagtaggaggtcctcagcgctacccattgtcagtgccaggaacatctgaagtgcacagcctccaaaggagatagtgttttctctgcgcagaaagtccgcaagggccttgggagtgacaacagatgtgaacaggaggtccatgagagagagctgcccaagcaggaggtacatgggcatgtggagccgggcttctatggtgatggccaggagcagcagaccattgctggtcagtgccaacatgtataggattgtaaatgtagcatagagcagttcaggagacccactgtcattcagaatccccaccaagatgaagccgcttcccaaggtggagttccggagctccatgatgtgtttttttagttgcctagaaccaaatatattatcagtggaagcttttctaaaggtgttcactctagctttggattgttctaggtcactgtgcattggccaataggaatcccataatatgatatattttccatttcttagtatgcctctgatttctgaatgcttttattgaaataaaccatcagctaaactggtatcaggtattttgacatgttgttaatagtaatcatttagaaatcccttcaaataaggtatcctgaagaataagcccaagcaaacatctttgtagatagatgaaagcatctctttcttcacaatgaacaaatatactggggattggtttaagatctagctatttttctgcttaaaatgtagttggaattccaattcagtttttaaaattttatttataaaaaacctctttgctgtcttctcccttaaaccagtctcattgttgttgattactttcctcagtaggagaatctctgggttcttgggctgcttgatcacctggactcttcaagtgctgctctgctggagggaaagagaattctgggctgaatttaacagtcatggcggtatcgattctagaggtaaatctagaggaacagtacaaaaggtgtttgctgagataataagatgttttctcagaaacaggcaggaataaaggcaatacatgagatttgtggtggcatggcaggtgtttgtgtttagggcacatgatacaaggggtgagctacaaaggaggagacattgtagaaacggcccaaagcaatagcgttacctgtgagccacagcaacacacacaaggtgagaagaagatttctccccacaaatcttaggaatacaaggaaaatggtgtttctgctgaaccctgaatccatatgatagctctgctgctaggggttggggaggaggagtggagtgtgaggtccatgtgggacagcgttcacttggctcgctttttgtgaatgcagttttttcacagtcggatggaagacttaggaggccttttggaagagacaaataattcttgatcaaattattcatctttcccttccataatctgcacctacttctccaactatccatttatgtccctatcctggtcaactcagagttagaacctttaagtggtaaggtcatacaaaaacctgacattggaaggcgcatctgatcctgctcctttcattcattcaataaatatttactaaggacctatgatatctcaggcactgcacttgggcaactgtgtagatgtgaaaaatcgatcccacaaacacctacatacatccagtgaaaaaaaaatacatgaaagaaaatacactaggagaacatataagtgagttttcaggaaaggattcaccaaggaagtggtatacagactaaaggctgaggataaataggaggtggctaaatcaaaatgggtcaggatataattaaaaaaaaaaaagtgagggatggtaccgtgaaagtcagaaccttaaaatacagtacatgaatgtcctccttgcacttttgcccagtgaagtctggacaagaaacccccagaaaaataccctgtataaaactgtgtttcaccacgcaatgtagtctaagaattttctcctgccttacaaaatcaaaactataattttaacctaggaaccactgacccactgaccggaaaaccttatttgtctgttgacaacaaaaacacaagtccaaagtcaattctaagcactatttctgctaaatattagatttgaaatgccttcatttttcttgaataaaaagatgaatggacaggtaaataaaaggaggaacataattagctgggcacattcttctagcttcctgcaccagatgtttggacaggatttcaaagagaagaaaaatcagggcttgggtaaggtggtgtaaccaggactcaggatcctacatacctacctcctccctctgatacgggactattgttttcccttctttccatttactgagttctctctggggtcatct

SEQ ID NO: 915115 - DNA, 4001 bp, Homo sapiens
aattttctttgtggtcatgccactaacttgagagacagccagggtcaagtgcttctgtttattttaaattgagggaattgtggggtttttctttctgatttctttgaactatgtaaaaataattacatatgtctagacttgcttccattctggtcctctccttcctgttccttgcctctccttatagataaccatctttatgagttcacattttccctctagttttttcctgaaattttaagcaaactatctcctttcttacaaaaacacttttctgcagcttgctttttttcacttaacacatatcctagagatgatatcatatcagtagagagcttccttatttcctttttattactgcatcatgcatttttatggtttattcaatcagttccctgtatagtgatgaatacgtaacctaatgaatgattgatggtgactcctcgggatagatccctagaagtgatactgctgagtcaaagggtaaatgcatatgtaattttggtaggtattgcggtagtgttataccagtttgcatcctcacaagcaagttataaaagttctgtttttctacatgcatattgtcaaaatattggatttttgctaatctgctaatctgattaagtgaaaaataacatttcagcacaatttaaattcgtattctttttatatagtaaatactcattatttaaaggccactgcatttttttttatttgtctacacatatattttgcccatgtttttattgaaatgtttatttcaatcttctacattctttgtataatatgaatatttgcctttccctgtgatacgttttttatttgttttttgactttgcttttaagaattttttgccatgaagattttttttttattttagtaaaggtttcttgaattactaagtagtaaaattttatacaacaacttaagattccaataaaaattaacattatttcattatcatgtattgagtcctttctctgtgctaagcactgttatttggtgtcctggaagcagagttagctgcatttaaaggtcaaatgctcctgtcacagcctgggtcttgagacatgattttggtgatggctgcctttacatccctgtttctcagcgtgtaaatgagggggttgagaattggtgtgagaatggcatataccacattgcccatgatatggaagtcaaggggcaggtcagccctgtaggccacgtaggctatggcaatagatgagtagtaggtgcccacgaccagaaggtgggagctgcaggtggagaaggcttttgcccgtccttctagggaactgatgcgaagcactgaggccaggatgtggacataggagagaagcaccaggagaagggggaggaaggacaccaccatggcgatgcagaagcccatgagggtctggggggtggtgtcagagcaggaggcctggaccacagccagatgatcacagaagcagtggtagatgtaggcaatgctgttatatgccatctgggaggtccttactactgctgggatgggcaggaggagggcagttagccaggcactggctgccaaggtagcattggtctgtgggttcatgaggacagggtagtgcagtgggtggcagatagccacatagcggtcataggccatgaccaccaggatgaaggcttctgaacatgtaaaactttggaagaggtacatctgcagtaagcaggaagaaaagctgaggaagcggtccccaagcaagaataaggacagcatcttggggacagtggttgtggtgaaaaggatgtccaaggtggagagattgatcagaaagaagtacatgggcttgtggaggctgggctctgccaccacggccaccaggatcagggcattacccatcaggatgagaaggtagaagaggaggaaaataaaaaacacagggaggaagaaggtctctggcagagaggggatgcccaatagatagaagacgggtgagccatccactgattcattacaggctgtggcatccattgtgagacacagctggatttctcagagatgggcagctggaacatctagacattggaaacatctggaaaccatagaaacaaaggattctggagtgataatgctataatgtttactctgtaggtaatataagcagaattatttacaaccaactgtagaggactgatgaggggctatggtattgacttttgccatgtgaacgcaaaatttgtcaaatattgattattaattaattaataaccaaccaaatagaagtctgtatgctttgtttaggtgatgaagtgatcaaattgaagaaggcaggcaaagttcctgtcttcccagagtttatattttactgggaaaatcagatctaaacagttgattgttgaattataattgtgaaagtgctttggaaaggcttcttctggtcttcatcttagtttccatgctgtgtggtttaagttgatgtcagatctcataaatcaagtccttaagctcatgtctctacttttgtactcactcaaagttccatcatgttccattgaggggcttctttctccaaggctgtgtgtactatgcagctgctcacactcttattaagtttctttcttgtatgccttgactagtggttctttctgactccatttaagctaggtgtctggacttctgctcctgtattggatataatagaccatgatagcccaacactttcactgcaatgattagggaaacctggataaattacacaaatcacatttttaaacaaattgaggaatatgggtgccataaggatgagatgaaggcaaactccaatgggtggggaccctccaaagttaactaataatcaccagctcttttgttctctgggaatatttgatttggggaccatgatgtggcttagacttggaccaggcagagagtcatagatgagagaaagagaaaccagtaagacttgtgatagtcaaaaaaggcttacaaaacatactggaaatttgaggcactctaaatgcataacaagttttccctgtgggacatcttctgaattctggctatgcaagggaggctagaaagctgtgctgagggcctctaaaagacaaaacaaaatctcccatgatcccatgatgcttaagagaatagaggaagagggatttcctcacacacacactggtatttcctctcaaaacattttacaaagatttgaagctatgtgtgtatgtagtgggcggggggaaaggagggatggggaatgcggctaacgaattaagctccaaaccaccaaagggtagatgcaaatctcccacactccttccggggtgaggagataaggatcaaccagactatcagcccacaactcaggagggtcataccttaagaacaagaacaaaccaaagttggactaaattttactagaactgaaactcagccctaacctaactcaagccttaactggctttaggtagccagcctaccttactctacctgcctaacaaagagaagggaggaatctgtctgatgagagacatcatctggggcctctgtgaatctaatataaataatattcggtgcacaacacgaattattgcaaaaggcaggaaaatgtgaccaacaatcaagagggaaaatacacaataaaagttgacatacagatgatcccattacctgagttagcaaacaaggactctagtataactatgtttatatattaaagaaaatagaggaaatgttgacaaaatggattttaaaatgggcaatttcaatagaaaattggaatctattttaaaaagaaccaagcaaatattctagaacagaaatatccaatatttgaaattaagaactcactggataggtataatagcaaactggacacaatagaagacaggattagagacctgcaaaatagatcagtagaaaatgtctaaaattaagcccagagatagaagagtatatcttctgtatacttatttgatatttgatacggtatgacttaattgatattaagtgacaggcaaaactaatctatga

SEQ ID NO: 915116 - DNA, 4001 bp, Homo sapiens
accagaaggaagcatatcctccttccgattgctccacgaattactgtccttctccttctatgaaagaaatgcaggatgaaggatagagggtgtgtctatggataaggcccaagaataagaatcttaccatattttttattaatttttaatttacaattgacataattatatatagtttgggaatacagtgtgatgtttcaatgcatggaaacactgtataataatcaaatcagggtaattaccatatccatcactttaagtcttaccatattttagattcacaaagaagagggctacccagcaagtcttctttaataatataagtttattttatccaatatattaaaatattattttattgtcatgccatccatataaaattactaatgacatgatttaaattctattttcatataggtgtgaaaatttgaaatctaatgtgcattttttcttcttttcaacttttattttaaaatcgagggtacacacgcaggtttgttacagaggtatatcatgtgatgctgagatacggagtacaaatgaatccatcacccaggtagtgagtaggtaataggtagtttttttaacccttccccctccctcccataatctagtagtccccaatgtctattgttcccacctttgtcttcatatgtacccaatgtttagttcctacttatgagtgacaacatgaagtatttggttttctgtttttgtgctagttcacttaggataatggtttcaagctgcatctatgtttctgcgaatgacatgatttcattctattctgtggctgcatagtattccatggtgtatatgtacttttgttttcaaagcaggagaaagtttattaaaaagctttagaacagtaaggaaggaaaaggaaaggaggaaaaagaaggaaagtacaacttggaagggggccaagcaggtgacttgagaaaccaagtgtgccaatgtacatttttaaaaatccaatccacctgggttgattccatgtcttcccagcaagtctttgaagtaggaagccaaaaggttctctgagctcactgtcagtgtgagattccaagccttcatgggaaattccttgtggctactttcctcagagctgccttcacatccttgtttctcaggctatagatgaggggattaagcatgggagtcactattgcatagaaaacagacaccgatttttcctgctgtttggaagacttgggtgtcatgtaagtgataattgctgatccataaaaaagtatgaccaccatgaggtgggagccacaggtagaaaatgccttgagactccccacagttgacttcatcttgaccacagttactatgatacggccataggataccagaatcagaaaaacaggtatgaggagaatcacaacccccataagaaaaatggccatctctgatgcatgggtgtctgtggatgctaagatcaatagtgcaggggcctcacaaaagaaatgagcaatgctgttactgcctcggtagggtagcctcagtatgaaggtggtgtctaccacagacaccagaatgccactggtccatgatcctgttgccagctggacacacactttccaggtcatgatgttagggtaacgcagaggattgcagattgcaacatagcgatcataggacatcactgcaagaagggcgcactgggtacacccaaaaatgaggaaaaagagaagtcgagctgcgcaaagtgtgaatgcaatgaccttctttctggaaagcaggtggactagtgcctgaggaactatgttggtagagaaacagaggtcagccagagacaagttgcagagaaaaaaatacatgggtgtgtgaagttgggagtcaacatgaacaagggagattagaagcagatttccaagcacagtgaccaggtagacacccaataatacgataaatagcagctgctcggtgtgtggcccatcagagagtcccagaaggaggaattctgtcacttgtgtctgatttatctgtctcatagtttgttgtccttttcagtaagaagtcactatgtgctaaccatagacaggcatacctataaaattatataattcagaagtgcaggcttaggaactgccccaatttctactgaaaatttcaagaacccccttcataagatgatcatgtttctttcattggaacattttcagtgttgtaaaacaaactttaaaagatgttgcattcattgttgatgtcatctggcaagaatagatttttaaaattatttttctcactctgaataccacacttttaataatacaatattaaatacagactgagttcatctataaagtcctgccatttaatttctgtttgttcttaactaaaacccctgagtcgtaagtgctcttgtcacatctcctcttccccgcttatgataatatagttttctgttgtattttccgtgaaaggacagacacgaaggtataagaaatcagaaagagccaaagtactggtatgttttatttaagaaactaacctgtcttacaggagctgggaaaccaaagattaactcaggatacccttgggaatcctatctgaagcctcagcttgagttctgttcagtctcaactgtgaatgaacttccaacataacagacacaccatcaaaacagaattttcattttaagccaccagcgtgactagtttcatactcagcccaaacagcactactccccagctctctctgctaaaaattatatgcattatctgtccactccccccgcaaaagtaaaagttcctttgaaaatagtttccatgtctttttcacctctgtgtcctttacgagtcatagcagagaacttcatttcataaatgaccataattcattaaacaaataataatttgatcacatagttaagcagagtcatttagaagttttgccaatatccctagagagatttgaaataataatccaattttgtggagctgttccaaaaagaagggaaataaatttactttaaagtgtaaagtttaagatcctatacacgggttgggctatcaatcctttaactgtctggtgaaagtatctcagaataacgttttaaatacatcaaataaaatgtataggattactaaggaaaccagttatatcaaaatacagttatcgaaataattttagaaaacagatttgtaaacagcaatatatgtgcttctttattaatacactaaaattttgaaatgtagtggtgggtctaataaccatcttcatttcaaaataatgatgagtttaaatatttggagatctctccaacaactgcaatacaatataaaaattcttataattactactgctgacaaagtcataaatacttctaatattggtgtgggttggttacttgcattcaaattggaaggaaacatcaactttcagttaggggaaaataaaaataaagaagtaacattttactccaagttgcagaactcacttgggttacaggaatccccaggagatttcttaaaaaaaaaaaaaagacataattacaccctacataatctagtaacagagtctcagcatctggattggtctgtgagtcaaagaaatgaaagatttcaattcctaattggtcttcagactaaagttggaatttggcattgggaggaaggtccctttgcacttctacttaactgtttggtgctttagatttttagcattgctccctgctcactttgcaggcagaaggccttaagcaaacagctcagtccaacatgcatcacctgtatgacaaaatccaatttataacccttccacctttgcccactactggtaagccatggactctacactcctttcctcacttcctgggatttctcctgcaacatcttttctccagacaggaatgtagctgtcctgggccaaagttaccactaacaaccaatctgggaaaagtttgacctaatttcttttctcttctccacttttattttaaccaccagaggaagaagcctgaaaacaatttcaccttactgttttactttaca

SEQ ID NO: 915117 - DNA, 4001 bp, Homo sapiens
tttaaagaaatactctttaggtaaattgggctcattcaaaagaggatgaccaagataatacagggtaccaaagcatattagataaagaaattgtaaagaaactagtgggcagttggcagagacaattgaatttgggcaaatacagaaattgacctcagtatgttctagtattgaagaataatgacaattgctctaggactaaaactagagaaactagattgaagatacaggaaaactgattttgacttatcatgaggaagatctctataatagtaaaaactacctttatatgaaagagagtggcccgagtaaggagctgtgtcattcctggttaggcaaatgctgaacaattatttgatgagatattatgaaataatttaagcctcagatatgtggttggattattttactattgaattccctttttactctgatagtctatgcttacacgaaatttgaggtgattatataaaattttggggggttttcaggagagatcatgaagaactaggaagtattatttcctctggtaccttttcacaagctgaagtgctctaggatctaatgaacccagtattaaagactcttacagatattttaattgttttaatcagagcctattctaaggtttgtatgctgaagacatacaaacttgagatatctttgatgttagaattatgcttgcaatttgtattagctgttatttcagaataatctggttgaaacctcctagattcaattgtgactgtgcttaaaacatgccatggcagctgaattaactacaaactcctcacagtagcacccaacaccttttacaatcaagaaatgacctaacttttcatgcttttattttttccctatgttctagtttagattgtagtattcacagtttttagaacatgttcattttcacacttcttcctgaaataacctaattcataattgcctactaaaatcttgctcctttttaaagaatgttgccatagctctaaaagtcagactcagaggtcactgcctatgagagaagcactttctcccaactagtttcctgagagcccctttgacatctttgttcctcaagctataaattatggggttcaacattggagtcaccgctgtatagaacacagatatcattttatccagttcttttgtagtcttggagtttggtcgcatgtaggtgaatattcctgacccatagaagaggacaacaacaataagatgggagccacaggtggaaaaagccttgagtctcccttccccagactgcatctggataacagtggagataatattccaataagaaccaagaatcagggagacaggggccaggaggattaccacgcccattgaaaagatggccatttctgtgctgtaagtgtctatggaagccagcttcaggagggcaggaggttcacaaaagtagtgattgattatattctgtccccagtagggaagatggaaagtaaagctggtatctactaaagacactagtgccccactggcccaggacctgaaggacagccagagacacacccgttgtgtcatgatggtagagtagtacaggggcttgcagacagccacataccggtcataggacatcactgccagcagcgcacactctgtacacccaaccagaagaaagacaattatctgtgtcatacacccataaaaagaaatggttttcctctttaccaagaagtgaaccaacacttgagggacaatgctagtagagaaacagagatctgcaaaggagagatttctaagaaaaaaatacatgggagtgtgaaggcgagaatccaggaagatgagaatgatgatgagctggtttccaagcacggtcagcagataaatgatgaggaaaaggataaatagcaggatctgggtctgcaagtcctgtgaaagacccaggaagataaacttggacacaaaggtttggttttcttctcccattgatatttttgcctgtttacctgtttggcacaagaaaaaagaacacatttttttgggtctgtgacatcaagtcttgtagaagagggtcatgttaaaactgacacctagttgagtatttctagctctttgctatctagcttgttctaattaacaataaatatatatatttattattattagttggttgcaatttaaaccaacttagttattttccaagtcctctctccacagtgccgctttttaatagataaagtatgatactgtgaaagccctcttggctagttctgatgtaaggatgttagagttcatgtggattttactaactggctataaatatactgttaggaaatgactgtatatactgttaggactatccttatgcagaaaactctaccactaactatttaaaatacgacatatttaattataacacatacttcaaaactgtgaagcagttttcaggaatcaaacttaatttgacctattaagaagcaacagacttttgctggatttaaaagtaaagccttagctatactacactaaaggccaaactatttggattaagaaataagatattaaaattaaagcaatacaaaaagaaaaaataagttaaaattgttgtgatacttggataggaccagacttgaaaaacacaaatactttctaagaaaccatggagaaaaatatatgcagaatttgccacacaaatggaaagacttctgtgagataatagtatcataagataagccacaaactgagaaaaatattggagagaggtatcagaaaaaaaatttaaataattttatttttcttcaacttttatttcagaattaaggtacacatgcaggtttgttacaaagtttggagtacaaatgctaaggtttggtgtacaaatcaatctgccacccaagtagtgagcatagtacccaagaagtagtttttcagccgtttacccccttactctccccactctagtcatccccagagtctgtcgttcccatctttatgtcaatgtgtacccaatgtttagctcccacttacaagtaagaacatgtgatatttggtttcctgttcctgcattagttcgcttaggataatggctttgagctgcattcatgttgctgtgaagaacatgatttcattctttttcatggctgcataatattccattgtgtatatgttccacattttctttatccagtccaccactgatgggcacctgggttgattccatgtcttttttattgtgaatagtgctgtgatgaacatataattgtgtgtgtctttttggtggaatgatttattttcctttgggtgtatatacagcagtgggattgttggatcaaatattactttaattcttagttccttgagaagtccctaaactgctctccacagtggctgcactaatttaccttctactaacagcgtattagtgttcccttttttctgcagcctcaccatcatatgttatttcttgactttttgatgaaagccattctgattggtgaaagatggtatatcagtaacagacccacagccaacatcttactgaatgggcaaaagctggaaccattctgactgagaactggaacaagacaaggatacccactcttaccactcatattcaatatagtactagaagagaaaaaaatgaaaggcatccaaataggaaaagaagtcaaattaaatgacctgattacattaagagtttgtagaaagctatatgaaaattgtgaagtccaagaaataatgggccaaagatatgaacagactatttaaaagaagaaatacaaatagctactaaatataagaaaaatattcaatattattataactcaataattaaaacaatgaaagataaattttcacttgcgtaattatctaagattttaacaccaaaaccttaacaaaaaataactagtatattcattaagcattgaacccataacagcattaattttagggttttatattattatatcttcccaataacattatgaggtaaattaaaatactattaattttgtcttatagataaggaaact

SEQ ID NO: 915118 - DNA, 4001 bp, Homo sapiens
gaaagctacttattgtgtaaagcaaaacaatccgtttgaaaaatgtttgacattcattgtgtgtgtgcgtgtttttaaagtgcacccagagagtttaatgtgggtagattctgtggaatctactgttatatatgagtggcttaagcacctatttcagctattgggggaggtcaattgatctaggtatacagaatgagattaaacaatttttctgttcaaaaactggtcaaattatacaaaaacaactatatgctatctggacatcctaactccatcacagtatgaaattaacaaagtttatttctcattgatttatcctcagctatcaacatatctatgaaactttaaattcattaatttcaccaagacatttatttgtactgttagattaacattcttttaacaatctaaattttcacgtttaatatatcattctcttggatgaaagggaacaaattttcttagatcacatttatatgtgccaggaagatatcacagaccataaagaagaatagatttttgatgttaccacacacaaaaaatcaatgttggggaggtgacagatatattcattagactgatgaaatctttctataatgtatacatagatcagaacatcacattgtactccataaatatacccaattattgacaatttaaaatacataaaaaagaaaaataaataaatgatttttaaataaaaaagagcttgaaataaaactaaatattgttatcaaccaaagaatcttaacacagtatgattacaaaaacagtacacactgttaaacctatgcaattttcttggtctgtaatgggtgtaacatattacacctagacaaatattaatttatatgactgcttcagaataagtaagctaaaaaactaaaaggaaatgataacagaaatgtaatcagataggatagtgaaattgttccttgcttctgtgaaagaatgaatgtcacattctcatgagtgatacagccatttcccagctaagcttacttttttactccaaagtttcctcatggcacttttcatttctgcattcttcagggtatagattagtgggttcagcatgggagttataaaagttagaactacagtcatggatttatcaatgggaaaagtagaattgggccttgcatacaagaagatacaggggacaaagaataaaatgaccacagtgacgtgggatgcacaggtgtagaaagcttttcgtttcccttccaaactctgagtcttaagagagtgtaatatgaccccataggaaagcaggatagtgaagaaggtgacagcacaaatcgctcctccattagctatcatagaaagcccagtgacataggtattggtgcaagcaagtttcaataagggatacaaatcacacaggaagttgtcaatgacattgggtccacagaaagggagctgataaataaagagaaattgaaccaatgagtgaagaaagcctccaatccaggccgccaacagcataagaacacagactcgacgattcatggtgatcaattcatgaagaggcttacagatggccatgtatcgatcataggccattaccaccagaagaatgacttcagcaccagcaaataaatgatccataaaaagttgagccatacaaccctgaaaggaaatggtctttttctcagagagcaagtcaacaatcattttgggagcaaatgcagtagaatagacggtatctatgaatgataaagaagccagaaaaaagtacatgggggaacccagggactggctggccatgatggtcactatgataagcaggttgcccattatcgtcaccatgtagattagtaagaatgtgacaaataaaaccttttgcccctcagggttctgtgtgagccctaagaggataaattcagtcacattgttcttatttttcatgtgttcttctgaaggtgttggactcaggtgtcggagcctacaaacaaaagggtcagtgataaatttgagattatttgtcagaagctccatgtcaaaaatgtgatgccttatcgaccacgttttccctgaccagggcctcacacagagcagctcattagaaaagaagtgtttagaatatcctcccacaattatccttttcatttttacaaatgggacatggatgaagcgggaaaccatcattctcagcaaactatcacaagaacagaaaacaaaacactgcatgttctcattcataagtgggagttgaacaaggagaacacatggacacagggaggggaacatcacacaccggggcctgttggggagtggggagctaggggagtgatagcattaggagaaatacgctatgcaggtgatgggttgattggtgcagcaaatcagcatggcacatgtgtacctatgtaacaaagctgcacattctgcacatatactccagaacttaaagtataattttaaaaaaagaattttaaaaaatacaaatgtattgctttaactgcaatgatgaggcttcatgattttaactggaaggtatatgtgagtgaatatatatgtgagataatctattacagatcaaaatagagctgctttcttgagaacatcccttaaaaagactgtatttttgatatttatatagtatttatctttttttgaacagattttgtccttccatgatctatcaagaaaacagcctcatatgtgttgactttacttatatatttatgtaaagtagtacccagtatatggagcataagattacaggctaatgtttagatatttgccattctgaaacactgtactgtgagctcctagaatccaggaataactcgctcaaagaaccagacacattgtgagtgctcactaaatgtttattaaattttattaaaccaaatttcaaagctcagagagcaagtatgtggaaataaatgtattaaaatcttgccagccatgaaagtccaatgaaagcaaagttttatttgaaaagaaactacacacacacacacacatatacacacacacacacactgaattttcatctattacaacgtaggtcattagaggaaaaaaacaggtaatacaaatcaaagtcggggggcaatgcagagacattttccccacttttcgcatttgtttaagactgatcatggctaattacagattaatttggaatgtcaaaaataaagactccaggcaaaatcatggtgtagtagaaataattctatactaaaaatctgaaaatattagttgattttgagcttagtcatctcaggaaaatcacatcccaccttataattccttactggaaatgtaatgatccttccagataaatgagtttctggattcttatcattgacacctgtatcctagacaacatgatgacatttttgctggtagaccatttttatataaaccaggtttagtatgtgctaaaggttatttaattattaaagtaattaatacataagggttttttcatattattagttcttggttattggaatttatgtcaaatacaaaatattcattctcacttgagtaaaataaatcaaataatctgttgggcctttcagatgtgatccaggcccaattttatgtgtcatatacacaagtttgtattagcaggattattttaaatatgctctgtgttagtgatgatcatttgtgatagtcaggagattattctatctatgcatcaaagcaagccaagacatctttaaggatcagagggagagtaaaagtgtagacataaataaaataagagataacttagtaaaggcatatggaaataagtaaaggccacaagctgaatgaaatattggtaagcattttgggtgagggaactgaattagttgagagcagaagaatatcagattcccagagctgtcaatcaggaggtggccagaaaggtaactcagcatcagtatcagcacttgcttctaggaatctttatacatttgggccaaagaaaaataagaaaatcagattttaaactttagggtaggtcagtaggtaagattagcttccttggaagt

SEQ ID NO: 915119 - DNA, 4001 bp, Homo sapiens
ttttaaatttttatttattttttatttttttttcacggttcctttctctttatttatttatttatttatctatttatttattttttattattctactttaagttttagggtacatgtgcacattgtgcaggttagttacatatgtatacatgtgccatgctggtgtgctgcacccactaactcatcatctagcattaggtatatctcccaatgctatccctcccccctgatggagtctcactctgtcacacaggctgaagtgccatggcacaatcttgccccactgaaagctccacctcccgggttcaagcagttctctgcctcagcctcccaaatagctgggattacagatgcctgccaccaatccccagtaatttttgtatttttagtacagatggggtttcaccatcgtggctgggctggtcttgaactcctgaccttgtgatccacctgcctcggcctcccaaagtcctacgattgcaagtgtgagccactgcacctagccaatcctgtctttcattaaagacaatatcatctgtcatccaaatatcctgaactggaaatgcatagacatgacttgcggaatggaagcaaccttaaaacaaaattaataacacagaaagctgctttactaatagaataataaaaaaataagatttaaaaacaactctcttttccccagaaatctgttttaagtattagccaaattgctttctcatgaatttgggtaaaagtacatctacagaagtggcttgtgttttctcttttgaaaataatcaataactttaagtcctaattcaatataaactgagaaaaataaagttacaaggtgagcttggttttatttttacttgtaccaagaccttttattcagtacctgtgattttattcattctccaaatttctctttagatttattctagtctcagtggataatttatactacttttctgatggctttatgtagatagagagaagcatccctacagaatctgttgaattgactgcagtattttaccgcctatttgttgccttagaactaggaataaatatgttcagtgtgggagatactctttttctaactatacttaacttttcacaccagagatttttcatagcatttttcatctctgattgtctcaacgagtatattaaaggattcaacatgagtgtgataattgaataaaacacagtcattaatttatcaaagggaaagttggaaacgggtctaacatacataaaaatacagggaacaaaaacgagggcaaccacaatgatgtgggagatgcaggtaggcagggctttatgcctctcttcctgactgtaagttttaaggaagtttaggatgactccacaggagattagcagaaaggtaaagatgaccatacaaattattccaccattggcaaccacagtgagtcctataaagtaggtgtcaaggcacaacagttccaacaatgggtacatgtcacagacagagtggtcaataacattggggccacagattggtagactgtacagaaagacaatttgaaccacagagtgcacaaaacctccaatcatggccaccaccaacagaaggatgcaaaccagtcgattcatgatgttcaaatagtgcagcggcttagagatagccacatagcgatcataggccatcaccaccaaaaggaagacctctgcaccaccaagtaagtgttctatgaagagctgacccatgcaagctgacaaggaaatagcgattttatcacagagtaagtctatcatcaatttgggtgacatggcagtggaatatatggcatccataagtgacaagtaggcaaggaagaagtacattagggagcccaaggaggggctgccaatagtagtcacccaaatgaggaggtttcccaccattgtcacaatgtatatgagtaaaaacatgacaaataatgtttttttcacatcaggatcttgagtgaggcccaggaggacaaattctgtaacattgctgcttggtctcatttactcttctttcaagcttatatcagaaatgagagctcaggagaacagggactgtaatgaaatagtgaacagaaaaataaatacatccattatgtcacagagcacatctacatcgttatatcttccacggccatttatactcaataaacgtttactaagtctctattgagttcctcatccaaactgtccaataggccttcccttgaaaattctatatccctcagaagattttgttttcagccaacagataaatgatctaactctaagtcttagtgggtattctgtacaggaaaatagttaaaagtgcaactatcattcatactttaataacttcttatttaaaacatattacttttttgcaccccaatcagctttgatggacaggaaacagtctcccactctcaagaaacttactcttataaacttgttatgagttaatgagcgcagcacaccaacatggcacatgtatacatatgtaactaacctgcacgttgtgcacatgtaccctaaaacttaaagtataataaaaaaagttataaacttgcaataactaaattagcatagactcagtccttcacatttgtagtagttgcagggactttacaatatgacctgtgtagcaacaaaattaaccatcttctgaaatatctcacatagtactataacattccactgttaaacattcagacctccatgtctcaaaaaaataaacagttttctttaatctctcattaaatttcaagatactggacttttaccagtataaataaccacaaaatctctgactgttcgagttctagggagtttccattacatccttgcctataccacaattccaaacacatttactattctaatttcagcatagttttaaactgaactaaactaactcatccctgtcaccagctattacatcagcaactagagggtttttttgtttgcttttttggcagaactcatacagtgaactggatagtgagagaggagaaaatatacaatgaaaagagaggtaaaaaatggtgaaacatagttttatttataatgttgttcaggtactaagagtgctcaaaaatacaacctcagcatccagactaaaaacaaaaaaatactgaaggataaattccaagttcaatgtaagaaagcatgggttgagtcattttctttccttctttttttgagatggagtctcactctgtcatccaggctggagtgcagtggtatgatcttggctcattgcaacctccacctcgtgggttcaagtgattttcctgcctcagcctcctgagtagctaggactacaggtgcgtgccaccacactcagctaatttttgtatctttaacagagacagggtttcatcatgttagtcaggatggtcttgatctcctgaccttgtgatatgggagtgacagtaaatatcagtgtctagtgtgattcatcagtctagccaaaatacagagtttgaagtaataaggcaagttccttggaacaacttggtccatgaccaacagagacattttagaaacattaccaaatataacatctctttcacatcctagtaacacaaagaagtaacaataactctgggagatttataatgggaagttactcacacaatgccatggaaacccaataaccttaatgcccagttgttttcagaagtgtctactatgggaagttatgcacactggagactcccacagaagcctaattctgccaccctaggatgaaaactggcattttggattcaatattcctaatacactggccagatgagggcaatttgaaagacaactactgagaagtgcttgaactttcacagagacacagattaattcattatgagtgtcctcgatgtcatggtgacattagagggccagttaaaaaagcatagcatggcatgacaacgtttcttaataaaattgaaagagcatatgtagaaatgttcaagggggtggctctgataaatatatcatatttataagtataaatttcagaacaa

SEQ ID NO: 915120 - DNA, 4001 bp, Homo sapiens
tcttaggtaaacttcaaaggcagcctaggacacaaggcctgcaattcctaggcaagtcctagtgctgggttggacttagagccagtgcaataggggagcacatgacctacggagacaccagccagggctgccaagggagtgcttctgccacccctcccctgaccccaggcagtgcagcttgcagcaacaaaagtgactccttccttctgcttgaggagaggagagtgaattgtgaagagtaaagagggctttgtcttgcatcctggatgcaactaactgaccacagtaggataggggactgggaagagttatgaggcccacatcctaggccctagctcccttctatgtgaagtagcaagcttctgtacatagagaaaatcacacacatatatttaaatatatttacatttaaagattattacctgaaacatcttaagaaatggataatagtgactttctctgttgaagagaactaggagactgcactcagacatggacaagagatttatttctcattttatattattttgtacagtttccatttttactatttatgattatccatttggctttcaattcttcttttaaaaggtagaaatattacattaaaaatctgtatacagtacaagttcaattggatgaaaaggactgcattgatataaaatataccattaactattttaaatagtataagaagaacaatgaacttaaggacaagaatctaactaaaaatgaaattaagtctcagaaagaaaggcaaaaacatacaggcataacttgattaaaaatcaatgtaactctaaaatttcttaactaattcactacatattattgcctccttgctttatgcattacacctttacagataaaatggaaaacaagacattatagatcttacattctagcagagagatcaactgttattaataacacaatcatactgttcattctttaataataattgtaaattctttgaagaaagggaagatggcatcagatttaaaaaaactcctgggtcccaaggagaaaggctgtaaagtcaaatgactctcttcctggtgggtaactcacttatgtactacttgatatgaggtctcttctccagagcttcttcatagcacttgtcatctcagaatttctcagagtgtagattaaggggttcagcattggggttatgactgtataaaacacactcactgatttgtcaatggggaaggtcctagcaggtctagcatacataaaaatacaaggaacaaagaagaagacaaccacagtcatgtgggaactgcaggttgagagggctttttgcctccctttctgactaaggttctttaaagagtgcaagatgacaccataagagatgagtaagagcagaaacacaatagtgcaagccagtcctccattggccaccactaagaggccaatagcatgggtgtcagtgcagaccagtttcaataagggatacatgtcacagaaaaaatgatcaatgacattggggccacagaatgggagcccataaataatgctaagttgaaatactgagtgcagaaatcctccaacccaggacactaccagcagcacaacacacacccattgtctcatgataaccaaataatgcaagggcttacagatggccacatagcagtcataggccatcaccaacaggagaaagacctctgacccaccgaaaatgtgctcgataaagagctgggccatgcaagattggaaggatatggaattattcccaaagaacaagcctgaaatcaatctgggggaaatggatgaagaataaatgatatctataaatgataagccagcaagaaagaagtacattggtgagcccagggtctcactgacagttacggtcactacaatgagcaggttgcccaccatggtcaaaatgtagaagagcaagaacataacaaaaagtactttctgctcctttggattctgtgtgaagcccaagaggacaaagtcagtcacatttttccttggctccatgtattctttacagctgcttacttcagatcatataagcagtttacctataaaacaaggggggaaatctttaaatgcattatgattttaatattgtatttactcattcaattaaaaatgtgtatgcagcatctatgtcaaatctgtcatagactttggaattgccaagttgaaaaagacacaattttgtactctcagtgatttggtaaataaaataccaaagggaataaattaaataccaattaaataggtgtcataataaatatattgacattattgtaagggttcacagtgctaaaacactaaatcaaactaggatcaggaaagacttttcagagaaagcaatgtcttagctgagatataaaggaaaggtgataattaactacaagagaggatgggaagggaattccacataaagatgcatcctgtataaattcacagatgtataatactcgagaaaccacttaaggtaacttacattttcaaactgggaagagctaattatgaatggatctttgtatgtgactaccaactgacatgttcaattgataccaatttttaattttcccgatcaacccatttcttccttattttcatttcattaaatgttgctacctaccacgttattgtttaaactaaaaattttacaatctatttcacttctctatttctttcatattatttatcagtatatttttttcaaaccctgttaactcttccttcaaaatatcccaattggatccttctcactaccatcttgttaccccctggcctactctaatagccccctgcaaagtctctccactcatcttctggcctctaataatgttccttcatgaagtagcccaaatgatctttcgaaaatcttattaatatcataccactcctctactcaaaaaccccatggtggatttctattctgcactcaataaaatgcaatctttctaccttggcctacaagaccctagatgacctggatccaggctacctccccaaatccatcccttacaattgtccacatttatcctgctccagacagttttgatattcaccaaatatacaatgtgcttttccatatccttaatttaatctattttttgtggacacttatttcagagattagaagccacttacttctaaaataatggtcaatattgtggaaatgtgtattgtaagtataatcttttatttattcattcaattgaaaaatgtttatatgacacctacattgtgttatgcctctcaaataaagtagactcccagccatcagagaatgttcacaaactcattcagggttagggtttaggccagaagtgattatcagaggagaaatattagtgctaaccaaggaatcttcttttcaccattagtcacctacttttccaaacagaattatacctcctgaggtgaaaagatacataataactctattttaatctattaatgataaatagtatataaatactggccaagaactttctaattttcttctcaatgatactgaactttccctgaggaagtctccattgagctagttgacttatctctaatcaacagccttattttagatgctgtgaaaaccaaaagccttatttactgggcttttacataaaccatatgtttaatatgcatgtagaaaatgcttcatttttctcaaagtgtctataacactctggttttagaaaataatttaggtagaaagtgatagatgatgatgaagaagatagataatagatagacaactattttatgagaaatatctaaaccagtaaataaatttttctaacacttgctgtaagatatcaaatgctaatcagtactctgtgtcatattttgtaaatgaaatcatcatataagtttattgagtttttttgagtacctaatgagttaataaaaaaatatgggagcatatgtagtaccatgcttgtatcaatatggataaagtatctggaagtctttgctgagcatcttttggtgctgctgagattattccactgatgggg

SEQ ID NO: 915121 - DNA, 4001 bp, Homo sapiens
gaaaaaccaaacaccacactgtctcactcataggtgggaattgaacaatgagaacacatggacacaggaaggggaacatcacacaccggggactgttatgggatggagggagtggggagggataccattagggatatacctaatgttaaatgacgagttaatgggtgcagcacaccaatggtgcatgtatacatatgtaccaaacatgcacattgtgcacatgtaccctaaaacttaaagtataaaaaaataaataaataaataaagaacaccagtgaaaagattaaccattacatattcgacataatttacaagaaacataaaagaacaagaaattgttggtttcaaacataaaagtggttcccctttccactgtctgcaagagctaagtactctaaacccaagaaaggtcatcaaaataaatgtcatttgaaagttatggatgttatgacacttagaaagactacagaaaaatttaacggtgtgtctcataagtaccttaaactagagaatcataattctaagattcttaaagtgttatatgactgcatatagagtttcagcccaagtctgggatggaccagtttcaaagatatttttgagtatggtccttgtatattccacaaaatctttaaaaacttacactaagggaagcatcacagccttcccttctgaacaggggcatccattttattacctattcctctctttctccattgtgtgctgagaatgtggaggaaataccctgtctcaaagatctgtaaatagtaaaagccataatttaaaatgtgcacagtaaaacccgcccccaaggagccccatccacactcagtctcgatgtagaagttgagatcttgaacttcaatcagatgtcatgatgggatgactttgtaattgagctaggagcatccaaatcctgtcttctttctttgggatccttgacttgcccttagaaacctgaaaacttcactgggaagaccttgactacatacctccttacctacatgaggacggacactcctcctataataaatatagttaactttttacccaagagtttttctatagcatttctcatctctgaatttctcaacgtatatattaaaggactcagcatgtgtgtgataatggtataaaacacagtcatgaacttatcagtaggaaagtttgaaacaggtctaacatatatgaaaatacagggtacaaaaaagaggacaacaacggtactgccggagctgcaggtagacaaggctttacccctcttttcctgactgtaagttttaagggagcttaggatgactccataggagattaacagaaggttgaaaatgaccatacagattgctccactattgacaacaacagtgaggcctataaagtaggtgtcagtgcatgccagttccagtaatgggtgcatgtcacaactgaaatgaacaatgacattgggaccacagaaagggagactgtacacaacaatttgaaacgcagaatgtacaaaacctccaatcatggccaccaccaacagaaggaagcaaacctgtcgattcatgatggtcaaatagtgcagtggcttacagatggccacatagcgatcacaggccatcaccaccagaaggaagacctcagccccaccaaagaaatggtctataaatagctggcccatgcaaccttggaaggaaatagtctttttatcacagaataagcctacaattaacttgggagaaatggtagtggaatatgcagcatctataaatgacaggcaggcaaggaagaaatacattggggaacccaaggaagggctggcaataatatccaccacaatgagcaggttccccaccactgtcaccaagtatgtgagtaaaaacatgacaaataatgctttttgcacaccaggatcctgagaaaagcccaggaggacaaattctgtaatattgttattctgtctcatttactcttctttaaggcttgtatcagaggtgagagctcagggaaacagggcctgtaacgaaatagtgatcaggaatatgattacatccattgtgtcacagggcacatcttcattgctgtatcctgaatagtgatttacacataataaatatttagtaagtctctattgagttcctcacccaaagagcccatcttgccctgatgattctatttctcctcaaatattttagtttcagtgcacaggtaaaggcttctacctctaagttttagtgaatattctatatagaagaacagttaaagtcccaacagccatttgtacatttcataatttctgatttaaaacattttattggcatggaagtcagctgtgatgaataggcaatgggtccttcatctcaagaaacttactctctggtggtggtaataaactctaaataaataaattgacatagatttagtcctttatgtttgtacttgtggtatctttgtaatataatctgtatagcaccaagaataatctcttctggaatatctcactcagtactctgaccttctactgctagaacttcattccttcatgcctcaaaggatgttcattagtctttcattaaatgtcaaaagacaagactctgaactgtataaatgctatgacattatttatcacattgttccttgtagcaattacttgatgtgactctctgttctctttataaggatctgtgattctgtccattttatccttgcctgtacacaaatttttacaacacatatatacaatatcctaattttcagcaattaattttgaactcaagtgaactaactcatgactgtcactaactaccgaataagcagttagtacttttttctgaattcttgggaggagctagttagtgagatagaagaaaatagacactgtagaaagagggacatggttttattcataacacaatttagataccaagagtactcaaaaatgtaatcttagttacaagatttcaaaaagaatcatactctaagagaaattccaagttcagtgtaagaaggcacggatttgattctgaatacatttacaagtctgcctcagtttgctcactggaaaacaatgggattaaatttgagaaattcagaatcctttctagtcaattatctacagaactattcatgcacctctcttttatgatattctgctgacaatttgtttttcattttttataaatttataattaaataaaaatttccaagctcatgacgtttacatgaaaaatggtagtcagtgggacatggggtttcatgattacagtgaataaatagtgactatacgtgtctcattcagcatgtacctatttaagatccaagacatctttggagagaaagtgtagcatgtggtgaataatgtggacactggagccacactgcttcagctacaacctcaagttcaccactttttatgagagtttgggccatttactaaagctctctatcccttacttgcatcatttttaaaatgaggagtccaacaacccttacctattagagttgtcgttttattaaaacaaagtaaagtgcctagaacactggctggcacctgggaaggactcaataaatgatagctattattactgtttttgaatgcttcactgtgaacacagaatcagaacaaattattcagatctctgtcaacttgaaaagatttatagacgtagtccaggaaaaaaaaaggataagatacgtacaattcaggaaagcctgttatggccaaacaataaaactctatgtcttagaaaataatgatttaattatgtgagtagtaattttacctgtgatggaacgtatcttagtgaaaagcaagcagaagtatagtaaaaatttggacccaccatcagagggagctcagggaatgaaaagaagactaaaataagaaaacagagaaatcatagttaacaaatgagtatccacaagcaataagaaggttaatgggacaattaagtaattaagtgagattattattcttttaaaattctcttcagaaagattccttttagtgagaaaatgct

SEQ ID NO: 915122 - DNA, 4001 bp, Homo sapiens
gatgctgagaagttaaccaaaagtgcagacacagacgatctcatctcccttcaccaagaaatactaataggcattaaaagaaatggccttgcatggtcacttagaacaagggacagggtctggagtagaagtatgcttggacagtatcactctccccttcattctttaagttaggcctaataagcattttctaacattttgtatttttcacatctggataagactaacaatgtttttgtgaaacactgtatttgtgaaaatatttgacttgatctttccatagtgataagtagaatctatgtcattttgatattatttttttacaaatgttggacattgtgagaaagaccagacagatttaaggaccatctcttgtgaaaacatatcacaagaactaaaaatgctccagggacttttctggggcttatggtcagatggtccatggtacaagataccaggagccaaccagaagaaaagaaaagtccctggatgtaattttcaaagacatacttgtcaacattgtagatcagattggtgccctccttcctaaatattccctgataattcctctggttggtttccttttttaatgaaatagagtttgttatcatgagggagtttgaacaaagaggggagaaagaatgaaggaagaaaagaaggaagggagggaggaaggaggaagagcaaaagggagaaagaaaagaagtgaggaagggaggaggtaacaggaagaagtgacttaatctaaaaaacatttatcaacatgttctcctttgcatttgcacttggtttgaggcttcatattacccaagcccatgatattgttggatatcatgaagccaatcaagttctctaagactctgcgagactatctgacctctgtccttcaaacattacaccagcataccaagtgtctttggctactaagcagaatcacagcagcagtatcattaagcctttatatttgtttctgtcattcttgaatatcccactaaaatcaaaatccatttcaagaacagagagtaatcagacatacattttgtatcactttttcatccctaagctcttttttcactccctccctggattctcctttttgctccacaatcttcttatggcgattttcacctctgcattcctgagtgtgtaaatgatggggttcagcatgggggtgatgaccgtgtagaatacagccacaagtttatcttcagtgaaagtggaagaaggtcgcatgtagaggaagatagcaggtccaaaaaacaagatgaccactgtgatgtgagaagcacaggtggagagggctttgtgcctcccctctgcagaatggttcctcaagttgaccagaatgacaatataagaggacaccaagatgaggaaggagaagacagagaataatccactgttggccaacacaataaccccctccatgaaggtgtcagtgcaggcaagcttgaataaaggctggaggtcacagaaatagtggtcaatcacattgggaccacagaagggcaattggatgataacgagaatctgaattatggagtgacaaaagccccccagccaggaaccagccaccagaaggtgacacagttgacgactgataatgttcatataatgaagaggcttgcaaatggccacgtagcaatcataggccatcaccacaatcaaaaggatctcagcaaccccaaagaagtggaagaagaatatctgagtcagacagccttccagagagatggttttaatcttggcaagtaagtctatgatgaatttaggggcgatagtggaggaataactgatctccaccaaggacaggcagctaaggaagaagtacatgggagaatccagactcttgctgatactgaccgtcagaacgatgaggccattgcccaccaccgtggcaaggtacacggggagaaacaccacaaagcatacactctgcacagctggatcctggaaaaggccagtgaaaatcaactcagtcacattacttgtactggccatggattccactcagagaagacagatctcagagaagagccctgtgacaaagcacatgcaatcataacgctaatccttcatgtttatttagcacttgcttgttaataaaacccttttatgcatattttctgactcatttgtttatttatttatatagtcaatgtttattcatttggtgctcaatagcctaccctatgcaagacactggtcaagcagccccacaaaaactctatgatccccatataacaagtaagaaaactgaggctcagagaatttgtgaattagccaagcctcccaggtcatattattccaactcatacattactttaagtaaaaaaaattaccgctttcagcatgaaaaccatttatattaattactaacatttctcctattctccattttctctggtcatgtctttgtgttagagattgtatagtgaccttctgctcctgactcttttgtttcctccatttatttactccccagaaatgccaatctaagtgaaacatctccattttagggaatatctttgatgttttcattacatgaactatgtaagtttctgaattctttcagaccctatggtttttgcccagtcctatagcttcatgaattttacaaccattttgagaaaatgttggcagctgagagctaagtgaacatccagaagttgtttggagaatagctccctatcaaacaatagtttgaatataacatatggacaacaccactttgcttgtttctgtcttccagtttgcttgccattagcaaacatttttgtcagcagaaggtgcaggatttcttttaaaataactctttaaaccaaagattttattaagtacctaccacaggcctaggcaactcaggacataggaaaggagaatggaacatggttctagcctgaagaggcttgtaacttcaaatgattaaacaacacatttatgaaaagaaggagagaaaaacttcaagattttctctgctttcaaaactatgttgaagtatctcgggccgggagcagtggctcaggcctgtaatcccagcactttaggaggccgaggtgggtggatcaactgaggtcaggagttcaagatcggcctggccaacatggtgaaaccccatctctactaaaaatacaaaaattaaccgggcatgctggtgggcacctgtaatcccacctactcaggaggctgagacaggataatcacttgaacccgggaggtggaggttgcagtgagccaagatctcaccattgcactccagcctgggtgacaagagcaaaactccgtctcaaaaaatattaaataaaataaaattattttgaagtatctcttattcaccttacttttccttcttccacttgtgcttccatttgaaaatattcaatactttttcctccccaatttctctcatagtgaaaatttgaagagaaacacaaggtaaaaatctgctgaaagatgctcagtaaggagcttggctaaaactggagatgaagtggagtattaattggtgaagaaaaaaaaaagaggtacccaagaaaacaactgaaagggaaagagaaagcaagatgggactctcttaccggtgtagaggaatagaaataagggaagcttcaaaaacaacacaagaaggctgccaaggggtctggtggcctggaggaactagagcatcttgttagctcatgtttgccatcatgtggttgttaggatgatgatgaagatggtgaacatggtggttaccagatgtttaccatcttcattgtcattgtcttcctaacaaccacaacaactgcagatgctgctgctgtgtattccgggtctactgtgtgctagactgtgataagcatcttacagtcatcccctcatttaattcttcctgtacctctttgaggtagctaattattagatgagagaaatgaggcttacagaagtttagtaacttgtccaaagaaacatagcttgcgagtgtttgagccatagctgaaaccgagcctatgtaaataagg

SEQ ID NO: 915123 - DNA, 4001 bp, Homo sapiens
gaaacagatgaatattaaaagtccataatatgaatatctaaagtgccgctttttatctgctgtcctcactctgggcatgaaaattccattgccaattctaacttgtgattctatgcagccccaattattaggacagaataaatagagatgtaacttcctatagcagtagtgggttccctgtttagggagaacccactagagacaagtgtcctgagtgttttctgaattcctgtgataattttatttatttcattgacatcacccaactttaaacacaatagatcataccatttttggtttcaaccatgttctacccttctgcacttcaggctcaggaaatatgttgtatctccagtatattagcctctgactcaaaaatacagaactttttaaatacaaagtagtgataaaatgtaaatgggcatcttgatatactgagttagttccttttccctagaagtgttcaggaggaagcttgataccttattgcaaatgcattagggaaggaatttgacatttctttgttggtgctcacaaatttgaacacttgtgattgtataaatgtctttctttttattaaaccagagtgtagacagagttgtgatgtgtagttcacaaccagcaatggcagaattgggctcttaggaaaaggaagagccaaattgaagatttcagggagtttatcagtctgtggtcaaaagcacaggaaagaagtaagaaaatcagatgcattagattagagtgcatagagatagtcaggcttacactttagaaaatgcatggctggaaaggaagataatctgaaaagaaaagactactggtaggtaatcacctgaattaatctatattctacctagttctggcacaaaagacaatgtcttggtagtcacaactcctgttaactagaaaacataggaacccacaaacttagatacgatgatatattattcccacagcattcaggtactttcctatttgctgtctatacttactctgttaaatcatgatttgactgaaaaagtaatcaggtcaggccctcaatttatcctttgttttctgaaataattttgccatgccataactttctcatggcatttttcacttctgcattcctcagtgtgtagatgagtggattgagaaagggtgttccaatagtataaaatactgccaccatcttgtccatggggaaagtggtcggggggcgtgtatatatgaatatacatgggccaaagaataagatgactacaattatgtgagacgtgcaagcggagagagcctttttcttccctttggcactgtggtttctcagtgaatgcaagatgacaatatatgaaattatcaaaatcatgaaactacttgagcaaattgccccactgttagacaccaacagcaggttgatcatgtaagtgtccatgcaggcaagtttcaacaagggctgcaaatcacagcaataatgatcaatcaaatagggtccacagaaaggcaatcttaaggccaggataatctgagctgtagagtgtattaaagaccctatccaggcaagaacaatcaggatgatgcagacctgctggctcatgatggttgggtaacgcaagggcttacagatggccacatagcgatcaacagccatgagaatgaggacaaagatctccatgcagccaaataaatgtagtgcaaagacttgtgtcatgcactcattgtaggttataattttcttttcagagagagcatccacaattaatctaggggctgtggaagttgaaaagcaagaatctgcaaaggacaaataaaatagaaagaagtacatggggcttcctagtgtccggctggacttgatggtcacaataatgagcatattccccaccacagttcccatatagaaaattaagaagattacaaacactattttctgcctcaagggatcctgtgttaatcctaacagtatgaattcaggcacactgttattttgctgcattgtttcagttgatgtgaagaaaccacagattagaactagttaatctgcaaaagaaaaaaagaaatagattctaaatttagaggtcaaatacatattcttgcaatgaaattgcaactttccaatggcttattattgacaattctttgtatttttttctgagtgaaatggaattcatagtaactattcaatatatttaccaaaatattattattattatttttgaaacagaatgtcgctctgtcctctaggctggactgcagtggcatgacaaaattacacatgaaaataatacaattagaaatagaaaaataacttaaaagcaaatgatttttcaaacaaagtaaacattaatttaggggtttggtatgagtaggtgtcttctgagctgaatgtgttcctttagcttatagccaagaataataaatattttgtactgtgttgcggtaacagatgaaaatgtacatgacttactacaataggctttcacattatttgaacctgacagtaccattataatatatttacttcctaaatatacagatcattctaatgatgttgtttaaatacttgagaataccttccttaataaaatttacatgtatgtgggtgtgtgtgcacacacacacacatacacagagaaagagacaataaacataaaatttttgcaatgagcaaaaagtcaatcattacagtccaacatgagaattattttaacctcttgccttgactatctttatttccttttaatttacctctgaaaattttctaattattttcagttccaaattcatcctttattattcaactttgtactgctttgttatactgtgttgtccaaagttaaattcgtccatctttccttatttttctgggttcttcataaagttttcttaagagacaagtagacactgaggctaaaatgaggaaaaaagtggaagaataattgacacataaatcaggacattctttcaaatttcaggtttgcaggtaagcatcagtgatttagaaaatgagatctatgcgctccaagtcaggactgaaactttcaatagaatttttagtttgtatgttcttatgaatcccatatcctgacttcaagaaagagaagttaaatatataatgggaattaatatttatttgcatatttcaaatattgaacaaatttttccatatactttttcacatatatattccaaatagcaacacagtaaaaaattaaaagggaagtgtcaatatgataaaatacatttacaacacatttgccagacaaaagcatagctttttaaaatgtaaattgatttcacagataagtttctgaaaaatatgacacaaatgaacattggaaaaataacccatcttaaaagagactgttctccttattataaagattatgcctctggaaagatgctcaatttctttcatagttaaatacattcaagttaaaattccagttagataattttcacctatcaggttaataaagtaatccttttgataaatgtcttaacaaatagtcttgacaaaggtgtgggaaaccgtcaaccctacaaacttttggtgggaatgtaagtgggtgcaaccttctagaaagtgacttcagtatctattatatgacaaccggatatagatattgatccagttattccgtttcctatagacgcactcattcacagaaacaaggacaatcattttgcctttttagatggtagcaagagataggaaacaactttagtgcccatcagaagggacattaatgaatcaaggatgatatttttacgcaaacattaataagaatgaagcagatacagatagctgtgtgtttatatgcacacgcacgcacacacacacacacacaaaattgtccctgacatatggtgtaaattgaaatgtaagagattaatattgcatgcttagaattgtaacattttccttaacatcagtacaatatatactacacacacctgcatatttctatacatgaattatagtagaagagtatgaaaaaactataatgactctgagcggg

SEQ ID NO: 915124 - DNA, 4001 bp, Homo sapiens
tgacaacttcatggacaatttcccatcgagtttcagtggtgcagggagattccaataagtcacacagatactccaacaatcaggtttccaaaactgcctatcgataatggggtagccttggtccacctgcaccctagagggttatttcctgcttgccagtccaggctacagttcctcatttaccagcctaagcccaccagtattccagcaaaagcctcctggctggccagtcccagacaggtttcttgtgtggcagcttctatccagctaccatgaactagttctggcccaagactacccagtgaacttctccaccatccaatgggcagcaactacactttctccaagatattggaatctcagccttgggaagggagcccagctcccaaatgtgttcccttcttagatactcgtttctcagtcacagggcattctttacttctttatagttaatccctcgatataattaataattttatgtaaatttgcaatgctcaaatcggggaagctgtgtgatctgtctcctgattgaaccctagctgatacaatatggaaaaaacttaatataatgcagtcttgcggcattagatgaacagaacatctttttacaatatgaccaacatattgtgaccaataaaatttacaaaagaaagtatgtatatattaagccagggtccaaattaaagaaatatcattaaacatgtaaatttcaataatcagcagtaaccaacagcttaatgttatataataagattattttaatatcaatctaatattctacatttatactttttagcatctagagatgtttcaagtttccaggcaattgatgaatatgtattaattaaaaagcaatagtggtgatgacaagagtgtgggataagagacagtaagctttacagtccaagctttagctttatgctttactgactatctgcaagcattagccagccccttgttagagttgacatattcatctacaaatcaagaagcttaaatacctattacctctatgttgagtgctcaatggtcttatttaatcattatctgaagtcactttttttctccaaagcttccttattgcactttttacctcagcatttctgagtgtgtagaccacgggatttaacattgggaccaccatagtataaaatacagcaacagctttatcaatgggcagagtggtcactgagcgcagatacacaaatatacagggcacaaagaataagacaactactatgatgtgagaaatacaggtggagagggctttacacctcccctccaagctattgttctttaaagatctcaagatgatcacataggataccaccaagataaggaagtttaataagcagataaacccactgttcacagcaacaaagagaccaagggtatgagtgtctatgcaaacaagttttaacaatgggtacaagtcacacatgaagtggcctatgacattggggccacagaagggcagccatactgtaaagagaatctgaatagttgcatgaagaaatcctcccacccaggccactgccaccaggagaatgcacaggctgtggctcataatggttgtgtagttcagaggtttgcagatggccacatagcagtcacaggccatcactgtcagcaggatgatctcagtagcaccaaaaatgtgttctgcataggcttgagccatacacccattaaaggagatgattttcttctcttgaaaggaatccacaatcaacttaggagctgaagaagaagaataaactgtgtctatcaaagaaaggtgggtcaggaagaagtacatgggggagctcagagcctggctggtggtaatggtaaccacaatgagcaggttgcctgaaagtgttatcatgtaaagaaccaaaaatactacaaacgtgactttctccattatggggttctgtgtaagacctattaaaatgaattcagtcacattctttttcttctccatctatgtagtgtgggtgataaaacctccaggaaggaatattttacctttagaaaaaagaaaggaaaaaaaagaagcataaaagaatcaaatagtccaaaactttgccttttcactgctctgccatctcacagatgattccttctcttcccaaaactctctaggaataggtacccgtaaacttctctagctgacttcttagttttttattagcctgacctcaaaaatattcttagaagacatgggacacccagaagagagagattccatttcctagagtgtagttgtttcaaaacttcacttagacatcaatatgatgaattaatgcattcattagaggtaatagttttggagactaataagactttaaaatgtgtatatgaaataacatgaactaaaaaccataaaatagtctgtatatcttaattataattatgcaagtattccataggttaaaagttagtgataatagttatggatttagtattgaagattataggttttataggtatattttagtaataaaatttgacttcaaaaattttagttataaaattttatataggttttgttttacctatggtaaaacatatgtgtagagaaaagttgataaggaaataatatatttaggacatttacttctggatgtgaaactatgggtgatttttatttatgttttctacagcttgcataactacctgtatagttaggaaagaaatatagtttctatattttttcttggagacctgaagctgaaatcataaatgtttacattgagcagaatatgtaggaaaacaaatatagggaattgtacattggtacatgataggaatccaggaaatagctgggtatagttgaagtaactgctataatgtgctcattaaatttttgtcaccaagtcaccatatggacatagggagagtgcctgactggaccctaacttttctgaaaagatcaggacagaggatgaggctgccatgactgcccatggatcttttagaatcttcctaatatctatgactgctcatggatcttttagaatcttcctaatatcatctttagtctaccagtcaaagattgttgatctctggttttatagcattgatatgacagtcagtaagtcaagtctgaataatcaatgagaatctccttaatacatagtctattttcatttacttgaagaagaatgcacatttcattcaattaactttaagatagtacttaaagctaagttttgctattattctcactttttcctagacttcaggtttttttttttttttaaatctttatgtgttcttaaagcacaaaggcagtggtgggtaagatgaattgcctctgttacatggaggtatgatacctgacgaggtacatgaaaaggtaacatcttccttgtgatcccacacatgcttcattgagaagcgggcctaagagctccaagctccaggatcatggtctcccttctggatagcccggtgctccagagaatcctttcagggacaagaactcttgagaataaggttggatgcccttctgattaccaacttttccctagaggagatggcctttgagagaaccaacaatcaactaatgtttttacaagttcctgaaggtctatgccaaaagttagacttcctgatcaaaaccagacagaaaaccccaaacttgactcattcattttcattatctcacttattcaatttcttgcaagtcttgaagtaattagaatatatttaaagagcagttcttttttacagttttcatctccttcctatttccctgcagatacaaacatacaaacagaacaactcagtctcatgttcaaaattggtgtctttgatgttcactgttaattgggagacttgagcacaggattagttcctttttctgccctagtccaaagacatagtgtgcctattaccacttacatcttctaatacccatatttttacagaaattagaaatggagaaaagtgtcaacctagcagaaagaccttgatattccataaaagggccctcagaccgcaattgagaggta

SEQ ID NO: 915125 - DNA, 4001 bp, Homo sapiens
tagtctgaaggtagaaaatactttcctagcctccactactacttttgctttatattttattgaatttattcattttcattaatccttttattcattgattctgtttatggtataccagacgtggtaccttgtaggaactattgttatctatcgggcaagtactttatggattataactgtatattcaataaatagaaatttctccttgatatcaaaacatctttatttgaaccatcactctttctggtcgattatcagtataaaaagggtaacatgaataatagaaaatggttctgaagcctacaaggacatttgaaatcatggtataaacttcattgtttacccatcagatgctaaatagatttttgcttttatagccctgaagtagttagatagcataatatttcagaaaacaatggccatcagttttgatatataaaaatgaaacaattattaatgaaaaacttatatttttaatgaactaacatatacaatgtgtccagctagtccttgtctcaataaatgatagctgttatcatgatctgatatttctatcatcattgcttggcagggtatcatggtagttaagcatatggtttgggaaatcagtgagattctggttactgtctattttatatttctattttaacactgtccccttctctcagtttcctctttggtaaatggggataagaataatgcctccctcagtttgttatggacattattacttaatatagatatatttattttattacttattttacatttattagaaggaaggcctatgagtttcatatatatggatgaagctagtgaaactaagccccgaatcggtagaattttcccagtttgtgagaatgatacatggttaggttttctcctttttcctgaacccattttgactcccctcaaggcatcatctatggatcacagtggttaattattttatttatcaaataagtattccttgctggcattacccaaaatgtccttttgacccttgcctcagctgaatcatgttgggctccagtcacatttatttgacacttgaaatagctttcctactacacaatttcctaatggcatttttcatttgagcattcctcaaggtgtagattaaggggtttaacatagaagttatcatagtgtagaatacagcaactgctttatcaatgggtaaagtagctggaggtctcatgtacacaaatatgcagggtataaaggataagatgacaactgtgatgtgggagacacaggtagagagggcttcgtgccttgcctctaagctgtgggtctttaaggagtacagtatgaccacgcaggagaccaggagcaagagacagtttaacaggcatatgaacccactgttggcagcaatgaagagtcctagagtgtgggtattagtgcaggcaagattgatcaaagtgtagagatcacacataaagtgatctatgacattaggaccacagaaaggtaattgacagatgaagaggatctgtatggttgcatgaagaaagcctcctacccatgacactcccactagcaggctacaaacatgctgcttcatgacggtggtatagtgcaagggcttgcagatggccacatagtggtcataggccattacagtaagtaggatgacctcaacacctctgaaaaaatgttctccaaagacttgagtcatacatccattgaataagatagtcttgttttcatagagtgaatctgtgatcagcttaggggtattgacagaggaatagcaggcatcaataaaggagagataggccaggaaaaagtacatgggggatctcagtgatgggctggcagtgatggtgaccacaatgagcacatttcctatcatggcgttgatgtagatgacagaaaacacaacaaatatgattttctgcatttttggattctctgtaagccccaatagaataaactctgtcacattgtttctattcgccatgtatttcaaatgatggttaattacattacctgaaaagaaaacaatttttattaatacatctttaaatttgttaaacttctccactgtaatatgtaatataataaattcttggattctactgggttgtgatttgaggatcttttctgagataggaaaaagttttgagttttggaggtttactcaaattgcctccctggtgaagactgtgctgagagttttgacatgagaaacttttgtagcacacaggcaggagaccatctgtgaacacttaatcatctgaaatgactgaaagttgaatgattgcacacatagtggcaactaagcctgaaaagattatagaatatagatgtaaagcatatgaatgcaaagctcaaaatttgctctctctcttttttttttttagaaaataatgaaatgtgaaatgtcatgcacaatatgagtgaaatgataaagaggaatctgaagaagggggattcttgggatatttctctagtgaaggtctttgtgtgttttttatgatgtgggctgagatccagtaaggagctggaagccagataatggaacttagcagactatttgtagaagttgacataagaataacagtgcatttgtgatgaaaatgtaaagaaagaatacaagagctactataaaagaattcataatctattgtctaagtcctattaactttataatagctaataatatacacctctgaataattgctatgagcatgacattgtagattgtgctttgcacacatgatctcattttatcaattttacagatgaggacacaatctcagtgactaatgttaatagttatagtgttaacattaactaatatttactgaacacagcatgtttcaagtgcttttacagacatttgcttattgaatcctcactgaaaacctatgtattagttactattgtctttttacacttattttacacattaggaaatagaagcacatagaaattaaggttcttcccaagatcgagcagataatcaaggctggacctaatattaagtttcagattatgcttgttaattgtttccccctaagtcttaactcatgccttatattgttgtaataaacaatgttgaactggtaatttccctttgatatggccataatttttataattactttaatacaacttcagagacaagtttatatgagtaacttcatcagcagacagacacacacacacaatgatatattgaaactcctaaatattaagaaaaatgtggtattacattcattgaagggctgtttttgcttagcctctccctcagccctatgcattcctccttgatccccttgcaaagcatgggaccctagccagaaacttctgcaaagtgttaaaaaacattatcacaatagttaagtgtgttagtttgagaatcagaaagaccagattagaatcctcgtttttccacctataacttcttttacctggggtatatttcttggcaccttacatcttaatcttatcatccataaaatgataatattcacctcacatactgttatgcgaattaattgggagaactatatgaatatatctaccctactgttagggacatatacaggactttcatttatttttatggctgtataagcctaggagacaggataaattgacaatgtgatcaatataatacagagaaacatttgaccacacattaagctcataaagaaaggtctccaattttccttttacagggctttatattattcatagcaagtgatcccagtaaagcttctccatgtttgtgcttggactaatcagctgatgatttgccatttaatattcatatttatgtcttttgtgtgtgtgaagtgtatttaaattttgttttagtcctcataacttgtctcattcactaaggaggtgtctcatggcaaaacatggtacccgatatcagagagatgggttctacaaattgcttaatctctataagcctcaaatatttcaactgtcaaattaggttaatgatatttaccaactaccttttgaataattggagt

SEQ ID NO: 915126 - DNA, 4001 bp, Homo sapiens
aaatgtaagagcagcattcacaccgaattgtatagggtcttgggtggttgtagcttcaggtaagagcatggctgggtttagatgggagctggttagcatggtaatgtggggagtttctatgaatagagcatacagttggaagagctgtggggcagagatgagacttagtacacagcagtgagctaacatgtctttgatgtttcaggttgaatcgactgttaggttggcatggagagatcattttaggctttcaagagtgaggacagcagctgctgccaagctcagagacaagcaagccatccatgaactgcagctttaagctgattagagaggtaggcaacaacctggaagatgggtcccttagactgggttagaacacctactgcaactccatgctggttagcggtatagagggagaaaggtttggtgaggtctgggagagtgagaatgggggctgatgtgagagccttctggaggatggaaatgttgggtaataggctgtgtggggtttaaaggctcatggagagggcctttagccgcctggtataacggtttggcaagtagagtgaaggagggaacccagagcctaaaataaaccactagtcctagaaaagagagaatgtcttgcttagtttgcagaggtggaagggagtggaggtgcaatatgcagttggttgtgagcccttggagtcacggggtaagactaggcctatataggtgactgaggaggtgcatatttgtgctttctgagggtggacacataagttttctgatcccacattaatgatttttttctagcattactttatctcttgccatgaaagatgtatctcattaagtttttatttaaggccattttgaccttttttactcttaactttggattttttaaagtttaatattttctttctcatcagaaaccaccatcagtctgttccatattctcctcatggcctgttttacttccttattcctgaaagtgtaaatcaaaggattgagcaagggatttaagatgatataaaatattgccgccattttgtcaagggaaaaagcagatggaggtcgtgtatatacaaatatgcatgggacaaagaacaaaatcacaacagcaatgtgagatccacaggtggagagagctttccagcgcccttcagaactgtgtgttctcagagagagcaagatgacagcataggagacaagcaacaaggagaagtttatgatgcagataaacccactgttgatgaccaccatgaggccaaagatgtgagtatcagtgcaggcaagctccagtaacgggtacaagtcacacataaagtgattgatgacattggggccacaaaagggaagctggaaagtaaaaagaatttgtatcatggaatgcaagaggccccctgtccaggctacccccatcagaatgccacagagcctcctgttcatgatagaagagtaatgcaagggcttgcaaatggccacataacgatcataggccatggctgtgaggacaatcacctccaccccagcaaagaagtgttcagcaaagagctgcatcatgcagccttcaaaagagatggtttttgtcacatagagggagtctacaatcatctttggggtgatgacagatgagaagcacgcatccaggaaggacaggaagcccaagaagaagtacataggagacaccagaagagcagggctgctgagaatggttactacaattagcatgttgcccccaacagttgcaatgtagacaaacaaaaatacaacaaatactatttcctgaacatttggattctgtgaaagtcccaggaggacaaactcagttacaaagctttggttttgcatgtttcccaaggaaaagatgaaagctccaacagggatcatgtatagtctgcaattaggacaaaggaaaatttgcttcagatcaatttgtggtatcatagtcattaacaagttggtacatccaagtgcaaaattattgagtgcttctgttgtcattgagaacataaattagaaattattgaaggtagtactgaaatatcagacagaattgtgatagagataatttaaagaatacttgaaagaaacaagaggttcaatatgggggaaggatatgtggtagagaagagaaagagttttcatatcaagtgccagctttgatcatttactagtggcttcctggagtgaattattgagaagtattctgaagttacctctaaattttgagagaaggagcattgtaacttattacttatttctgccattggcatcaaatgagagcagggatgaccagcatcccattcctaatcgggagactgctttatctgcaactagaagaaaacagcgtatagttcaagaggcacttaaaaattatggctgctcttcaaatatttctttaaaagtcttaactgaattcattctttacaaaagagaaagatctttagaaaaatctctagcctgacatttaaaacataaaaagtatgcattaagtgcggagtgttttcttaaatctgtcattttaaaatgaaaacagaagtttattattattataaaagtaataatgcctacaacagaatgttgttatgataactggtgaaacaatggaaggctaaggaccgactgccctagggaatggtctgcattaggtcttattattcctatttgattggtgggaaactcatgcttaaagaagttaagtttaagcaaataacagacaatctgggatattaacacaaaatctcaggctccaacacccaattcctttccactagatcagcagggaaaggagtggggatattccttttccagtaagaacttcaaagtaggaatggcctttctacaaacacttgcatgtacaaattggcatcaaccacataagtaaggaagagaaacaatatattgaatataaaccggaatcttgaggctttattaattattttccaattatttatataaagtaatcaggtctaatgaagtttaattcctaaaagaagtgtatatttcaactttatatgcattattgtgtagcagaggtgtttatatatagcttacctgctcatgtctcaggattatgatgatggtcagatttgaaaatgtgaaaattttacttataataaagtgctcttaccaattgtatttactcacttaaaaagtcagccaccttatctacaaaaagctttttcatgagtcatctagataattactctccaacttttgacttcatttccacaggcagacacagctttaaaggataattctgtcttcacctatatatatataattgaaatgtgtttttcaattaccatatataagtgtgtgtttgaatatttgtatatgtgtatatttatatgtgtatacacctttgttaaaaaataagtgaataaaaaagaataaagagatttattttgagatttaaataagctgatttttatgaatgtcacttggagttaacagaaacaatttaaaatgttaataaaactaacaaatatacaattgtgtatgttaatatatgttcttttgcttattttaaaacaatcatttccattatgttttcagtttcatttgtaaccagtgtctgcactaggaattccatatacagttataagttatcatcaggaaaatatgagctggaacaaaccttataaggttattagataagtcaataaccatttattgcaaaggaaagcatgttagtaaatgatccaacagtgctcagcttagccgagagccaaagtgggaaatacgatgaagtgaaatgagtaagaacttcagttccagactcatatagacgtaggttcaaatccaagctctcctacttgttctatggcatgttagaacaagtcacttcaaattcttaacattctcaaagcctcagcttccacttcagtaaatggatatgatgtctatctatacatatcttgtgagtataagaaagcaatacacacaaaagcactgatgcagtaagaagcatagaagatcatgatgagtggtgagaacaagccctcaga

SEQ ID NO: 915127 - DNA, 4001 bp, Homo sapiens
aatccgcttgggaaactggccttatatcacctttgtccacacagtttctgtacagggttcttaacatgtggtaagaatgtcactttctgacatgttgacaagccccaagtttatcttggaacctcaagagtagaggatcacccaactcatagatgtttgatggcacaaatccttggctggcctcagtttttaaaaagtctcacctgaaatttcttctatggaactaagttccatcaaagccaatttaaaagcatttgtaaaagaataattattcttcctgcactatatacaaataatcaggccaaatgtagtaaagcaaaccagtccccaaaattagaagggatcaattaggaccataaagtcattttacaaaaagaataattacatgactacaacacaaactgtgagagtcttcctaagatcaagaactctttcagaagggtaaattttctttctttgttctgtcatggttttagaagtatctaggtaaacttatagaaagatttcagcatacagctcaaaaaattggaagggagatttcctaggtcatatatattgtctcttgcaacatgaagctcctacaattactgaaatatggtacttcctgttgagtcaggaagaacaactaagttgatcatgaggtatgaagaatccaatgtgtctaataaagaaaaccattaagaaggggaaaaatcctattggactgtttatatttagatgggtaaatattagcagggaattccagaagtcaacatggagaagaacaggcaaactacagacctaaaccataagtgacactaagcaggcaggaggaccagagacacaggagtgaatagcactgaaggcaatgagctttacatactagtttgtattgcatgctgtcttttctgccacataaaactgactcaacattaaccattgttatttgtttacactgtctcttttcccaaaggaactaatcctcatgtaccaaggcaggattacattaaatcaacaataaaaatataatattctcattgatttcttctaggtcactccaaactataaagaaggatttgaaaccttcatttatcttttgtcatctgtgatcaatttcttgctccaaagcttcctcatggcacttttcacttctgtattcttcagcgtgtaaatcacagggttgagaaaagatgttccaactgtataaaatacagctatcatcttatccatggggaatacggttgcaaggcatgtgtacataaatatgcaaggtccaaagaacaagatgaccacaatgatgtgggagacacatgtggaaagtgctttctttatcacttcagcactgtggtttctcagagaatgcaagaagatgacataggagaatattagcatgacataactcactgcacaaatggccccactattggaaaccaggagtaggttaaccacataggtttctgaacaggcttgtttcaacaagggctgcaagtcacagaaacagtgattgatcacattggggccacagaatggcaaactcagggcaagaaaaatctgaactaaagaatgcacacaggatcccacccaggccacagccatcaaaacaccacagacccactggcttatgatggtcatgtagtgcaggggcttacagatgtccacatagcggtcaacagccgtgaggatgaggatgaagatctccaggcagccaaagacatgggatgaaaagacttggatcatgcactcgctgaaggagatagttgtcttcttcaaaagggcatccacaatcattctaggggttatggaagtagagaggcaagtatcagataaggataagtagaaaaggaagaagaacattgggttcttaagtgcctggctggtcttgacactaataatgattagcaaattacccaacagtgttcccaagtagagacgcaaaaaaataacaaacactattttcttccaaaaaggatcctgtgtcaatccaagcagaatgaactcagtcacattattattcagttgcatggttttcgtgagtgaggtgaaggggcaagtgtgaaatggtctacctgcaaaaaaaaaaggaattaatttatgctgtgctatgtgatgttatggaatattttatgcaaaattaaatatttcttattggatacattctggtggcggtttcttaataagccacttcaacactttcttccaaattttaatgaccacttcatagggttattatgattctcaaatatgcttatgaacatgataccttgctatagcattcttcaagtacaagccttggttagctttggcatcattctgattaatttttccaattcaaggaaggtaaatgtaagaggtaatgatccattttaatattaaatttcattttataattttcaataaatactgagggccattttttatgttgtgtatcactcaacatttaagatatatttagctgctctttgagttttacaatatgaagtcctatgccaccaccaccctgtagataatatcttattaatacatagtttatacattccatattcattatatatatttatatagatgttatttattaataccttgtatgctccacttctctgcaaaatttctcccagatattccagattataaaaagtaaacgaaaacacttatagcctctaaataatctgttgctaccttgatgtgtccttataacattttgtcctgacatatactaataaacaggaatgaatgttctttgaaaattagttatctctttaatatccccctttctaattttcttcctttaatttattgaaagcatccctagaacacacagagtttctgaggttacatttaaataagatgagggtggggtacagtattactactcaactgtttgttttcacaattcaaactaaatattagaatcatgaaaacaagaaagcattttataagtggggtggtttgaagtgttatcattgaaccagatcatgtttgtaatccccagaagagttttcattatcctgatattcaaaaactgcacattcctggaacagagcagagatttggaggaaagaaggtgatgtggttttagagaagagagagtagatactaaataccttcttcattcaatttattttctatcatggaaaagtcagtgcttcaactttgaaatgtcacttttcccagtgaagatcagtttttaagaatatatggaaactaatattatcacaaggcttctctttcaagaaaaataaattctctacatttttgttgtcaagatgacactagacagtacataatatgcaagtagaaatataaaccaaagtgtaatttatttaaatatagtctggaagcccattgtgtttctccactgtttgaaatgcttgttccctggtgttataaaagaaatagctcttgaacacaaattgaatttatttagaaaggtcattttttacttcctccagaaagggtacactcgccagcagttttgccacgagagtacaccgaacaaaggagacagggtcatttataacctgacaactgctgtgtccgttttccattggctggaacaggacctcattctgtatttgtccatattggctagcaactcagaagtttttaaaagaggcaaaggcagaggagaaaaaggaagcaggaagtaacttgtggaatgctgacaaaggtaaaaacacttttaaataagaaagaggaacaggctatgacctaatgcttgcttggatcagtataagcatgccagggcaaatatttaggagtgcaggtctttaaacaaaatttgcttcgaagagaagttactatttattcctaattagatggggagtaaagtctttgaagaggaacttctacttttagtttttacatccacaattcaatcaataccttcaaaacattggtgaaagttacaagttggccaaaacagaataaaatagacaaaacagacacaaaattccctttatatatacttcttcctctctccagattcctctccttcttctcctcaccagatttgaaatatccct

SEQ ID NO: 915128 - DNA, 4001 bp, Homo sapiens
aggagaatggcatgagcccaggaggcagagcttgcagtgagctgagatcacaccactgcactccagcatgggcgacagagcgagactctgtctcaaaaaaaaaaaaaagaaagaaaataagattcaaactcagattgctctatctccagagccaaactcctaacctctctgctatagtgtagcagcggtattgctgatgtcacacaatgtgacgagaagaaatagaagccaggcctggatgcagaaaagcctgctatatatggctaagtgttaagtaacattttgcctcgtgtttctacaactcaattaattatcacacagactcaaatgatgtcaacatggattgctacttaaagatctggatgatggatcaaaaataactcattttaagctttggtttagtcacttcaaaaattgataatcttgattaattgaccaactacatcagtaaacagagcttcctcatttctaaaataggaataataatcattcgtaccatgtatatttcatatagttgttttataatcaaattatgcaattcaagtgaaaatactaaataaacaataaaagtcagtgaaggctgggcgtggtggctcatgcctgtaatcccagcactttggaaggcctcagtgggcagatcacttgaggccaggagttctagaccagcctggccaacatggaaaaactccatctctactaaaaatacaaaaattagctgggcatggtgatgggtgcctgtaacctcagctacataggaggctgtagcacaagaatcacttaaacctgggaggcgaaggttgcagtgagctgagatcgtgccactgcactccagcctgggtgttgaagtgagactccgtctcaaaaaaaaaaaagtcagtgaagatgaaattatgcttaagatggaatacaactatacatgatacaaaaaaagtaaggcttggtttgtttcacttacaaaaataaagtcatttttatttcctgctttaccactcattttccacctgcaatttcttaccatgtaaagagctttctcatggcattttttacctcttcatttctcagggtataaatgagtggattcaacataggtgtcagaataccataaaataatgccatatttttgtctataggtaaagtagaaaatggatgcacataagtaaatatacagggcacaaagaacaaggcaacaacaatgaagtgggctccacaggtggagagggctttgcatctcccatctgcactgtgggacctcaaggagtacaggatgacaatgtaggaggcagccagcatgaggaagttcaacaggcagattaaaccactgttggcaaccaccagcagaccaatgacatacgtattggtgcaggcaacttccagcaaagggtacaagtcacaggcaaagtgattgatcacattgggcccacagaagggcaaccaaaggaccaggaggagctgaaccaatgaatgcaggaagcccccaagccaagccacccctacaagcatggcacagagatgcctggtcatgatggtagtattgtgcaggggcttacagatggccacatagcggtcataagccatcactgtgagcagaatgatctcaacacctcccaaaaaatgagctccaaagagctgagccatgcagcactcataagagatggttctcccctcatacaatgagtcagcaatgagtttaggagccatagaagaagaataaaaggtgtcaataaaggataggttggccaggaaaaaatacacaggggaagccagcgtggggctggaggtgatagtgaccacaatgagcatgttgccacaaaccgtgaccacatagatcagcaaaaagaccacaaagagaactctctgtacctctgagttctgtgagagccccagcatgaaaaattctgtgatattttgtggtatgtccatagattccaaggtcactgagaatgcaggtgcagtattgcctataaagacaaggagaaacataagtaatagaactaattgcatgggggaaaaacattgcaagttttcctttaatatatcctttgttcctcttaaccctcttctgttccaaaattcttatacaaatttaatcttctgaccacaaaatgtctgttaactttagcatcactgggcaccacatatctcagttattagatgaaaataataacttaattatctaaatttgcatttttgtggctgctgggattgaacatttatcagacatttattttccatttcaaactggagtaaatctctgatcactttcaacatagattagatcacacttgagaaaaccatgtagagttaagacctcctgaaatctcctgaaatctctgcatgtatggtccatactttgaattaaactttcttcttggggtttgcaatgaggttggttacactttttgttggtttttccaatgctaatacaaattgatataaaacaaactaaagcaggattggaagaaactgacttggttgtggctagaaacttaccaaattctctacttctctactttctcatttgctgcatctgcatactgtgaatagcatcatgcctaggaagacaacttagctttctcctcccccttgttttgtacatttttacatacttctgagttttgctttctctgaccttggtgtaatccttctagttaaggactactagtccccctgcaatctacggggaggactcaaagtaaaaaacaaaatttaaaaaaaggggagtatcagtgaaaggtactagtagatgattatctgcctataactacataagggaagctacaagggcggagggaacagatgctctgtcttaaccagctatcagttataaccttatgtggcagaatattcctactcaccctttattcccctaatgatactaaggaaatgcctatgaaatagacctaatagtccagtagatagttgtggggtttgttggagggacttaaaaattgctcttctggtcttaaaatttacatttctcttatctgaattccctcctcaaaacattcaccctcagacatcccaaaaactatcaaaaaactaaaactcaccaaatcactgtattcaggcaataagatatcagactccatatttatcataattgcttccttagccctccctgttttcctaaccgaccacctacttcttattgtccaactcctcttccttacctgtctctaactcctgttttaacagttaacgtttcctccctgctatataaacccctaatttcagttggttgaggagactgatttgagactaatctaccttccaactgcaatacccaattaaagcctttttccccaggaatactcatctcagtaattggctttctgtgtggccaacagcaggacctagacaaaacccctggcactttggtaacacctgtgcctatcttaaattttgaaactgtcactaaccctctccaccaccctatccttttcctggaaacataggtcttcttaaagtagttgaatcctccaacttgctgcagatttaatgctcagtatgacaagaattaaaggagaaccatcaagtgtcagaagaagaaagaggtacccagatatatagaaacactggagagaaaattcatatactgatcatgaaactgctacctttttctctctctacacttcattgcaagaaggtaaatatagctcctgcaagtgacaagtctgatggggactttttgaaggtagaacattatggccaaaaacacagacaacagtgatgagaggaaacacctacatagaatttagcctttgccaagcactatccaaacacttacataggtcagcttgtttaatcctcacatcattcccatgaagtagattactgtttttatcctcattttcagaggaagaaagtaagaaatgcttaactaatcagtgacagaactggggcttgtactgaggcagtcttgccacagagtttgtgggcttcacagtaccatactgtcacttaaacacatcgggtttgaatccctccccttctctgccatt

SEQ ID NO: 915129 - DNA, 4001 bp, Homo sapiens
gatacaaacttatttctacatctctggtaatttccttttcagctgttttgttttcagtgctttcttttcctttgctggcatgtaaaaccagattttaatgtatagatattttttgccttaactttatttttatcagttacatttatcaattatatttcttttgctccagccaataatactttcaattcttcctgggtgcagtggctcacgcctataatcccagcactttgggaggccaaggtgagctgatcacctgagttcaggagtttgagaccagcctggccaacatggtgaaaccctgtctctactaataatacaaaaattagctgagcatggtggtgtgcacctgtaatcccagatacttgggaggctggggcacgagaatcgcttgaaccctggaggtggaggttgcagtaagctgatatcatgccactgtactctagcctgggtgacagagcaaggctctgcctaaaaaaaaaaaaaaatactttcaattatttttgtagagaattgtatactatagagaatggagatataattttttaaaagtaagttttcatgaaaatgttgtttttagccctttcatgtatagttgtttgtcctcttgtaaaataaaacttcattctagctgtagtgctgagtatgaaaggtgtcaagaatgttgctgttaatctgtttcatacccacaagcaggcaacaatataaattttgtgagcccttgaaacttttgcccttgtgagttctttcctccataaaaagtattaaaaattatattttatgagtgtattggcataaagataaatataatccagttgtacttagattatattcattttcttcttcttcttttaaagaaattaagcattaagcatttcagcggctcctaaaagtatcatgggctgttggcactactgtgccttaataaatatgtcagcctagcctaatatatgtcctcctaataaaaattgatggagacaggataagataattgactgtcccaagtttaatcaatcaagaaatagaataaatctctataaaatatcaccagatattcttgcctaaatgtttgtgtcaccagacttatttatcatcagttgtcattatttgcttccagagcttcttaatgacatttttcactgctttatttttgacagtgtagattaaagggttcaacataggtgtaaatagggtgcaaaacacagtcacagctttgtcagtggggaaggaggttagaggtcttagatacaggtatgaacaagggacaaagaataagatgacagtgaagatatgagaggcacaactagacagagctttgagatgcccttcagagctatgagaccttagggagcacaagatgatgacataggaagcatccagtatggaaaaaatgaggaaacacagtgacccactgttggcagcaatcagaggccctaaagtgtgagtgtctgtgcaggccagctccagaagaggtactaaatcacacataaagtggtcgatgacattggggccacagaatggtaactgggctatgaacaaagtctggattcctccatgcacaaatcccagaattccagccaccaccatcaggaatccacacatagattgggtcatgatggttgcatagtgcaagggcttacagatggccacatagcagtcgtaggccatgacacttaataagatggtctcagctgccgcaaagaaatgttctgtgaagagctgagtcatgcagccattgaaggatatggtgttgttttcagagatcaagtcaaagatcattttaggggctatggaagaagagtagaaaatatctataatggataactaggacagaaaaaggtacatgggggaacccagggctgggctgatgaagatgatgactgagatgagcaggttacctgccagtgtgatcaagtaggtgattaaaaacataacaaacaggaatttctgcagttctggattgtgagtgaggcccagcaggatgaattctgttacattgttcatctcttttttcatagatttagctcaggttgtgtgtatatggcccacctgaaaaaaaatagtatttctgaatgatgatattttaaattcaatactaaaatatttcatcacctctttagtcctggtttttgggggtgatggagctacattgccactcacctctgctgttttgcagagttgtaaagaagaacagaagattagatttctcctaattcatatattaattaaatagtgataatatcttacaagtaccacaaacaagatcttgttataaatgttgacttccaaacttcctttctggctctaaaatttcacatatggctttctttcattttgggggaggacaaatcttatcaataacaattgttttgaaattatattttctcttgttatggttatttataggtatatgaacccagtatgtgtattagatactaatatgcatatttgatactaaagtgcaaagccttactaattctaagccagctgtgttctgtgatctattgtccttttctgtcatgtaaatgcacatgtacacagattgagacagagctgcaaatggagatattcttctttcagaatgctgggtaactatcacaataacagctcattgaggataattcattcaacatccctgaatgttgcatctatctctaaatgaccctttttttcatgctcactctttctgcatctttaattgtggctatataaatggtgcaaagttataatatttaatgatatttcataaatacatttccctcacggttgaacttttatcacatacagaattatacaccagattagatatacttccccactcacatcttacaaatggaattaaatgagtcatgatgttttccctgagttttctatcggcaagacagaaatgtctgggtcacctgagataatgcaattttctcttttggcataagttcagtcaattaagatgaacttgtagttttcattgctaactggtaaacaactggaaatttgtattgctaatggaaaacattcagtattataagaatgtagatatttttgaataatctagacaaagagtttcaagagtaagtacatattgttacaaaagagcataagatattttatttcttctcctcccccttttctccttctttccctaacccctggcaaaaatgtaaccacatagttttcctcaaaaatttctagaaacagaaatcagtcagcgtcatgacctctgagcttcattaaaggtgagtaaaaatatctttggttttcaggaaaactcagttgctaagttgctttctctttattcatggcttctgtagatggtgattatatggttaatcatccttaatggatttaattcacaaattctaacttcaatgtagcaatatgggaagtcacgaaaaggggaaaaacatttcaagcatgacaaacagaaatctacagaatcagtgtattcagtgagacataaatgttaaccatgatgttttaaaagtgacttcagtaagtttttagcagcatctggtctggcaacattatgcataggcttttctattgatatttttatgtcagtgtgtccaaattcattttcagagaaaaatactcaactttaagtcaagtacggaatgacaaaaactacttcactgaaaacaaattggctaaaacaagttaatctgctcaaaatttaggagaaaaagtatagttttcactgacccggatctagttgattgtggattcctccaattttagattgagtgcagtcactgctttcttctcctgcaggcatggaacatggccacaaatagattctatgagctgacaagtgggatattggaattccctagatggctctcccaattctgacattttagtttattttgctttccattgtcagtctgaatttactaagaaaacaagatgtttcagttaggaaacttcagtatctctaggattgagtgtctactcactttctgggtttcctatgaatgtataagccaatcttcaaaatatatctattt

SEQ ID NO: 915130 - DNA, 4001 bp, Homo sapiens
gttcagaagcctacactgacatttggaaacatgatataaacttcattacctacccatgagaggttatggcctattgttattacagtcttaaagtggttagataccataatgtttcagaaaacaaatgaccatcaataatgataaataaaaaagcagagttgttaataaaatttcttatatttttagttagataacaaactaatatatgcattgtgcctagcatagtctgtggtcccaaaatggtaagtagtataattaactgacattttcattatcactctgtggcagaatatcatagcagttaagagtatggtctggaaaatcagttatagtttggttactagctcatcaacatatctattttgatatcttctccttcctgtaagcttcctaacttgtaaaatgaagataatagtagtgcttacctctttgaagtgttacagatattaccgctagataccaatatatgctattatttcttttatttgtgagaggaaagcctatgaatccatatacaggatgaaactagtaaaactaagccccaacttggtagaatttcccaaatatgcagagttgtcctcggttgttttctctctttccttgaaccatttctatacccctcaatgcagaatctatgaatcatatggtgaatgttttcttcatccaatcaatttgccccactgcaattatccaaaatgtccttctgactttttcttttttttttattatactttaagttttagggtacatatgcacaacacgcaggttagttacatatgtatacatgtgccatgttggtgtgctgcacccattaacttgtcatttaacattaggtatatctcctaatgctatccctcccccctcccccaccccacaacaggccccagtgtgtgatgttccccttcctgtgtccatgtgttctcattgttctattccaaactatgagtgagaacatgcggtgtttggttttttgttcttgtgatagttagctgagaatgatgatttccagcttcatccatgtccctaaaaggacatgactaaattgaatcaatgttgagctctagttacatttatttgtcacctgaaatgtcctttctactacacaatttcctgatggcatttttcatctgggcattcttcaaggtatagattaaggggtttaacataggagttatcatagtgtagaatatagcaactgctttatcaataggtaaagtagctgcaggtctcatgtacacaaatatgcagggcacaaagaataagatgacaaccgtgatgtgggagacacaggtggagagggctttgtgccttgcctccaagctatgagtccttagggagcacaagatgaccacataggagaccagcaggagggcaaagtttaacaagcagatgaatccactgttggcagcaatgaagagttccagcatatgggtgtcagtgcaggcgaggttgagcaaagggttcagatcacacataaagtgatctatgacattaggaccacagaaaggtaattggaagatgaagaggatctgtatggttgcatgaagaaagcctcccatccacaccactcccattagcagggcacacacacactggttcatgatagtcatatagtgcaagggcttgcagatggccacatagtggtcataggccatcacagtaagtaggatgccctctgcacctccgaagaaatgttctccaaagacttgagtcatgcatccattgaataggatggccttctttccatagagtgaatgtgtgatcaggttaggggtattgacagaggaatagcaggcatcaataaaggagagataggccagggaaaggtacatgggggaccccagtgatgggctggcagtgatggtgaccacaatgagcacatatcccaccacagtgatgatatagatgacaaaaaacacaacaaatatgattttctgcatctttggattctctgtaagccccagcaaaacaaactctgtcatgttattcctattctccatgtatttctcatgatgattaattgcattacctgtaaaaattttttattaatacaactttgaatttattacatatctccattttaataataaatgcttgaattttattaaactgtaaattcctataaggtttttcttgagatgttaataaagtttctcagttcttgaagattacttggtgaagactctgtgaagagtatcgacattagaaactcttgtgaacaaagtcaggatgtcatgtgtgtatactcaatcatctgggaggcctaagagctcaatttgaagtagtagattggatacacggtagcagctaaacctgaaaagggagattgacaatgaatttaaaggccatggtgtaaagctaaggaatttgccatttattctttaggaaatggggaacattggtaggttactgtcaatatgagtgggaagatgaagaggaatttgaggagtaggaatcttggagtatcccactagtacaagtctttgtatgtcttggatgaagtgggctgaggttctgcaaagcaggtgttagccagagaaaggaaccccagtgggcagaatatttagagtacttgacataagaagtaactgggtggctgggccggtggctcacacctgtaatcccagcactttaggaggcctaggcgggtggattacgaggtcaggaaatcgagaccatcctggccaacatggtgaaaccccatctctactaaaatacaaaaagttaaccaggcgtgatggtgcttgcctgtattcccagctatttgggaggctcaggcaggggaattacttgaactcaggaggcagaaattacagtgaggccaagatcacaccactgcactccagcctgggtgacagagagtgacagagagagacagaaagaagtataaaaaaaggatataagagctactaaaataattcataatgcttattgtctaaatctaattaactttataataactaatattatatgccctttaataattaattgtcttgcaaaagccatagtagtaagtgctttgcacacatgattccagtgaacacttataacatcctaggtgaccagtattatttcatcaaattttcagataaggcagcaatattagtgattaatgttaatagttatgttaacacaatgatatttatattatacaataatgtaatattatttatattaacattataacactcataatattgataatattaactaaaacatactgagcactagtgtcttctaaatgtttttttgcaggcaatcacaaaataaacccagaaaatagtactatcatttttatacttattttacatattaggaagtagaagcatagggaagttgaagatcccatccaagatcaagcagtttaataaaggacagagtcaagattagtcacattatactagttaattttttctctccaaattctgagctcatgccctatgttgttatgttataataaacaatgttgaactaataatctccttttgatatgaccattatgattatacttactttaatactacttcagaggcaatttgtatggagcaatttcattagccgtatcccccctccccacccacaacacagtgacatctttgagttcaaatattaagaaaaatgtggtattgaatcattgaaggtacatctatcttagcttctcccctagtcccagctctttcctcaacacccccaccccaccaagtcgtgggcccccagactcttgaacaaaatgttgaaaatgactactggccgggcgtggtggctcacgcctataagtccagcactttgggaggccgaggcgggaggataacgaggtcaggagatcgagacaaccctggctaacatggtgaaactcggtctctactaaaaatacaaaaaattagcctggtgtggtggcaggtgcctgtagtcccagctattcgggaggctgaggcaggagaatggcgtgaacccaggaggcggagattgcagtgagccaagatcatgccactgcactccag

SEQ ID NO: 915131 - DNA, 4001 bp, Homo sapiens
atattgaagccccatatataaaatggcagagtatttgcatatgcccagtgtacaacttgttgtagactttaaatcatcccatgatcacttgtagtacctaatacaaggtaaatgttatataaataattgctatactgtatttttaagtttgtattatgttttatcgttattttgtcatttttttggttttgggttttttttccccaaatatttttgatctgtgattggttgatattgaacccgtggatgcagagggctgactgtatatggttgtctttaaacaccacttctctatcactatctccatcactatctcccatgcccccaccttcagtgtaactagatttttaaaatatttttagcttactctgtatctttccttctttgtttctggtgtatcctacacaaataaaatcccataagtagtacttaattatttactttgtgaaatacttttaaatatctctttttcaaatagtcattttccttatacaatttattcacctattgattcaaacttctaatcacatcactcattaaattattgaatatatattatattattgatatttgtttctaagacaatgggaagctagggaagggtataaagcagtaaagtatcataatatctaatttgcacagaatctgaatcataaacccagttttacaattttaaaagcttcctctctgccgggcacagagctcatgtctgtaatcccagcactttgggaggtagaggcaggggaatcacttgcgctcgggagttcaagaccagctttggcaacagggtgaaattccatcctactgaatataaaaaaattagccgggtgtcatggcacgtgcctgtagtcccagctactggggaggctaaggcagaataatcacccaggaggtggagactgcagagccaagatagtgccaccgcactccagcctgggtgacacagtgagactctgtctcaaaaaaagcttcctttgacagccaccgaggaatggacagttttagctcttacacatttctgaaagaatgacttctccttttgggaaatacatgatgttctcagcattgcagttatttcccagccaaagcctcccatttcatccagagtttcttcatggcacttttcacctctgcattcctcagtgtatagatcaagggatttaacatgggtgtgatgattgagtctgacacagccattgccttgtctatggggtgagtgaccacaggcctcatgtacaagaaaatacaggggacaaagaacaatacaaccaccgtgaggtgggagctgcaggtagagagggctttgtgccgccctttagagctgtaagacttcagggagcataggatgaccgtgtaggacgcaattaagataagaaagatggccacacacatcatcccactgttgagggtaactaagaggcccaggatgtgggtgtccgtgcaggcaagtgtcaacaactgaaacaaatcacatataaagtgatctatgatattaggaccacagaagggtatttgatacatgaagagaagttgtatcattgcgtgcataaatccccccacccaagcccctcctaccattaggcagcacacccgtggactcatgatgatcgtgtagtgcaggggcttacagatggccacgtagcggtcataggccatcacagtgaggaggatgatccccacaccaccaaagaaatgctccacaaacagctgggtgaggcagcctttgagagagatggtagtgctcttggagagggtgtctacaatcaccttgggggcaacgacagatgagaacatgacatccaaaagggacaagaaggtaagaaaaaaatacataggtgacctcagactctgacttgtgataatagttaccacaataagtagattttccagcactgtggctacatacatgacaagaaacacagcagaaaatattttccacagctccaggttctctgtgagacccagaagaatgaattcagtcacattgttttgattttccatttctcaggtgttgatatgagttccagctgagagttgagaatcctaaataagcaagatatgatttataattagtgactaatttggcttcttgtatttccaggacctcagggaatttgttctttgtttttacccatgtattctccatctaggcatttgacttctaagaatgtgctaaataaataatttaaaagggaaatactttatttatgcaaggcttccccaagccttttctcctccctttctaaattgtgtttctatgtgaaatagattttttcctccttgtcctacctttataatagttattattaatagataacttttttagcacctacctcaccttggaggcaattccttattccaggcattagaataattctatgattggctttgttttacagaaacaggaacgtactctcatacagtttaggaaccttaagcaaggtcacatagctcttcagtagtgaagctagaatttggaccttatattctgatgccggaatcagtaccctcaaatatcaatacagcttctctagtaattatgctgtgagatttatcattcaccaatcactatgctaagtatattacaattattatcctgcttatcttaaaaataatgtgatgaagtaggttattcttgtgctttttaaaaaaatattgattcttttccaattgtgtgcttttcttctaaattttaaatgatcatcatatacctaaaagtagttactatataatccctgacttcattgttcagtaatgaagattataaaccatcatggttcagcaaaactccagatccccaatacaactgacttgaaccttgaattagcctgagtcattcctttcagtttcctctgtttcctaaatggaacaaaggatttcagagcataatgacaacaactaagcaattagcttttaggctaacaatgctgctgggcactatgccagatatgttagccatattatttcatttaaacctcatgataccacatgaggtaggtacctatactactcccatcgtaaagagagaccaaagcccttaggagttaaatatcttgcacgagattatataactattttgtggtggagctggcattttgctcacacggcttcgattcatacctagtatatcccaccacatgagaagagaagaatagattgtatttcagggaagttactactgcaaccaagagaaaaacctgcagtaaagaatgcctcatattactagggactataaagcagacctggatgccacatctaagaaattttgcaaaaagcaaagcttcacattgatatttggattatgcccctctgttaatgctaagaagtcactcctgcttttcagtagcccactccacccccatcccttacactgaatgcagaacaaccacaggaaactgtggaagtgccatatattacttaatctcatcctctcctccctagccccaggactgagtactttcttgcaacaatccttgtgaagttaaaggaacgctggcttgggagtcaataaatgacaagtagattttattccactttgcatcactaacttaatctgtatttgagcatgctgctggcatctccgaaacctggttttctcatctgcagtataaggatggtttcctagatgagtatcagcaggactggctctgtcctcttcaaacacaaacactcagttgttatttgcattaattgtttatgtctctgggtaggatttccttagaggggttgttcatttcatgttcagaaaaatgaaagccgctattctagaatatatatgccctgtctgtccttaagtttgggacctagtatgaccctgtgttgatacggaacagaattgaacttttccaactgacattcaggtctcatcaccagccccttttctcttactgtttggacttcatttctcatgtgcttcactgtatttattccaccatcagtcccacttacttcctgccagactcataccctgttatttttttccatacttaatcttctgttca

SEQ ID NO: 915132 - DNA, 4001 bp, Homo sapiens
aaaacataattgcagcaatgtgtaaaataatcatttttcacttttttccaagctttatatatgtatatgcatagcttaaagtagcttaatgtgtttttgtcatttgtagaaactcacaggccacagagtatatcaagtaagtgaaaacattcaatcattgagctatttattcagcaacatattgttgaagtcttagtatgttttagctgctgtgacagtaaataaaacataatccctgctcctggggaagtcactgcccagtaagagaaagagacaagaaaataggaaatttcaaaatagagtcctgagtgcaatgctaaccctaagcacagagtgccaaggaaatgcggtagggtggccagtgagcttggggttcaagaaagggcaaggtaatgaccttgcccatcataaggatcatgtaggatacgtttaccttatgaaaattatacagaaagtcaatccccaaactccattgtgtttcagatacaccccacaccttcatttactgtaataggagcagaaaggtaatgataatgtctgcgtgcatttggcttaatttttctttaaaattggactgcaaaatcatatacacatttgctaacaattttccctctcttttctgaatcacaaaggctctgtttaaattattaatatttatgtcaactaaatgcagataagaagatttactatatataatatgcatttgctaggtatatatataattttatgtattacttatgaaaataaaacaaatacttagcaatcactaaataaatatattcaattcagcaggcaacactttcagaacttggagtccatggaagaaaaatcatgaaacaaaatcttggtggtaaagaggagggagctctggtttattttcaattagaaggtgtgaatctctccctgaccagaagcttatcagttacttactaacataaatagaaaaattaattattactaagtgtagttggtttgacaatatatttgaatatatgaatatgacttcatgggaaaaataataaatataagatatctttggtgatgaagagctgaggatttttttttctattttctatcagaaggcacaagtcttctcttcagtctcctcatggctgacttcatctcatggttcctcagagtgtagatcaaggggttgagcagaggggagatgacagtgaaggtgacagagatggccttatccatggggagggcagtgaagggccgggcatagacatagatgcagggcacgaaatgcagggtcaccacagtgatgtgggaggtgcaggtggagatggctttcctcctgccctctcctgcctgagacttgggtaatgataatatgactatgtaggacaccaggagcaggaaaaaccacagtgtggtgagcagtccattgttggaaatcattagtagttcaagtatgaaaatgtctgtatgggccagtttgaggacccggtggacatcacagtagaaagtgtcaagaacattgggtccgcagaaagggagtgggagcaacagggaaatctgcacgatggagtggacaaagccccccaaccaggcagccactgtgagcccaatgcaatggtctctactcatgatagtcgcatagtgcaggggcttggagatggccacatatcgatccaatgccatcaccgaaagagaaaatacatccacccctccaataaggtggaatagaaacatctgagtgaagcaatgattgaaggagatggtctttctttcagacagaaggtccaccagaaccttgggcactgtgatggaagagaagcagatatcggcaatagataaattatggagcaaaaaatacatgggcgtgtgaaggcgagattcacaggtaacagtgaccatgatgaggaggtttcccagcaaagttgtcacatacaccaagagtaggaaaagaaataagactaagctcacttcccgattctgggtcaggccaaggaaaataaattcttttaccctggtgcagttttccatctccattcaatcatcctctttattctctttggttttaaaccatgtcatgtgaaagcactgggatatttattttgttgtcttcctaaacacctagaatgcagtgcagaaacttcccatgcggttgtagtttttgcagtttgttgcattgttcacgtttttcagatttcagttagtctggtgataaaatcaaattatcatatgtaaagtcattcaataattcttctcctatagaactactttgggaaagaaaatatgttaagtagtgacatagtgtattttaaaaaatcaattacccatatttaatttgatgtttttggtacaaaactcccaatgtaataaatctttcctccctttattctgctttaaggaaatcttttcatcttttcttgtcacttatactgctttggaggtcaaaagttctggctttctcaaaagacagaagtgaaagtaccaggttttttttttaatgttgtggctgctcctggtttatggtcactattattattatcagtttttttttgccctgtacaggaatacattttgataggaaccaacagaagttttgaaaatctgaaaggtgatttttttttcccccaaaggaagaatttcgctgctgagagaggcagggggatgtagtgaagagagctctggattggggagcttggagcattggttccatcggtccttattctgccatcaactagctgaatgactggggctctgactcctccactctgccctgtgtcagatggattctgtgtgggtaataacagttggagtcagcagagatgagtaggaatctgcgtcaagggaaagattcacctgagagaatacaagattgagtgaggcaacatagggagaccctatgactacaaaaaataaaaaaaattagccatgcgtggtggcatacacctgtggtcccagctacttaggaagctgaagtgggaggatcacttgagccccggaagtccaggctgcagtgaggcatgattgcaccctgcactccagcctgggtgacagagtgagaccctgtctcagaaaagagaaaagtagactgagtgagggtatagaccctggggtttgaatgttgatgctcaatttcaggctttgttgaaaggtctaacctcctgtcctgtttttccttcacctttcctgtcttcaccaacagtagaacctatcttcacctactgcatgtgtctgggagaaaatcagctggagagcgttgacgtccctgcaatctccataccccaagagtaaatgtgtcttgtgaattattctcttatgtattcctataaagaagatttcttaaaaaaatttctccccacagataaagaaacgatcttcagaaaggtaggctcattttctcaaactcacagcagtagtaagtgctggaactgaacttaggatgtgattctgtttacctccaaagcttacaacattacatgtgttacaacatatgatcattgtttaagcattcagttgatcagttgtttcttcccatttactttagggtaaaggtggcagaaaaacagtctcagatgaactgtttaaaaaattataaaattttcaggtaagtttcgatcagcataggttcagcccaatattccacacctctgcagcacctccgataagactgtgctgcagaaattgatgtcattaaaatggaacatgcctccttaatgttggatttgattacattcctgaccctctatttattaggccagtgagaaggcttttgtttagccaatgaatccttcagtccttcggcacacattttgtaatccctatagtgtggctgggattctgctagtaatagcaatattcacatgaccacagcaaagttcttactctggagcaattttcgctctgatggaaaatataaacatgtaagtgcataatcacacatgggagatgatgctggtaccaatatagcgctgtggaagcacagcagcgctctagctgagactagtgcgggaagccttcctagaggaggggaagttttccct

SEQ ID NO: 915133 - DNA, 4001 bp, Homo sapiens
ttctggaacaggattatagtttggtatagacaggtccaacaatgtaataaattacattcatgtggtggaagaacaatgggttgagcatctgaagatgtctctgtaattaacttaatataagaccttgaacacatcactttatctctctgggcttttatttccttatcttctgaaaaaaatgttggacttaatcatcttatctgcctgccatatagctgtcttgattgacataaggttacttggtctttggaaaagtaacagtcagttcactcctataacactagttagttcatgctgcacagaagcttaggttatcagttatctactaactgaaataggaagacaaattgttcatagtcagtatagttggtttactgacaatgtatctgagtatgtaaatgtgaattcatgggaaaaataatataaggtgtccttggtgatgaagagctgaatttgttttcttttctttttttttttttttgagacagagtctcactgtgttaccaggttggaatgcagtggcgcgatctcggctcactgcaacctctgcctcttgggttcaagtaattctcctgcctcagcctcccgagtagctgggaccacaggcgcctgccaccacgcccagctaattttttgtatttttagtagagacgaggtttcaccgtgttaaccaggatggtctcgatctcctgacctcgtgatctgcccgcctcggcctcccaaaaaaattacaggcatgagccaccgcgcccggcctctttttttttttttttttgagatggagtcttgctgtgttgccaggctggaatgcagtgacgcaatcttggctcactgcaacctctgcctcctgggttcaagtaattctcctgcctcagcctcctggtagctgggactacaggtgcgcaccatcatgcccagctaatttttgtatttttagtagagacagggtttcaccatgttggccaggatggtctcgatctcttgacctcatgatccacccgccttggcctcccaaagtgctggggttacagctgtgagccaccgcgcctggcctggatttgttttctattccctttcagaaggcacgagtcttctcttcagtcttctcatggctgacttcatttcctggttcctcagagtgtagatcaaagggttcagcagaggggagatgacagtgaaggtgacagagatggccttttctgtggggagggcagtgaagggccgggcatagacatagatgcagggcacaaaatgcagggtcaccacagtgatgtgggaggtgcaagtggagatggctttcctcctgccccctcctgcctgagacctcagcgtcattaggatgactgtgtaggacacaagcaggaagataaaccacagggtagtgaccaggccattgttggaaatcatcaagaactcaagagcaaaagtgtcagtgcaagtgagtttgaggacctgggggacatcgcagtagaaagtgtcaagaacattgggtccacagaaagggagaggcagcaacagggagatctgcacgatggagtggacaaagccccccatccaagaggcagagatgagggcagtgcattgccctctactcatgatggtcacatagtgcaggggcttggagatggccatgtagcagtcaaacgccatcacagagagagaaaaaatgtctgccccaccaaggaggtggaagagaaatatctgtgtcatgcagcttgtataggatatggtctttttctttgacagaaggtccagcaagactttaggagcagttgtggaggagaagcagatgtcaaggatggctagattgcggagcaggaagtacatgggggtgtgaaggcgagactcacaggtcacggtgaccatgatgaggaggtttcccagcagagtcgtcatgtacacaagacataaaaaaagaaacaagaccaaactctggtcttgggattgagtaagtcccagaaatataaattcttttactctggtgacatttcccaactccattgaatcatgttttctctttcctgaatatcttggaaaaaataatgttatttcagaaagtgtttactctctcttaacagattcaagtattaggtctgaaaacttgtgagatattacaatttcaagtttattgccaatgcatgtaaaatgacatcttattatacaatcatgcatacacttatataaattacaattttaaaaaatgtataaaaataatgttgcagttattcaagatacttaggacattattcaagataaacagagggggatattaattatttagaaagagactattgtggcatgggaaatataaaaatgggattagtttgttgtgagaataaggcagtgcttactttgtgtgactagaacaccttgagtttcacagggctgaggattttgttgttttttcccagactggatgctccatttaaatggttctaagaacccctgtctgcaaagaggccccccactggattgaattgtatggaagcagcacccctctcttcttaaatcacaaacttatttccatgaaaaattagaaaatgtttaagccataaaatttgtttctattgctctattcttctttaaggggactgctttgtttctttctttactttaatctactttaggtactgaaaccccggggtggtgaatagctccttagcaatggaaataaaaatattactcagagcttctcttctgttgtttcaatttctttcttaaaaaataatttttgttgagctatcattgacataccatagactgcacatatttgaattcacacttcgataatgtttttttttttttttgagacagagtcttactctgtcgcccaggctggagtgcagtggcgtgatctcggctcactgcaacctctgcctcccaggttcaagtgattctcccacctcagcctcctgagtggctgggattaaaggcgtgtgccgccacgcctggctaatttttgtattttcagtaaagacagggtttcaccatattggcccagctggtctcgaaatcctgaccttgtgatccacccacctcggcctcccaaagtgctgggattacaggcatgagccactgctcccggctgataagttttgacatatatacctgtgacaccatctctatagttaagagagtgaatatatctatcacccagaaaatgtccttgtgcccctttgtagcctgtcccctttacccttccttcttcaggcaacaactgatctgctttctgtcattatacattagtttgtattttctataatattctataagtgaaattctactatttgtattttcttcttgtctgccttctttcaaccatgaaattcatccgttgttttgtgtgtactgctattttgttcctttctattgtatgaatataccacagtttgcttatccactcacttgtaggtgaacatttgggttatttgtggcttctgaatattactcataaagctgctatgaacattcacatttgggtctttgtgtggacatatgttttcagttctcttgggtaagtagctaggagtggaatggctgtaactcttaacattcaatagtatgagaacaaacaaccaattaagcaacaaggacaaattattttaacaaaatgaagtcactaaaagaagttaaaaaaaaagaagagaaaaaaggacaaattatttgaacagacacttcagcaagaagacacagagagagcaaataagcacatgaaaaggctcaacatcatttatcactgagaaaatataaattgaaaccacgttgtaatttaaaaatagtatacattagagtcactggaatgaaaaagattgatatatcaagagtggacaaagatgtagaccaatggaactccagtaggaatgtaaaatggtacaatcaatttgaaaatattttggcagttttttttttttttagatggagtcttgctctgtcacccaggctggagtgcagtggcacaatcttggctcacagcaacctctgcctcccaggttcaagcgatt

SEQ ID NO: 915134 - DNA, 4001 bp, Homo sapiens
gggttagaaaagagtggagttagagaagtgagattggagagatgggtggaggccaggtcagacaacatcttatctataatagtcatgtggattttttttttaaaggcaatggaaagcctctgagtgattgtaagggagagaatgatcaagtcatattttaaaagatggatcaaatgccaagtctatctatgatgtcagtataactcacgatgatataaactctatctgtgatgacataaacccacagatccttagaatctataagacgttttaggtactgttgagcacttgggctctgatgttgtatagacttgggttgaattccagaaaacaagctctgtagccttaagtaagttatttaatgtctctaatttgtaatggactcatgtttaaagtaaagatgatacctacctcctaagaattttgagaaaattaaaataataaatgtaaatcacctggtacagtgtctggaacatagtaagttctaactaaatgttattaatatgatgatgatgatgacactgatggcaacaacagtgaccctaggaaactatgaggaagaaagtgatttgcccaaggtaatttcctttttcctcattgacgaacagtcaatcaatcaatcagtctccactgggactcagggtccaatatttcaagagaacccttgtctcaaagaaatttaaaaatattttaagctcttccaatgtactttgtgtccaaaaagtgatatcaggaaagagacaccagatttactagttgaaactttctcagcaaggccaacatcattcttacgtgggaaagtggcccctgagccaaacagtacttctacatagaacttgatactttttatctgggaggcatttagaagcagttctaagacactcatcccatcttctattgtggctaatagttcaggtcaccagaacctgattgaggttaagaacaatggagaagaagtaggcatagattttatctacctcgagggtcctatccagcaggctaataccctgtagcatctttcagattctcaggtcactgcctctgctaatgtaagggtctgtgctccaggggaccaatagggtcctttttcctcctccacagcttcttcatggccatgatcacttccttgtttctcagggtatagatggcaggattcagcatgggggtgacaattgtgtatagcacagagacggccttgtccatggggaatgtccgaaaaggccttgtatagacgtagatgcaaggcacaaagattaaggtcaccacagcaatgtgagaggcacaggtagacagggccttgctgcggccctcccgtgagtggcttcggagcatgactagcagtgctgtgtacgatcccagaagcaccagaaaacacatcagggtcaccaggccattgttagacaccattaaaagctctaagacaaaggtatctgtgcaggccaatttgatcagctgaggcacatcacaataaaagttgtccagcttgtcaggcccacagaatggcagctggatagtcaatgcaatctgtactatggagtggatgaagccccccacccaggaggctgccataaggagtgcacagacagtctgattcataatgagcgtgtagtgcaggggctgggaaatggcaatgtagcggtcatacgccatgacagtcagcaggaagatcttgatgcctccaatgaagtggaagaagaagagttgagtcaggcatccaccaaaggaaatggtagggttgcctgagagcaagtcaaccagcatcctaggtgctgtgatggaagagtagcaaaagtccaggaaagaaagattgcccaagagaaaatacatggttgtgtgcaggtgtgggtcggaggtcactatgaccacaataagaaggtttcccactacagtcataaaatacacagcagagaaaacagtgaagaaaacaaaccgaagctcccaaacctgagagagccccagtagaacaaatcctgccacctgggaatgatttgctggattcatctggttggtatgaccttgtcaatgaacctgctaagaaaaaaggacatattattcaggggatctgcaaagttctctaaaataattccctctgcttcctctgggaaattcttcactctttcattttccataaggagaatgttgtaagtggttctgcaggacaccaagcatttgaacatcatatattggtgatatcaaactccaaaggcataaaactcaggatagcactcatactatttctggtttatgagaatcagaagtaataagccctcaaaaattgaaaatggcatgtagagaagagagtgttaaatggaaaatgaattttgattcttccagtaactagttgtgtaaacagaaacaattatctgcagttctttaagcctcgcttcccttgtctatgctataaaattaaccaaaatgtcctcaaagtctcctttactttaatatttgataccatatatggccttaatttagaaaacctgatgcatccctgcatgccagacatttagacgaagcttccatggattgacagagttctaatatttgtcccaaaacaacaggaagtgcaagttgtccattacagccctgaataaatattcagttgccttctgatatagctctatcttggatatacattttcaggcctagcaggatactgaagccatgggtaagggagcagaatagaaatcaccggggccgggcgcggtggctcacgcctataatcccagcagtttgggaggccgaggtggacgcatcacctgaagtcaggagtccgagaccagcctggccaacatggagaaaccctgtctctaataaaactacaaaaattacctggcatgatggcgggcaccggtaatcccagctactcaaaaactcagaaattgaaaaatgggatgagcagcaggccgaggcaggagaatggcgtgaaccttgggggtggataccgccgtgagctgagatcacgccactgcactccagcctgggagatggagtgagactctgtcaaaaaaaaaaaaaaaaaaagaaaagaaaagaaaaagaaaagaaaagaaatcactgccccctgcactttaaaagggtagtgaagaactactagtctctctaaaattagataagaaaacgtgatagaaaaagcttcctgtctggtggctctgggaaacccagagaaactatagtcccggaggaaacataggagaaggcaacaagaatattaaatcacttccgaatcgtttgaatgtcaatattaatttcagagacattacccaaagaataatttttattcataggggaagcagcaagaggaagctataaatattaattaaaattttaaaaccaccatctaaaaacgcagagctaccttggaaaccttcaaaataaaaggggtgttttcatacacttaagtactttaaaacatactcagaaagatgactaaacaaactctagaataaaagccttcatgttgctgaatagaaccgtgaagtgtcatttcaatttaacttaatattaagtatggatttcaattatattttctttcctttgtccattcattcagtaagcatttattcagcaccttctacttactaggcactgtgctaaatactaaggggttaaagagtaagctacaatgatttaatacatctctaagtgtgtaacactctgcataggagtgttccaacacctgcccatctattaggtttcatcaaaacatattgatatggtttggctctgtgtccccacccaaatctcttctcgtattgtaatctccacatgtaaaatgagggacctggtgggaggtgattggatcatgggggtggtttcccccatgctgttctcatgatagtgaaggagttctcacaagatctgatggtttaaaagtggcagtccccctgttctctcttacctgctaccatgtaagatatgccttgcttcccctttgccttccaccatgattgtaagtttcctgagacctctccagccttgtggaactgtgagtcaattaaaac

SEQ ID NO: 915135 - DNA, 4001 bp, Homo sapiens
gcatgtatgtaccaaaactatacaagcatctttttaatttcagctggtaaatcagtagactagacctgagaacaggaaatacttggtccatgtataaatttgtccatgtacatatttgacttacagtttaaaatattccttccattttcactaattggtgaaatatacttaagattctgtacttaaaatataaaatcaaggccaggcgcagtggctcacgcctgtaatcccagcactttgggaggccgaggcgggtggatcacgaggtcaggagattgagaccatcctggctaaaatggtgaaactccatccctactaaaaatacaaaaaattagccgggcgtcatggcgggcgcctgtagtcccagctactcaggaggctgaggcaggagaatggcgtgaacccaggaggtggagtttgcagtgagccaagatcgcgccactgcactccagcctgggcaacagagcaagactccgtcccaaaaaaataaaataaaataaaataaaataaaataaaataaaatcaagtgatttcaataattgactggatatagcagagtcaccagagaaagcatatatgaaataaatgtgtctatattctgtgtatatgcacatttaggaagagaggggtaggtaatagggaatgttgattgaatacctgattaatgccaggagcagtactaaccttcacaactatcatcctcacagcattgatcacatttcattcttttgacaaacttgtgagcaagtaatgatatttccatattactggtgctaaaagtgagataagtgttggtatgagtcacaggtaacaccaaaaagcatttagggtattgatttcaaccttataccctcttcttctcctgagtccacaagctcgatagctcacattgtttaatctcatttcttctttttgtttgtatactcccgctaatagaatcgagcggctatgaagatatacaatgaagtagtggaagaagagctagcgacctgttactcttaggctagcattttgagaaaactaagtcagacagacttccactctccatctgactgctcacccccattttctgctctcggaaggcccaagtctcctctgcagcctctgcatggctgacttcatctcttgatttctcagggaatagatgatggggttcagcatgggggtaatgaccgtgttattaatggatatggttgtgtccatgggcagcgtcatgaagggccggcagtagatgtaaacacaaggcacgaagtgaagagtcaccaccagcatgtgggacgtgcacgtggagagggccttgttccgcccctccccagagtgggatctcagcatcaccagaatgacagtgtaggagcccaggagcaggaggaaccagagcagggtcaccagtccgttgttagagatcatgaaaagctccaaagcaaaggtgtcagtgcaggccagttttaccacctggagcacataacagtagaaggcatccagtgtgttggggccacagaaggggaatggaagcatcagaattacctggatgattgaatgcaaaccaccactcacccaagaagccaccaccaaggccacccacacctctttcctcatcatggtcacatagtgcaggggcttggcgattgcaaggtatctgtcataggccatcacagagaggaaaaaaatatctgccccaccagcaaagtggaagaaaaagatctgtgccatgcagtcattgtaggagatggttttcctgtctgataaaagatccaccaggaacttggggacggtgatagatgaaaaaacgatgtccaggactgatttgttccgcaggagaaagtacataggagtgtgtaggcgggactcacaggtaatagtgaccacaatgagtgcatttcccaggactgttgctacatacacagcaaagaagaccacaaacaagaaaaactccagctctcgggaacgtgtaagttccaggaagaaaaactccttcacattagtgtggttgatctggtccatgatggggatgactctcttccaggtcctacctttgatgaagatatgttagaacttggattatggtgacatgaggtggcaaaatcattgatcacatactgctctcaagcatccaggtcatcatgactacacagaaaaactgggccagtcttctctttgtggtctggaaattcttctttcatatggttcttctttcttattgtaaataccttgggttaacaggaaaaaaccatcacatgtctgtatcctcactctgaccagagagagatggatggactatggccatttgcctatgctttaccaagggctttcacctgcaatagctcatactgatttcaattctcatgaagtttctgaagagtctttagtatggttatctccattttatatacggggaaactgaagctttacagcagttaatgacttacatctgcatagtcgcaaaattagtgaattgtaaattgaggattcaaatacaaatcaatctcctgacttgagaaagattccctccttgaccaaatgttggttaggctcctctgagcccttttcttgactatgactcaaccttgaccttctgtgtctgtctttgctgagcccaattttaacaggaatcttgccaagtcagtttaatgagaattccacacccttgaaatctaatcaaattcctcaccccttacccttttatatatttattatttttaacctcatccctcaccctcaatatctaagtccttggccagtctttagcaagaattcttttatgccagtttagcaagaaccaccctacctttgatatcacttcttagtaattttcaatccactgacctccctcactctgctcattgcttataaatcttcacttgttttcactatatttcgagttgagctcaatctttttcttctattgcaagagttttaaatgaaatctatcttcctgtctttaataattgtctggtgaataatttttctttaacataacagtctccagaggtttttccactgtacaactctgagaaatcagagagtctggggcttactttggcttaccggaattctagtgtgtatataaggcttaaacagtttattaagtagtttgactacctaatccttatctcatcccttataaaaagagaagggtcaggccctcataagtactcctctttggcactctgggaagcctggaccttgctattgacacacagggctctttgtatagagccacagtcattgttcagggcatgttttagtatcacagaaaaactgatcattagagcgtcacaggacttcagagataaattagtctaatgtttcttactttagaagtgactagagaaggacatttatttttttcagaatcagagtttgaattggtgaaatatagagaactgtaaacaggtttgttgactcaaattccagggatattctactattgctatataatagcaatttactatattgatacttctttttcccaaatcagaaattcagtcatatgaggacaaacttctttcagtaagaatatctgtatgaaccaggtgcagtggctaatgcctgtaatcccagcactttgggaggtcaaggcaggcagattgcttgagttcaggagtttgagaccagccaggacaatagtgagaccctgtcttaacaacaacaacaaattaaaaaaaaattagccaggcatggtggtgtgcacctgcagtcccagctactcaggaggctgaagtggggggatcgcttgagcccaggaattcgaggctgcagtgagctatgattgtgccattgtactgcagcctgggtgacagagcaagtccctgtctctacaaaacaacaaccccgcccccaaaccatttgatacagcaggcatgtgaaacaaaagaatatctgtatgttccaaggactcatattctagatgattttaaaaaatttaaggggccgggtgcggtggttcacgcctgtaatcccagcactttgggaggacgaggcaggcagatcacgaggtcagg

SEQ ID NO: 915136 - DNA, 4001 bp, Homo sapiens
ttttgtatttttagtagagatgggctttcaccatgttagccgggatggtctcgatctcctgaccttgtgatccacccgccttggcctcccaaagtgctgggattacaggcataagccaccgcgcccggcctattatcatgattttttgtagagatgaggtttcactaagttgcccaggctggtcttgaactcttgggctcaagtgatccctccacctcagcctcccaaagtgctaagattacaggcataagacacctcatgtggacaagtacatgttgttttccttgcttggattgttcttttctgatctttttccccttgaaaatgtctactggctgttaaatgtctttggaaactctcaagtaatattgtggctacagttcccctagcactttgtttatttattttttattttttttatttttttgagatggagtttcgctcttgttgcccaggctggagtgtgatggtgtgatctcagcttactgcaacctctgcctcccgggttcaagtgattctcctgcctcagccttccgagtagctgggattacaggcatgcgccaccatgcctggcctatttttctttgtatttttagtagagactgagtttctccatgttggtcaggctggtcttgaactcccgacctcaggtcatctgcctgccttggcctcccaaagtgctgggattacaggtgtgagccaccacgcctggcctgtttatattttttaataagtattttgggttatgcctccaggaaggtgactacatttaatctttttgcagcaatctgaatcccagtactttcagacatatagtgtatgctctataaaaatttgtggaatgaataattgaaagtgagtagggaaagacttgagtggattttgtcttagagcagtatcatccacgtggtccccaacatatatgatggaataacttcttttaggactcgatggtggccataggtatctctttgttttgggcatgaacaagctcctttcccattttgagaaagtgaaatttaatgtctatctttaaatatgggtactatcttacccttattgaattaaaatcctttctgattgtcctagccgtctcttcagtttcctcatggccaacttcatttcctgattcctcagcgtgtaaattataggattgagcaaaggggagatgacagtgaaggtgacagagatggcagtgtctgtggggagggcagtgaagggccgggcatagacatagatgcagggcacgaaatgcagggtcaccacggtgatgtgggaggtgcaggtggagatggctttcctcctgccttccccagtgtgagacctcagcatcatcaagatgaccgtgtaagatatgaggagaaagaagaatacaaaccaactgactaacccattatttgaaatcatcaggagctccagagtgaaggtgtcagtgcaggcaagtttgaggacctgggggacatcgcagtagaaagtgtcaagaacattgggtccacagaaagggagtgggagcaatagagaaatctgcgctatggagtggacaaagccccccacccaggaagccacgatgaggcctgtgcatcgccccctactcatgatggtcatatagtgcaggggcttggagatggctatatagcggtcaaacgccatcacagagagagaaaaaacgtctgctccccccagaaggtggaagaagaacatttgagtgacacagccactgaaggagatggtttttgtctctgatagaagatctatcaggaccttaggagctgtgatggaggaaaagcagatgtcaagaatagacaggttgcggagcaggaagtacatgggcgtatgaaggtgagattcacaggtaactgtaaccatgatgaggaagtttcccattagagttgtcatgtacaccaaaaacaggaaggtaaataagacctggctcagttctcgggactgagtaattcccaggaaggtaaattctttcactctggtgtaatttctctgatccattgaatcacagatcctttatcaggttcatctctggaagaaataatagtgcagttaaataatattgataggtcctaaaatctagtgttgtcttttcacttaagatttggctcagaattaggaggaagctcttttccctatgcactcactgtgtctgcaagtcagtatgccaccactggatgaaagattacccaggtttttgattcagtcatcccaggagacaaagttctctcactgctgctgctgaaacagaggttgcaagtccgtgaatctattcaattgtactttcactataaaatctgacacttaaaataataaataataagaagaaatctgaatatattaggatttctgttcataaaagcatcattatgagaattcaaagataacctgcaaatggagcaagatatttacaatacatttatctgagaaatgactcatgttcagaatatataaagagcctctacaaatcagtaaaaaagctggatgacccaacctcaaaatggcgaaagattgaaaccaatacttcacaaaaggcatatccaaatgccaattcaacttcattagttatagcaataagccacaatatacatgccagattggctaaattgaaaaagatagaaactgaaaagatgaaaaagtggtggtgaagatgtggaacagttggaactctaatacactgctagtgggtgtgtaaaattggtataaccactttgctatttgattatctctgctaagacagtatataaatatagttttatacataggaggatatgtatatatctacatgtatgatgatatatctcttttaaaggatctatctgtatatcattacctatatatctcttaaggacatatttctacttctaggaaatatgtacatatgttcatcaaaagacatgtcctagaatattcatagcagcactgttattttttatattttttgagacagggtctcactctgtcgcccaggctggagtgcagtggtgagcttatagctcactgtagcctcaaactcctgagctcaagcgatcctcccacttcagcctccctagttgttgggacttacaggtgcctgtcaccacacctgaataatttttttctttttatttatttttttatgctggaataatttttaatttttttatagagttggggtctccctatgttacccaggctggtctcaaactcctggcctcgggtgatcttcctactttggcctcttaagtttgattacaagcatgagccaccacacctcaccagtagcactgattataatttcttcaaactggaaaatgactcagaaatccatcaacagtagaaaagataaataaactgtgttacgttcacacaatactatacagcaatgagaatgatttacactatacgtaataatataagagaatcccacaaacataatgttgtgctgaataatccagggaccaaagagtatgcactcttccattttattcatatgtacaaaactgaagggagcctaagggaggcttctgggtgctggtttacaccagtaggcatattctgctggtgtaaaaacattcattgagttggccgggcatggtgactcccgcctgtaatcccagcactttgggaggctgaggtgagtggaggcctggccaacatgttaaaaccccgtctctactaaaaatacaaaaattagctgggcgtggtggcacacgcctgtagtcccagctacttgggaggctgaggcaggagaatcacttgaacacaggagacggaggttgtcatgagctgagatcatgccactgcactccagcctggtgacagagcgagactccatctcaaaaaaaaaaaattcattgagctgtacatgtatgtgcgtttttctgtatgttagcatatcatacttcagtataaagttttaactaacaaacataacatttatcatttataacactttaatctcatgtttaaagaatgaattacatttaaagcaaaatttaatggaccactcacttttataa

SEQ ID NO: 915137 - DNA, 4001 bp, Homo sapiens
aagggaatggataaatcaatcattatatattcatatgataagataccgtatacatcaatgaaaacagtcagaaaacttaccaacatgagaaatgactcacaaatgaaacactaagaagacacacacgcagcaacaaaatgtaaatcactcttactcttcaaagtacaagaaaagataaaaacattattattattattattattatcattattattattattatttcagacggaatcttgttctgtcacccaggctagagtgccgtggcatgatctcggctcactgcaacctccgcttcccgagttcaagcgattctcctgcctcagcctctcgagtagctgggattacaggtgctcgcccctgcgcccagctaatttttgtatttttagtagtgacggggtttcaccatcttggccaggctggtctcgaattcctgacctcatgatccacccacctcagcctcccagagtgctggtattacaggcatgaggcaccgtgcccagccgaaaactatttattttaggaataaatattgtggttaactttgggaggtattaatcataaagaggaataaggaggacctctgatgtgctgataatttctgtctcttaattcagttgctgatttcacaatcatgctcagtttgcaaaaattcgtgagctgtacacaggcaatacatgcattttctgtgtttagacttgagtaaaaatgtaaaagctgagagtaatatttcattgatcttctcagaactttaaggcacaaaaaacacataatctgttttattttttcaacacaacgccatgtaatcctttatttttaagaaattttctggttatttcatgtcacataagcacaatcgtaatgattaagaaaggcggaggagagtatggataagaataatgttcaatttgttaaagagatgtcaatgtagaagtataaaaccacagaagggatatgcttcctgtttgcccacttttctctccaaacattaaggacaagagcaagatgagagtgaatttttctcattcatcagggaaccacggcatgaaaagcagaaacaattcagaaaagttgatttcttttcaggagtatttgacaacaccacactttcctcatggcgttcttcatctctgtgtttctcagcgtgtatatgagagggttgaacatgggagcaatgatggtataaaaaagggcaaacactttatcttctgagaatgttgtgaccggtctaatgtaaatgaacaatgcaggtgcaaaaaacaggaccacaacaattacatgagaactacaagtggcaagagctttgctgcgtctctctgcagagtatgctctgatggtatacaatataaaaacataagacaacaacaagacaacaaatgtcaccaaagcaattaagcctgaattagcaatgactaagagacctatcatgtgtatattagaacaggccaatttcagcaaaggatacacatcacagaagtagtgatctatctcatttgggccacaaaatggtacaaagatggtgagaagaaactgactggcagaatgtataaatcccccagtacaacaaactatgatgattgtgttacacttttgcctgctcataataatggtgtagtgcaggggcttgcaaatggccacatagcggtcataggccatccctgtgagaatgaagatctctatgcctccaaaaaaatgggtggtaaagagttgtatcatacagttattataggaaatggtctttctttctgccagtaagtcaaccattaatttgggggtcactgtggatgtgtagcaaaggtcggagagtgagaggtaattgaggaagaaatacatgggttggtgaatgagctgggtgcacgtgatagaaatcattatgagtaagtttcccatccaaatagcaatgtagcaaaacaaaaataatacaaagcagaggacttcaatgttcttattttgggaaaaccccaagagaataaacaaagtgctattattgcttttttccatggtccagtgtagatagaacatataagtcacctgaaatgacataatttataagcttacaagtctttgttaagaagtacaatgatcatattttatttgaggaactagctagatttaatttacctcattcaagtggttcagagagtaaatatctggtattcaattaaaatggctttctaataagactctccatgtatatatatactagatgatttccattagctctctagcacactgtgatcaatccctgccctagtaggtatgaattctattgttcaatcaacaatattaaaattctatcatagggaatgtttatttccaaagtctaatgtaatatacaatattgtaatacaaaataattccttgcaaaggatactgcttttactctctgggattcaaaatttattaaggaaacaagtcatacaaatattattttttaaataatgtagaaaattcattgaattaaccatagcactaagcattagcaatattgatatcaacaaatgggatttgattgcataaactaaaaccaacgttgtaggtggtgaacaaacatatcttaagttgttagtcttgaatgttgctgcaaagatgacactgaattatccaatgtgtttcattgctttctaaaaataatattacatcaaaatattttaattaattcttaccagatgtcctcagaatgactgtccatttataatatacattttcagccctaatttcattcttgacttcttaaacccccttaaatttcttcctcatctctccatgttaccaagttaacattgttaccaatacaatgaataatttcattgtaatagaaattgaaatttcaagaagacattcattttcatagtggaatttcaagaactagaattagattaaaggcacttttttgagaaaaaggttatgatcttctccataatcacactaatctttgccaataaataagaaaggcaatttcattttatttgaagaagaaaattataatattgaatacactactagtttgaattattcttaaaattgcttcttatacatttccattttcacaaatttatgtatgttatttaaaacccacctgaaatacacttcttaaccccaacaagcatattaagactcttacataaaattaagcctgtaagtaaagtaaggcacagaatgttctcagacaaaaccagtgcatcaatctgtcttcatttactgtaagtttactaacaacgtaatttgaatccctataattgttgtcttggttttgtcagctacagctgatgactaaattctctacctggcaatttttcttctgggttcaacttttttacagacatagaaccaccatgtttaactactacaatgttagtgcttttttttaatttaccagtaaaaatctaatcatgctttataatttggaggcaatccccgttacttgtcttaattcagccactaacttcaaatgtaatcttgcaaattttataacttgttttaaaatgctttatcttcactttaaatgtaaggaaatatgtcttcctctgtgtacttagagattgatgctgaagctcaaccttaataatagatgataaaggacatttaaaagaataaaatagtgtacaagggatgatatcgttgtgctaatatcaatatatcacaaggaaaacacatgaaaattacattaggattctagagctttaggaaattgtacatagtaacacaaatggtatatagcaaactaaggcttaaaatctgagttctctgactccaaagtctgaatttataaccctctcaccatatgtccatgtgaaagtaagaaaactcacacgggataaactgaacattaatcctgactgtcccaactctgaagtttgcatacatgtctgaatttctcaggcaaagtaggacacttcttgaatttcagtcatcgctccattttagacagtgatacttaaatggaaaatgtctaagttgaaatatagaactataaattaggccaaagtatttattaaaaa

SEQ ID NO: 915138 - DNA, 4001 bp, Homo sapiens
aggggtgaataggaagagaaaggggaatcgaagatattatgttaaaacagctagcagccaccattgaacaacagactttgatttaggtctttacaaagtcttataggtcctctcacagccttctgaagctggtattgtcaatatctccttctgtaaatgtggaaattgaggcccaatgaggttacatgacccacgaatgtttaagagatacctaatccggctcgtttaattgcattctgtacaaacttggctccctctagcggcaaaatggagcaaagcaacaggggttaaagagggcagcagtcagctgttctgctggagagaggaatcagcaccactgaaagaagtgctgacaacttgttcttcctggttgttctcttcatcatcccaagtcatcatcaccatcattcctggtctttcaaaagttcttggtcattcctgcttggtgtccatttagtcacactttatcaagaggtcctgaggaaaagctctgaaagctgacttagggacctgtgttctagtcctcaccctgctctggagttaaagtgtaacttttagtaaatcccttgacctctccacattatttatttacttatttatttatttatctgcctgctgagagcatgaaagggtaagagtaaagtggctctttactcttaaaagaaaagaatgaattccattgagcactgtgttagccaacacaaaggaattatgtagtgattttattcatttatcaatgagatatctggacttccaagacactccctcattcacaggccctcacacgtttcctgaatgagctcttaaatatcgcactaaaagcatcctggactgtactctccttgagggaaagattatatcttacttttatttgtattctcactcactgtaaacatccaataaatatttaatgaataaaggattgaaagaatatgtggaattattataacaacaagagctaggaggataattgccattgcaaacatcagactggaaataaaaaggctgtgttagatgctacaagatggaaagtctcccaatttcctagctggattgagattctctggaatgtcacttctcccctaagctcctcttgaccctaaacagcttcctcatggcatttttcacatcgttgttccttagtgtatagatcaaagggttcagcaaaggtggcatcacaatgttaaagaggatgataagtttgtcagcagccagggtggtggagggacgaatgtacatgaacatggggggcatgagaaccaaaaggacagtgattacgtgtgagccacatgtggagacagccttacgccggtcctcagatgactggcttcttaggttcagtaagatgataacataggaaatgataaggataaaaaaggatgctaaagaaatcataccgctgttggccaccacgatgagacctaccatgtaggtgtctgcacaggccaacttgagcaggggatgaacatcacagaagaagttgtctatctcattgggcccacaaaaaggcagctgaaccgtgaggagggtctgcaggatggaatgcaggaagccagctaaccaggaggcccccgctagcaggccacacttccggcaatccatgatggctgtgtagtgcaggggcctacagatggccacatagcggtcataggccatggctgtaaggaggaagatctcagtgccaccaaagaagtgggcagaaaagagctgggtcatgcagccattgaaggagatgatcttatgctccacaaaagtgtcagcaatcatcttgggtatggtagtggatggataacatatgtcagcaaaagacaactggctcaggaagaaatacatgggagacttcagggtctttctagcattgatggtgatgatgaccagaaggttccccaggacagtgagcacatgaaagaggaagaataccacaaagcatgtatgctgcatctctctgctctcaaaaaggccaaataaaacaaactcagtcacattgttcttggcacccatggattatctgccctgatgaccgacaaagtggctggctggctctgcaaagacataaattatgagacataagaaagttttctgagataccaccaagattatggagtaagaaagatactagccttcatccccatcacaaaaaatacatatataatatatataatatattattatatatatatataaattatatattatatataataatatatattatatatatataatatataatatatattataatatatattatatatataatatataatttatattatatataataatatatataaatctataatatataaatatatatatcttaaatatataatatataaatatgtatatcttatatatatatctctagagcgagagagagacagctatccacaaaccaaaataggtctgcgagggttcaagggcccattaaagaatctgcagcaatacagaggagcaaaaacatggagaatagccgcacacgaaggatttctagtgatatctgcatacttgagatgccaggagatggttaggaacaaacaggaaaggttgaggcaattagtatcagccatgtggtggtagtcatcaagatccctgctttgcagagaacgctagcatttatgccactgagataaccaagagccattcccaccaggaaaccctagagagggagacacaactgtactgcctccacctgcaagaagcagatgctattgagctactttggaaaaggagctgccacctccccaacaccatgcaaaccccaaactgcagctgccccttgagagctcacactcagacccagggtctgggactgcactgcacccacccatgtatcagacactgggccatcactagagcaagctctgggccctggagtcaaggtctctctgggcatgcccacactttgggcaccagttcaccctccacagaaagttagtccctaccccaactccagagccattgtaactctacatatatctatgctcccattcttggctccctggctgcttcaaagcattcacacctctagcactgttacctatgtggtggcaggagtgtcttcaccctaagcaccagtgtcattatcattccagatcccagaaccatagttccttcaggtgtgcccatgacccaagcctcagttacatggctgcacaataggtgccacccaaaatacacctgtgccaccaacatcaagaggaagcacacataccagaaccatgtcaaatggttccctaagccacaacttccccagtgggagaaaattaaataaggaagaccttagcagccactaccagcaacgagcctgaaaacccttgctgtcactgcaaacatccaagaatttggccactgaggatccctcaaatctgggtcaacattgacgtcagctaacagggccacacaaagactataaagccacatcccactggtgccaaaaccaatccatcccacccactcagtccatcccattatatgcttgtgtcagtctgggccacaaggattgcaaagcaccatcatgccccataagagaaaatctttccacactgaaattagccaatgaaatttgcaagagatgactactccaccaaatgtgcagacatcaataagagggtaacaagaaacaatgaaacaccaagaaatcataccaccaaaagaacacaataatttccaagttgctgaccccaaagaaatggaggtatgtaaacaggctgaaaaataattcaacataattgcttttaaagcttcatgaagtaaaggaaaatacagagaaatcatttttaaaaaatcaggaacatagtaaaaaaccaaaatgagaaatttaacacagatattgaaaatacattaaaaatcaaataaaaaagagagaagacttataaataaaatgagaaatgaaagaagagacattacaactcataccacagaaatatgaagaatcacaaaagactactatgaacaattatagacttacaaattgaataacccaaaagaaacagata

SEQ ID NO: 915139 - DNA, 4001 bp, Homo sapiens
ccatctgaattgttgctaaaataagagcaaaatagaaattatatgttaatccacaatgacaaaaaagcaaacaggaaataccagctggtgaaagattttcacacattttttgagaaatagagaacagtgttactaagtagttaacttagcattgtgggggaagttatagccatctgagcaaggacagagaaaactagcaagttagttcacttgcaaaactcctgagatgctaaatgcttgtagcatacgattctacagaatgtaggagtgaaacatacattgtattacatgaaaattattttatttccacaggccattttctacacagacaggtaagaattcctctatattacttcacaaaagattggaggtttattcttttgaaagactgagctaaataattcccagtattaatgtggaggacagtgatgaaacacgcatgcacaaggataagtgaaatctacagtgtgaactatgaggccctttcctcttgctgctccccagatgtcagcagtcagcacacattacaaccttatcaattccccactactctatacatagcctaggcagcagggtagaggattgtttatttagaaggaaatatatgagtgatactgtactgcccgaaacctcacaatttaagcccaaaaatatgaaaacacttcccacacttttggaaattctaaattttttaaaatttatttcctccactttatacatatggtgagtttctgctttcagggatgatgataaaaccagtgaatagcaaggtagggtaatagaaatctgtcctcaaaggaaagccaagaggaattgctcttctgcacttttgtgattctaagtttaataatatttctgtgtcatagatatttcaggaagttatctaattatgaaatagtataaaaatgctataataatgaaaaataataccttactcttttgaatgtgttattgtctcatttttccactccaaatcccatgaggttgttattgtcttgattgcacagatgagttaaccaaggctgagaaattttaaggtcatctagcttaaattattaagtccaactatttccctttagcctccaagaaaacatttctgccccacagtttcttcattgcattctttacttctgcatttctcagtgtataaatcagaggatttaacatgggagtgataatggtgtaaaatacagccaccatcttatcctctgaaaaggtcgtatcagggcgcatgtacataaaagtacaggggccgaaaaagataacgaccatggcaatgtgggagccacaggtggagagggctttgcgcctgccttctgctgactgctttctcagggaaactaggatgatgctgtaggagattagcaagataacaaaactccccagagcaatggtaccactgttggctgtcacaacaacaccaacaatgtatgtttctgtgcaggcaagtttcaacacagggtgaacatcacaaaagtagtgatctatctcattgggtccacaaaagggtagttggactaccagagccacttggataatggagtgtaagaacccacctacccacgtccctaataacattttattgcatgtctcccggttcatgatggtcatataatgtaggggtttacagatagccacataacgatcataggccattacagtaaggatgaagatctcagtgcaaccaaagaaatgtactccaaacagttgcaacatgcaccccacataggagatggttttgtcctttgctaacaggtcaacaatcatcttgggagctgtgactgaagagtaacaaatgtccacaaaagacaagaagctgagaaagaaatacatgggtgacttaaacaggttgctcaggcaaactgtcagcatgatgaggagatttcccagaagaatgattatgtagaagaaagaaaacaccacaaaacaaactttctcaatctctgggctctgagaaagaccccagaaaatgaattcagttacgttgtttattttttccatggaatgggtcaagttcttaggagacaattaaattacctgaaaaaaagaaaacataaaaaggactgtatttattttatttctaacgcagaaccaacggaaaatcacagtagatcaaaagaggaaaaaatgctgattggcatgcatacttgaagaaattgaaatgcatctattttgatcatcttacctcaagataagatcacattcgttcacttcaggtgagaaagcaaaatccagagagataaagtaaatcccctcaatctcatatatatgttaccacatgcctctcttctctcaccttttattaatgtttatttagctgtttctaaactttatttagtttttattttttatacgacactgagttttgaaacaacttctgtattttgggatatggtaacatctatgttatctactggcaaatatctggaaatgattgctttatttttgacccataagtgaaaacatacgcccacatttcaccttttgaatactgccatgcctgattatcacatcaactcacaaatattctgcaatttctctgcaagtttaaccactcttgcctttgcaagttcttctcatgaaactctatctttgtgcacatgatgtatgcacctccaccagtgtggtctcgagccctgatagtcaagatgtagtgtgaggtaatagaaagaggagcaaaattacacaaaattgattctaaaatgatactactgtaacccccaaggtaaattatttaacttaacagaaattctcttatcccatttgtgaaatgacagtttcaatttcactgttacatatcacattaatagttatttcagccgtgaacttaaatcacttctgtcagtatgaaatattcataaaaccctgataggaaggcagaaataaggtaaagcaataaaagaaacttctagagacaaagcaagacctgtttgatttgaaaggagagggagtgaagtcttatgtaatttctccatgtgcaaactcagaatactttaggattttccaggactgactttgctttgtatttttaaacatttttctattaactgaaacgaagaaaatgggtgtaaaaaagagaagactgtcccttaatgtcaacattgcttcatacatctttctaatctttcaagttttattctggccatattcattctcccaatttggtcgatttatatttctggaagagatcatcactgaatgacaattttaatgggtttaggaaaatgacatttatctaaatggatgaatattcattggtgaaatttcaggcactacaatggggtcattggtacatggatggaaaagggtatctgtaatagttttgattaaaggagcttttaggattctttcgctaatcaaccgcaggtgtaaatgatccctccaattacaggtggtctagcagagacctgtagatcctctcaagatccatccagctgaatgctgacaactcctactaaactctgtgctctcagctatccttatgcagtgaagtcgtgcctaatacttccagcttttgggaatctataggattgtgtttcttcaggtattcatgttagagttggcacagtagtcattacaggtgtgctatctcttgtgcattacaaaataatgattgtaagagtaatagtaatatgatttagatacagtctcaagcacatcccctgcttttacatgctcattcctcttcagttatcctgctgaattaaaagaaaaataccatcctccactaagagagcccctcaacttaaggaagctcacaacatagcagttttgagcaacaattatttatgttgctttgctctcatctagaagaaactgggcttttgcacacaagcctgaggattttttcccctaccgtccatatcacaaggttctagaggaattttttttttcattcaccaatctattttattcaggtattcatttatcttaattgcaggattgagatctaaagttccatttatcagaatgtgcatcctagtaaaggctgttaaccttct

SEQ ID NO: 915140 - DNA, 4001 bp, Homo sapiens
gccctaaaggattcccactgagtgctgtgagaattcaaagaaagaaaatgacatacccagataagataaacatgggggcttcctaaagataggagaatttcagatgggccatggagggtaggtaggatgttaataggtagagataaggaaaatattataggtggagggcacaaggagatgttcagaaaacagtatgctctaatagtgtaattgaaaaatgaaaatctaacattatgagaaggtcatgacttgagggtatttcatatcaagtaggaatttatagttgattcagaaggcaatggggagtcattgaagatttttgaggaggagagtgatgaaatcagagaactgcttgaaggtgatgagtctgaaagcatgtggaagaaaatttatctgatggcagtgaggggcaggattagggttagggttctgggcacattcttatagtctggtggctactggaataagactcaaagaagaaggttaaaatatgggacagcagtgccttcaatttgcttaaaatttccctgttgttcttttggattcttgagaaccctgagtctaatgctagcatgagctcatgtgaatctcttgacaagagtcaacgtcttccattctcaggactaacccttctcagtcagcttgcctgcttaaaaccctctcagcaaaacctcagtatgtcaagtcaagagactttccaatcatgcaaatgttcaaactgataggacataatgaccagtgctccctgaaacagtcattctcaatcctcacctccctcttcaccattcccagactgacctggttttctggaagagtttattctctttagaccaaccaatatatctcaaagccactgtcagatttggaagcacagcactagaagacccctcttactccatcctagagctccctttaatcttgtccaatcccataagatgaggaaactgaaacttcaaaaaaggtgactggcccaaggccactcactccattgggcaaggtagatgcagagtgagatcttacatgccccaatttcccatcccttactcctcctattttccctaactaaatcatctacttctcttctcaaattacttttcccccaataaatctcctcatggcatttttcacttcagcattcctgaaggagtaaatcacagggtttaagagaggtgtgaccactgtataaaatacagcaactatcttgtctgcagggagggtgacacagggcctaatatagaccaaggagcaaggtatgaagaacaggtcgacaactgtgacatgagaggcacaggtggagagggccttgtgctgcccctccaagttgtggcttctcaggaagtgcaggatgatcaggtaggaagccatcagcacgaagaaactgactacggagatggagccgccattggtgatgatcagcaggctaatgaagaaggtgtctgcgcaggccagctccagcactgggtggacatcacagaagtagtggtccatgatgttggggccacagaacgggagctggaaaatcaggaaggtttgcccaacagaatgcagcaggcccccgccccatgctatcctcacgaggagaccacacattcgctggttcatgatggccatgtagtgcaagggcttgcagatggccacatagcggtcataggccatcaccatcaggagaaaggcctcagtgccaccaaagaaatggagggaaaacatctgtgtgaggcagcccttgagagaaatgactttcctcttgataaaggagtcaaagataagcttgggggccatgacagaacagtagcagatctccacaaaggataagtagctgagaaagaaatacatgggggaggtgagcactttgctggccaggatggtcaccacaatgaggccattgcccagcacaacagctgtgtacatgaggagaaacatcacagaaatgaccctctgctcactccaattctgggaaaatcccacgaaaattatttcagtcacattgtttgtagcaaccatattttaaagcacaggagctgacagcctggaatcacagaaatcaaagaactctcctcaatcattagaaacatccttcccaggcctgaggactatcatcatcctgctccctcttgagtttgttctctcccttggttttccccaaaacatgttctgagacaagtgaacaaaacagcaaatatcagctgcttgatgttattcccaacataagcctcgattttgtagtgttgcggccttgaagtgtttttgctgatctagcacatgctgattgaatgctcacaagaaaaatcagaggacattttatagataagaaaaaaactgagactcagagaggtccagccacttgcccaaagccacacagctcttatttgagcccagatctgtgtttctcaaaatgtacatgcttccactacatctcctatgcctaaagagtgcctgatgtctacatctgcttgtgcagacttgtcatgtcccagggttctgattaaagggtcccagggttaagcacatcaacaagccctcagaacagtcagctacattataaaatgggactgaatatgctaagtgacatactaagtcacagaaataaaaatattgtgtaagtccacttatacagcacctagagtacctagaatagtcaaattcatagagacagaaagtagaatggtggccgccagggactgcagggggaggaagaatatggagttagtgtttcatggtagtttcagtttggggcaatgaaaggtgttctagagatgaaaggtggtgatggctgcacaattatgtgaatgtattttaatgttactcagctatacacttaaaaattgttaagatggtaaatcctgttgtgtattttaccccaatttaactaactaattattgaaatgccttctgacttgttactgcctcataaatttccccttctccataccttcctccaagaacagtggttgaggctttgtgattttcctttcctcttctcagtttctttcttatgcctattagggaacctggttagcttcacagatttgaggttggggttgagaaatgttagcactcggtgtagaaaactcattccacgtgatagtataaggcaagattgatatgatgaaccactataaggtactctgcagaagtgagtgatgtggtagaagcatgtacatctcgaaaatacagaccttggtccaaagaagagttgtgtggcctgggacaagtgatgaaacctctctgagcctcagtttcctgatctataaaacagccataatgccatcccctcgttgttgtgccctccctttagctccccaccatgctcctctgtgtacccagctgatccttctgccatataccaatctttcacacacaggatgtttatgcagaaggcaggaatcttacatggggaggtttcatcctcacggaaacaatgactctatcactaggtgagtattttctgtgaaatttagcttgaaagcaaatgttctataattacttctggtttggagtgtcaatgagaggtcccctcaaaggatttgtaaggaccactttagtcttctgattttaaaagattcattgttgtatttttagtccaagcgtattgaaggttaacagaacaagatgtatttacaatataatcatcaaattgtctcaaaaagctacaaattgagtggatttagagtagaatttttaaaaggaaattaacatgtattaagcctctgcacggaaaagaaatacctttgagagataatttcataaagaggtcaatagatgtgtaaaccactgacagtgttagtgacattttgcctgcgatgtctaaaatactttaatactgactttgtaattggcagggccaaaagaagagaacctgaaacataaatctgtgttctaatcagacagcacattaaatggacatttccggggttcacagttaaggaaacctaaaatggggatgcacacagaatctcaaagaaggcctaacctcagtaaacaacttctgtgaaaatttctaa

SEQ ID NO: 915141 - DNA, 4001 bp, Homo sapiens
agcaaactctgcaaagtgataagtatgttaatttgcttgactaataatttctttgtgtatagtataggtatatcaaaacagtatgttgctcaccttaaagatatacaataaaaataataatttttctgaaatgtttgagagctgccaatatgatgtccctccatctctagatatctcaataagcaattccctaatccaagaacattctttgagacaagcacagtacaatgatcaaaatcaggaaattaacattcatgtaattttattatctcatctacagagttttgccccacaaatgtcctctatctaatatccaagatccaatccaggatcacatgttgctttacttgtcacctatctttaatccagagtaattcttctttcttcatctttacacatttgaagagttaaggacagtaattttgcagaatattctttctttgggctctccttgtgtttttttatgattagactcaggttgtgtatttttggtaagaatagcacaataatgatattgtgtgcctctccagtgcaccatatcaagaggcacatggcatcaatggatcttatttctggtgatactcactttgggcaatggtttagaggggaagggctataaagttacatttttctctctgtaattaataccccttggtgtcctaaggaaagatactttgaaacaatgtaaaatcatttcttatccaaaaaaaagtgtttaatgacaggattctattctgtcaagagcactttcacaagataggtgactcagtgtaacactgtgcaccaaaagtctttatactctaacactaaattcactctaggaaataagcctaaaagaaagtcagaagcatggttaaaaatgtctattcaagaatattaactacagtgttatttatggtggtaaaaaattagtacctccacaaaaagaaatactattcaagttatgaaaatgaactttttaaagagagaggccaggtagaataatctgcaactaacaggtcctgtgaactttccttcaacctattctgctccttcagtttggactcaacagtcattctaaacccaagtatcaatacaaagactcagcctctatttctcatttagtctcaatgtcctaatccacagcctcttcatggccttcctcatttcagcatttctcagagagtagatgacagggttcaggatcgcggttatcactgtgtagaacacagccaccatcttgtctatgggcagagtggtagaaggcctcagagagttgaagacgcagggcccaaagaacaagataaccacagcgaaatgggacccacaggtggagagggctttgcaccacccttcagagctccaggttctcagatggagcaagatgaccatataggatgctaagaggaccccaaaactgatcacagacagggtgcctccattggcaacaatcagcagaccaatgaggaaggtgtcagagcaggcaagtttgagaaggggaactaggtcacagaaatagtgattgatcacattggggccacagaagagcaggtggaagatgagaaggatttgtgcaaaggaatgcatgaagcctcccacccatgctattcctacaaggacagtacacacctgccagttcatgatggtggtgtagctgaggggcttgcagatggccacatagtggtcataggccatcacagtgagcaggaaaatctcagtgccaccaaagaagtgcaagaagaaaagctgtgccatgcagccccaccaagatatgactttcctttcagccagcagatctgagatgagtttgggggctgtagcggaggagtagcagatctccatgaaggagaggtagctgaggaagaagtacatgggggaaccaaggcttctgctggtcatgacagtgagcacaatgaggaaattccccagcacaattgctgtgtacaagaacagaaatatcacaaagcaaaccctctgcacctcctggttgggagaaagtaccagaaaaatgaattcagtcatgttgtgtatgttagccaagaggtcatcatcaagaggcagcaatttgggtggtgtgatctgaaatgatacaaaatacttcttcactcagtgggtgaattacatgaaagcccttgcatagctgagatgcttctgagttggaaattgaaaggtgagtaggagttagttatgtgtagaagggaagagcattccaagaaggcagagagcaagtacaaatgctttgtgtgtggctggaataaaggggagaatagcaaaaaaataaagctgtagatagacattagtaccaatttgtgaaggactgttagggcctttgaggaccctagcagtcccaaagtgtttttccttttagttgatgaacatgcttgatgattccccattgtctgcaggatcagacaaagtctgtagtatgtagaactaaagtgtggaaagggctgtccagtggaaacagattagaggaggagctctattaggaagttaataagtccctcattggatgatgtggaacagccaggatagtgttactgtctccatgttagatgagtgttttaaattatcttgtgcctacagctttccttcatgccacttccttctcctttttttttttttttttttttttttttttttttttcagacaggggctcactttgtcacccaggctggagtgcagtggtgtgatcttggctcactgcagccttgacttcccccagctcaaatgatcctcccacctcagcctcctgagtaactaggactacaggcatgtgccaccatgctctgctaatttttatattttttgtagagatagggtttcaccatgttgcccaggctggtctaaagctcctgagctcaagcaagccacccacttcagcctcccgaagtgctgtgattataggcatgagccactgctcctggccttcttttctatccttggtttgcagaacagtgtcctcaacctctccacataccattcagagtctttagaagagatatccctagtggacctcctttgacaatcaacatctcctcttatttctgcttctccctctaattctcacattctacacttggtcacttggtgagcttgtccccttccaagggcccagctcaacttaatccatgtatgattctcctctttactggggctttcactttctccagtcacatcctccagtggcaacaaaggtccaacaccccccatacacacacacacacacacacacacacacacacacacacacacatcccagtgccccctcatgctctgacacatccttctccacagcccaggctttcaacacctcagagcatcaccaagactgctcaggactgattggcaggctgtcccagtccatgctgaactctgtccaaggtggctaaggttttgtatatccacatagcctctcctacagtaacactccaggccacctgagcctgggagccagatcacttccactcacaccacaaggcttccttgcttccatgattgggacaatctcaggtgattaaagaccaccacgaaccagaaggaaatcactgatagaacatatagttacagaaacagagaaaggacagacgccagccccaaaatctcagatcagctggggaactttaccaagaagctgctcacagaagagagcactaacagtctggactcctggatttatagtcatatttttcagggagtgtctgtgtaagatctagaaagttctttaacctctcagagactcaaggtctaaactgtaacatgcagataatgcctgcctcacaggtaggtgccataaatcccactcccagccccatcccaggataagttaagggccagtcctatgtcctgccccggattcctctccaagccagctccacagtttacaggccccctctgccaggggcccctcttctctcaggacattttgggatcccggcacttaccacactgaattatcattgtttttgtgtggccacctgcccactggagtgtgggtttccttacggcagagatgatcgtt

SEQ ID NO: 915142 - DNA, 4001 bp, Homo sapiens
ttgaacaagtagaaagggtccagctcatgtagggtctcggaatatgttcttccttcggcttggcgtgttggctcacgcctgtaataccagcactttgggaggccaaggcaggcggatcacttgaggtcaggagtttgagaccaacctggccaacatggtgaaaccctgtctctacaaaaaatacaaaaatcagccaggcgtggtgacatgcgcctgtaatcctagatactcgggaggctgagaggcaagagaatcgcttgaacctgggaggcggaggttgcagtgagcagagattgtgctactgcaccccagcttgggctacagagcaagatttcgtctcaaaaaaaatttctttattgatttaattgtatttctaaagaagtgagagttcaaatttaaaagaggcactcatatattcagtttgcctttttaattactcttgccttgcatagcgaatcttttataaggcagggaacttagcaatattttactgaagaaatgcttggtgacttctagggtggggaaatgatggggcggggattggactgaaaaactatctgttgggtactatgctcactacctgggtccaatacccatgtaaaaatccaacccatatcaaatataaaagctggaatttaaaaaagatggtgacatactaacatgattaaaatggatagagagacagatataatataaaatttgggtctagcagtaaaagaacctggtatagagagactgaatgtagataacgaggaatccaacttctgtcagaactgtaaaaattatcgtttttctgtcttggttgtaatttgttgtttgtatcagaggtgctatcataagacatttatttttattctgcttaactgaaatggggacataaggcaacgtacttcctggttacagttttattcccattctcagtatctagagtgaataaaataagtctgtgataacgataaaaatatgtgttgataattcttggtgtcaaatattaggtttctcaaatttaccttaaatatcttaccagacatttccaggttttctgtcacatatgactgttaaatcttccattgacacaattttgctacaactctcactctaatctgtttagtttttacacaataaacaattggtttcatcagcggaggtacaagtaggagaacatttgccatgagaacattaatgaggggagagacatgcccggcaaagcggtggacaacggccaggttgatgatgggcaggtagaagatgatcactgcacagatgtgtgaaacacaagtattgagagccttaagctcctcctttttggatgcaattcccggtacagtcttgaggatcagggtgtaagacacagcaatgagaataaagtctaccataaggcagagtgctccaaaaaagccatagataacatcaattctgttgtcagaacaggccaacttcatgacatcctggtggagacagtaggaatgggataattggtttttcttgcaatatctcaagcttcttaaagtgaaagggaagggaagaaccaggagcatgctcttaaaggagaatactatccctatttgggcaactctgacagttgtcaggattgaggtgtatctcagaggattgtggatggctaggaatctatcaaatgacatgatcaggaggactgaggactccagtactgagaatccatgaatgaagaattcctgggcaaagcaggcactagaagaagtttcaggggcattgaacaggaagatgcttaacacagtgggcagagatgataaagacaaacccaagtctgacatagccaacatggaaagaaaatagtacatgggcccatgcaaggagggctctgtcttgatgataaaaagaatggtgccatttcctagaatagcaataagatacatgctgcagatggggatagagatccagatgtgtgcatattctagccctggcatcccaaccaagaagaaggtggtgatttcaacatatgatgtgttgataatggacatgattcattcatagggctctgctatgaaaaatacagatacacctgacctcaggtgatccgcttgcttgtgttggtaaaataggcatatctgtaaatttagtagaaaaaaagcagtgttaaaatttgtggcttctttcagctttcttttgagagaacaaagcatttatgtggctatcataatgaagagagatgggtaatactttagagtagaatctgtctattaatgcattgggaaaattatttctggacatgttatttctatagagaatccaggtttaaattttgcagttagttacacgtctgattttatttttcctgtaaaatatgagtaaatcctagtgaattaactggaatgctatactaattctttctttcagatgtatgttgtgatcttcagttctatgtgatcagttgccaaaaaagaagtcaagtgaaagccaaataaatgagaatatctgggcacttaccagagagtggatattttggcgggcatttttgataaaagctaaagaatcctgatatacaaacccaaggcattgctgaatttatctgccacaaaagactgctcttattcacttttacctaaccagtggctctcgggtcacagagttctctggggattgcagccagggtggatcttttctgaaaattggaataaacatttgtagatacagtaaatctacagagatagttgttaccaaggaaactaaaacaacatctagtaacacctgtaataagggatgatttgtttggagagaggtccttaattggcaggtattagagagacatggtaaattctctgcaaaagcttggatatttctgaatggatagttggcttgtgtatttctcctctgcacaaggccaagtctaagcagagatgctatgagttgattctgcattcaaggaagtgttgcaggacaaacatcctgggacacaatgtgttatcctagattttattcctgaatcctggatccatctccccggacccattagacatcgctaactaaatatcccttaaaaccaacttgtccaacttagacaagtttttctcccttaccaaatcttcctagtttaagggacctacttcagtaataagcctttaagaatttgcaagccaaatatctgagattctttgtcttacattttgtacacaataatgaccaatatttcttagaaaattaaattgttttacttactgagttccattaccagatgatgatttggaatcttgaaattttttaaataatataatcaagttatatcattatcttcattttactgatgaagaaaatttttctcaagatcaagtcgtctgtttaagatcacagaagtgttgtagggtagaggtaagatagcaactcaggtctgttattttactgataattaggtgtataccacactgtcaggatggtcaagcaatatttaaagagttatgaactgaatgtagctcgtgagaagtaaaaggcaatttttaaattaagatacacacatttaaatataaacaatgcctgcctgctgtttcatactggcataaaagcaatttttttgaagaaaatgtgtttacatcattgtaaaaacataaacattccaaagagttaaagaatatatttgcaaataaaagtaaagttaatctatatcttctgctttcacaccaatttgtagaaaattggcattattctacaaagggcatccaggtcaattgctcatcataatgccttattcttttttcctctttctttgtcctcttgtaattgggcagcatagcttccaacttgttgtaaaacttttttttattcctttcgtcctttcccccgatgagaaaaactgcagatgtttttctcttatcttgaaatacagcctgaaaatgaggtataaaactccaccttacactcccacaccttatgcacatttgttattctggttgcctgttaaactcacactatgctcatttatcacacacacttctgtttttttttcttttttttttggagatagagtctca

SEQ ID NO: 915143 - DNA, 4001 bp, Homo sapiens
aagtataataaagaataaagaataaaccagcaatgaaagagacaaaagatgaaagaataaacccgcaatggaagagataaaagagaagatcataatacaaactagggctaggtaatctatgaggaaattaagccaaaatttaaagaaaaaaatagaaatgcattatacaaaattggagtcaagagcattttaacaaaagagatctgatgtgaaaactcaagaaagcaaagagctctgtaaattcaaaaactgttcagtaggttgatgtggctggagattaatgagtatctgacgacgttgagtaagtagaaagggtccaggccatgtagggtcttagaatatgttccttattgatttaactgtatttctaacaaaggaagagttcaaatttaaaagagacacttacacattcaatttgcctatagattactcttgcatttcattgtgaatcaattataaggcagggaacttagcaatattttatgagagaaatgctggtgactgcagactactggtggggcaagagtgaaagaggcaggattggactgaaaaactatctattgggtactatgctcactacccgggtcccatataaccatgtaaaaatccagcacatgtatcccaatatggaatataaatgattaaattaaaaaaatggttgtattctaagatgattaaaatggataaagagacagctaatttaggtctagcattaaaagaacttggtataagagattgaatgtagataatgagaaatccaacttctgtcagagctgtaaaaattatcatttttctgtcttggttgtaatttgttgcttgtatcggagatgctatcataagacatttatttttattctgcttaactgaaatggggacataaggcaacgtacttcctgtttatagttctattctcattcgcagtatccagagtgaataaaataactctatgacaacaacaaaaatatgtgttgataattcttggtgtcaaatattaggtttctcaaatttaccttaaatatcttaccagacatttccaggttttctgtcacatatgactgttaaatcttccgttgacacaattttgctacaactctcactctaatctgtttagtttttacacaataaacaattgggttcgtcagtggaggtacaagtaggagaacatttgccatgagaacattaatgaggggagagacatgccgggcaaagcggtggacaacggccaggttgatgatgggcaggtagaagatgatcactgcacagatgtgtgaaacacaagtattgagagccttaagctgctcctttttggatgcaattcccagtacagtcttgaggatcagggtgtaagacacagcaatgagaataaagtctaccataaggcagagtgctccaaaaaagccatagataacatcaattctgttgtcagaacaggccaacttcatgacatcctggtggagacagtaggaatgggataattggtttttcttgcaatatctcaagtttcttaaagtgaaagggaagggaagaaccaggagcatgctcttaaaggagaatactatccctatttgggcaactctgacagttgtcaggattgaggtgtatctcagagggttgtggatggctaggaatctatcaaatgacatgatcaggaggactgaggactccagtactgagaatccatgaatgaagaattcctgggcaaagcaggcattggatgaaatttcaggagcattgaacaggaagatgcttaacacagtgggcagagatgataaagacaaacccaagtctgacatagccaacatggaaagaaaatagtacatgggctcatgcaaggagggctctgtcttgatgataaaaagaatggtgccatttcctagaatagcaataagatacatgctgcagatggggatagagatccagatgtgtgcatattctagccctggcatcccaaccaagaagaaggtggtgatttcaacatatgatgtgttgataatggacatgattcattcatagggctctgctatgaaaaatacagatgcttgtgttggtaaaataggaatatctgtaaatttagtagaaaaaaagcagtgttaaaatttgtggcttctttcagctttcttttgagagaacaaagcatttatgtggctatcatcatgaagagagatggttggttgctgctttggactataatctgtcgtataatacattggaaaaattatttctggacatgttatttctatagagaatccagatttaaattttgtatttagttacgcatctgatttcattttttcctgtaaaatattagtaaacgctggtcaattaactggaatcttctatttcttgctctcagatctatgttctgaccttcagttctatgtgattaattgccagtaataatagtcaaatgaaagctaaataaatgagaatacctgggtacttaccagtaagtggatatgtttgtaagcacttttgataaaagctaaataattctgatatacaaacccaaggtattgttgaacttgtccaccacaaaagactcctcttatatataagggcttgtcttattctttctacctaaccactggctctgggattactgagttctctggggattgcagcaaggctagattttgtctgacaataagaataaacatttgcagatgcagtaaatctacagagatggttgataccaaggaaacaaacatctaggtctgtaataaggaacaattttgttggagaggtctttaattgcctggtattagatagacatggtaaattatctgcaaaactaggatacttctgatggatagttggcttgtgtattactcgtctgcacaaggccaagtctaagcagagatgctgtgagttgattctgtattcaaggaagtgttgcaggacaaacatcctaggacataatgtgttatcctagattttattcctgaatcctggatccatctccccagacccattagacatcactaattaaatatccttaaaaccaacttgtccaacttatacaagtttttctcccttaccaaatcttccctgtttaagggacctacttcggtaataagactttatgtttaagaatctacaagccaaaaatctgagcttctttgtcttacacacaataatgaccaatatttcttagaaaattaaattgttttacttactgagttccattaccagatgatgatttggaatcttgaaattttttaaataatattatcaagttatatcattatcttcattttactgatgaagaaaatttttctcaagatgaagtcttctgtttaagatcacagaagtgttgtagggtagaggtaagatagcaactcaggtctgttatattactgataattaagtatatagcacgctatcaggtttgccaagcaatatttaaggagttatgaactgaatgtacagctggaattgtgtattatttttagcattctaaactgactactagttgattctagtggataagatgaaacatttggtcctacagttgcaaatctttgcaacagtgaaaatcatgctagtatagagatcctaaggaaaaggctcttgaggagaaaaaaactatatactcacctctattagtaaatagtcattggaaggatttcaatatttacttgactaaagagtggaaatataagaatgtattaccataaccttcccataaattcttttaaactatgtgatgattacttcttagttgccaattgcctactgtttgcatccccaatgaaaataagccccacttggttatgttgtcaagaattctctccttccactgttgctttttctcttagctttctccaggtacttcttattaaagagatagcagaaagtttgtgtatgtttgtgtgtgtgaaaattgctttgacaaggacatgtgctcattggctcaatgttcatgtgttcattggctcaatgttcaactttgtggaccaaatcaatttgtttcatgacaatttaaagtaagctacagtaag

SEQ ID NO: 915144 - DNA, 4001 bp, Homo sapiens
aacactcttaccttagaatcccagagagattgccatatcaatcttgtttgccccccttcaaattgtattttcaactgtatactcttttgatttttccatcatgtatttcctctatacatgagaaaaaaagtttaaaatataaattttagtgaaaattattgtggtaccaaatgtcgtgtcctgcaggaatcaatttttaagaacatattagaggggctgattttttttaaggcgcagggaaagactaaatcacagaaaaaaactaaacagcaaaaccatagggggtttaaaattatcttttagtcacttagttaaatttgtgaattttccataatttacatgttggttttataacagaaaaataacaacagcagctaaatgatcttgttctctccctgcctattctgagtcatcacttcacagcaggattattgtgctttctcctgttaatcttccttcctcatctctcccaaattcaatccatgtttacaggcacgctcttcttaaaatgaaatttatcatgtagagaagaaattggcattccaacacctcctgaatttagacttttcaaagctttttttaggtgctccaaaatctggttcacttattttatccaaaatatcacttgctatctgttaaatttcactttctattgtaatcagatcagcatccttcatagctattttacctttccttgacagtatgagattagactttgtatatcatctgtatttttaatagatactaactgaatggtaatctcaatctgcccaaattgtattcattctttatgggttgactcaaatccagctgctccatcacagaagtattttccttcaacttcccttaaaatgttaattaaacctctatatcttatatatctcttgacttttttttctatcctgttcagttatattctcaactttattataaattctgcactacatagcttttcacttccatcatccagtccttcattagtgacttctatggcattaagcacatagcaaatgacagtaaatgcctactggttgataatttattacctaattgttcaagttcttatctcccacatacattaagcaacttccccaagatcttctcccagatttgtcgagtctttacacagtacacaatggggttcataaggggcggcaccaacaagaacatatctgcaataaggatcacaacaagagggcttttgtgcttggcaaagtgatgcatggcagccagggtgatgatgggcacatagaaggtgagcacagcacagatgtgggagacacaggtatttagggccttaagcctctctgccaaagatgcaatgctgagtatagtcttcaagatcagcacataagacaaaacaatcagtgccaagtccagcatagtacagagagcaatgaagaagccatagatgacattggtcttgttgtcagagcaggccagcttcatggtatcctgatgaagacagtatgagtgagaaagaagattcttttgacaatattttaatctccttaaggtgaagggaaatggaatcactaagagaatgctcctaatggctaaaataagtcccattttagcaaccctgttgctagtgaggatagaactgtatcttaagggattgtgaatggcaagaaagcggtccaaagacataattagaagtactgaggattccatgacagtgaatccatgaatgaagaattcttgagcaaagcaggcattaggtgaaattcccatggcattgaacaagaagaccctcaacatggtaggaagggaggagagggacaggcccatgtcagagacagccaacatggcaaggaaataatacatgggctcatgaagcgagggctctgtctttataataaagagaatggtgcagttgcccatgatggcaagcaggtacatgaggcaaatggggatggagaaccaaatgtgggcatgttccagtcctgggatcccaatcagaaggaaaagcttgacttcggagttattgagaacagacataatgagggagatatgagctcgttagccggatctgaaaccatataaatgaaaagcagtcatgcttttggttaaaactcagttttgtgaggataaggggttcattcgtatactatactcaaaggcatatttggctgctaatcaactgcactcttcaaaatttaccagaagtccttaaacaagttcatattctccagcatggtaaattcacttctaacaacttgtcctaagttggtgactttttaggatttttaggattttttttttttttttttttagagggagttttgctcttgttgcccaggctggagtgcaatggtgcgatctcagcttgctgcaacctccacctcccgcgatcaagtgattctcctgcctcagcctcccaagtagctgggattacaggtgtgcaccaccaccaccatgcgtagctaatttttgtattcttagtagagatgggttttcaccatgttggccaggctggtcttgaactcctgacacaggtgatccacctgccttggcctcccaaagtgctgggattacaggtgtgagccactgcatctggccctactttttaagatgtttagcaaaatatataaaacatatcaaaatggagctgctttgaatcagtaaaaagatacttagaatcttttccactcatttttccatacagtcttcagcagtacccacgttggctttaaaataaaatctctgagctttatgtagaaagtttgaaagaaatagtctaagaaaataatcagagatcactgcgaatatttggaaaacattaagtcattagatgctataaagtaaatacatttatagactaatttacctcttatacttatgaggtaggtacttatgcacattttatacatgagtaaatatacatgttacatcaagtgttatataaaaataaacaacgatttctgttcaaacacatttgccctttcatttgattttaaattatttaacttatttgggcgttattttaaatctgtaaaatgaatacaatcttggtaggttttgatatttatagttatttatgaagttccaaacagagatctaggttcataaaccacaaacaagtatctgtaaatattagcattgattacacagtagtttccaatagaacatgttggagaaatggagcagtggataagtactttggagttacgtattcttatttcttcacgtacatattcatgtattaaatgtggcacctcctcgcttaaacacttatggttcacacttcaggctaccattttatttcaagaaaccatttgaagctctacagtagtattgtgttcatgttaatcttatccatcttgattggattatttaatcttatatctctgtatttaattagtcagagaaattagtcaaataaatgcatatttagtcaaataaatgctaaatgaaaaaaatccaaaccacccaatttctgttggaaatgaagcattaaaattttgcctacataataaacagaacctgattttattttagagtctcttttaaaaagcatacaagtttactttcagaagtaaaatatgcaatcttgcaacttatcatcaagtttttggccttcaaggtaaacaggtaaaaattggtaaaactgtcagagaaacacaaatctctaagacaatcattataaattccgcctatatttaataagcttccttagtaaatgcataaattaaaattatgaaattaataattttaattaaaaataacaaaaatacaaaagatgaaggtagagccaatggaaggctagagagaagaagacaagctatcctcactccagaattttttaaacttcaacttgcaagagaaaaaagtcatcaaccttcagtggaaaacacaggagacactggaaattgattgagctcctttatatggaagcttaactgtgaattcatactgtattttgtgattttttagaggataattgaaaaaagtacatagtaaataacaagcagccttgggccaatatattttacttttgc

SEQ ID NO: 915145 - DNA, 4001 bp, Homo sapiens
aatatagagagtttacagtagatgtcagagaaagtatttatggcaaaagaatcaccatttctaatttttccctctgaacatatataaagtatatataacttgtgaagtaatgatgtctcatatttttcattctagaatggctatattttctatttttgaatagagccttgacccttcctattattaggccaagggaaaagtatgttaaaatcatctgaagagcaaacatactcttaaaaactcactttttacttttttacgagctgacaagaagcttgtctaggtttttccttctaagatttttttgggcaaaagaatatttatagaagaatgaggtaaagaaatacacttttataaaatccagacatcctgcaaggaatgtattgaaaattaaaaagctcttattgaaatactctgtaagtgacttacgactgtatttagaaaatattaaatgcaaatcatggccctagagagtaccctaactcagggtagaggacagttaaaagataaccaacacttacttatttaaaagtaaatttaaaatgttagtttcttatcactatatttgccatgagaataatgaaaattttaaataagaatttatttctagagaatgatgatcaacttttttttttacacttgtgtgcattagcctatgcaaacacataaacatgtatgcacaaatgtgcacactgaggcaaaagtttttcatagagattatatgttctgccttttcctcaaatttcactgaggtggctaatttcaggtgcatttgaaagaagaatttaaatatagactttttcagttccatatggtctattcagtgttctgtcaccagacttctcctaagatatgcccccaaccctatggtaaagtacttaagtccttgtgagtgacaacattgtcttccagtatacccttgctctttgctaagaaagaactccaggctttcatttttcattctggcttcatttttatgtctgtgtctgattctccagatccgagtttaactactaaacctatgtttagataaaaggcggataatgccatattgtatttgcttggttttgatgctgtagatgacagggttcattaaaggaggaaagaggaagtagatgtaactcatgataatgtggacaacctctggcacattcttcccaaatctgtaaatgaatgtcaaacccatcactgtaacatagaagataagaacacaactaatgtgggagatacaggtattgagggctttggctctctcttcaccagaagcaatgcctatgacagtattaagaattagaatataggagaagaggatgatcagacagtctaggaagattgttaaagagatcaaaattacagggtaaagtctattgaaagttatgtcagcacaagccagtctcatgatttcttggtggaggcagaaagcacgtgtgataacatgagatttgcaatatgaaaatgaaaaaagacgcaaaattacaggcaggatggatacaaaaccccttagaaacactcccactcctaacgctatgactctagtattggtgagaatggaagcatatctcaaaggattgcggatggcaatgaaacaatcatatgccattgccaggagggaacctgattccacaacagaaagggagtgaataaagtaagcctgtaggaagcagcccacactgctaatctccctgtgattcacccataggatgcccattacagtaggcatcgtggtcaatgtcaccatgaggtctgtgcctgccagcatggtgaggaagtagtacatgggctcatgaagactgtggtcatgcttgatgaggtagaggagcatgccattgcccagaaggatgcacacataaacagcaaagaaggggatggagatccagtgatgagctgcctccagccctggaaagccagtcagcaaaaaaggggctgcagtaatattgggccacatagtgtatccaccggtaaagatcagatttcttgaaaccttgaaaccaggagcctccaatcttcctgcttggagatgattaactggtgtgataaatttgactctgcaactattttcctgaagaagaatagcatgtacagactatggttttttccctaattagaaaaaatactgagttaatggttcgatttttctcaaattcaaaaatttttcattaattttaaatatattatccgcaactattttgagggtacttataaatatttgcaacaacagtgataacaaaaacacataacataaatatacataaatggataataatctggcttagttgtcttcttgctgtgattactgaccatttggaaatgattgttgtaattttacatttcacgattatgatgaagacagttttttcagttaatgcagtttttctcattttttttggaaattgaatgtcagtgttttatgcactatagcgtgcatcaccatcactaccaatgaacggctttgtcactctaacagttacttgagcttggccaccagagttgtggatcacagactagacgcagctaacaagcagcgggcttgttaggcatgcagcctcagattctgccccttccaacattctgaatcaaattcgcttttttcaggtcctcaggtgattccagtgcaaaacaatgtctgggcatcactgctataagcatttcatacctaatccatctttcgagatagaaaccttttaatgcttccatccagttgattttctcattttctccaaatatcttcatacaattatcttttttatgtttctttcaccatttactggctttctttctgccacttgccctttccaacattatttcccataattaaatacttagctggttttctgtccttcttacctctctctgcttttccatcaactccaaactcctgaggaactgttgcagttctgtaacaggtaaaattataatgtttccacagcctaaggatgccagccatcactactgtttctgttttcttggttgccacgatccaagaggggtatgggagaaagaagaagcttattaccagctctgctgcagtcttatttaacgagaaattcagaatcctggaggcaagtctttagcacctagcagttttcttcataaaatggcctcagtatcaaaaataaatcagaatcagaagaaatcacaaagcatttcatattgtataaggaaatgttctgatgctacctctgtatcagctcctgtgagtcaggattactaacttactgagattgaaatcaccaacactagggaatccctaaaattaaatcacattgaattcatatagaagactgaattataattattacacaaatgttgttctaccttcgaaagatccttcatgcttaaaaacacagattgaggaataagaggatgtacggaatgaggtataggaggaagagaatggcagattagagaaaggacaaattggtgacacatattctgaagggtaaacatagaagaaagtcacattaaaattttttttaattaaagttttaaaaaattttaaaaataaaaaatttttaaaaagaaagccataaaatctgggattcctttaaaaaaaattgtgtaaggatcaaactagatttccagagcacaagtactttttaaaatgtttgtgagcttttccttaaaaaacaataacgtctttagagaaattggccataaaacacttgaaaccaaaaaagaaagttttttattatatttatgagcagaaaaaaatgtttacagtcatatctccctccatctctaagcttgggtcattaaaagtaagacagggaaggttatggtacctcaaagaaaatgaaaggtaaatcatgtctgagattttgggaataaaaagaaacacaaaagaagcctgcccaacactgggaagccgttgatatttacccagaggcaggcgtgtggggattctaggagagctagatactgtcatcaaactgaggcccactataagcagtgtcaccagagatgaagccatactgtatgcatgctcccaaggctgcactatg

SEQ ID NO: 915146 - DNA, 4001 bp, Homo sapiens
atcagctgcaaatactagcgcagaactagcagtagatgaagaaattgtcatcccctgttacactaatagcaagtggtagactgcggttcagacccaatgaacagcataaagacttacaaacactttgaagaagattgaaggaagaaactattccatcagtgaaaaatttctaaaatataacattacctttgccaagtttttgcattaattatcaaaactatttcatgaagtgaaaaagtctcgagattttttatgtgagaagcaagaggggaaatagaaatgggtggtgatatctaaatttatagttggttatttttttcagaagaaaaatgtcaggagacaaaatagaaagctggaaagaagaaaaagtattaagttagtttcagcagacaatgggaagaaggaaaacggggctgggatatctggcttccacgagatgataagaaatgtgtttgctgctatttagctgttagtctgtatcacacgccttttagtagtaaaatatgccagtctactaagggaaattacatttcatgagtaagcttcctaaagttctagatatttgctgtttagcctcacacaagtttgcttactaatcaagcaagatccttttcagagtaactagtttcaaagtatggagatgaaaatatgatcatgtattattcaaattcacctttataagacacataaaatgtacctccaactgcacatttttctttagatgaactgtatttgacccaagctgctttagtccacttatcttgactatttctgaaatcatagttactcttcttttggattgttatatctcctctgcttcctgtattctttttcttcagcatcactggcattccctctttattaggtgatatatatatatatatatatatacacacacacacacacatatgtataaaaatttctcgctcacatcagctttttcatgtgataattaaaattgaatctaactctgaggaaaaaaaagtgtggatataaaaccagggttccttttcagtaatgggagaggcccagaaatcctagagatcttgagattctgaaataagggctcaagccctactctgcccagaaaataggcgaataatgcttctttgaatctgcttggtcttgatgctataaatgataggattcacgaatggaggaaagagaaaatggacatagctcatggtaatggggaccacatgaggtgcatgtttcccaaacctgtgaatgaatgacagtcccatcacagtgatgtgaaatactaggacacagctaatatgggagacacaagtgttgagagatttagcttcctcttgtccagacgcaatgcccatcactgtcttgaggattagtatataagaaaagatgatgattagagcatctaaaaagacagtcaaagaagtctgaataattggatatatgtgattaaacgtgatatcagcacaggcgagttttatgacatcttgatggaggcaaaatgtgtgcaagagggcacgggaaccacaatatgggtagcagtagagtgaaagaattatgggcaaaatggacataaaacctctcatcagtacccccagtcctatgttcatcactcgggaattggtaagaatgcagttgtacctcagtggtgtgcggatggcaatgaaacagtcataggccaaaacaagcaagatacctgattctacaatggccagtgaatgaatgaaggattgggtgaaacaggcagcatgggcaatctccctctggtctagcagcaggacacccaggactgtgggcattgtagtgaatgtcatcccaaggtccgtgtctgccagcatagccaggaagtagtacatgggctcatggaggctgtgatcattccaaatgaggacaagaagagtgccatttccaaaaaggacggagaagtagatgacaaagaaggacatagagatccggtagtgaactgcctctgagcccaagaagccagtcagcaagaaggggccagcactgttgttataccacatggtaggttttgcaggtggagaagatattttttaggggtgatgacctccaaagatgcagttttcttttttctctcacaatcttcttgtagcacatcatcaggccattttttacctcaaaacttaaatatttttctggattgtctcatacttaattaattgtaagcctgtactcacaaggcctttccctagaataacaaataacaaaaatcatggtcagaataataattccaattcactatgaagcatacaacctttattttttcaacactcatcttacgtctgtgctcatagccttgactcttggtcccaaataggactcctttgttcccttttattctctttactcttttattcctcctcctattatttatcatatgggcccttactgtgttactatccaagttgagtcagttcaaattttttctcttgaaactaatgggacagctgtatttaggattaaccactgaggaaaatgcttattcaatagaaatgactgagaaatattgtgatcaatgttgctatctcaagtggactgtgaataagaagagaacccagcctgggcaacatagctagaccctgcctccaccaaaaaaaaaagaaaagataaaaattagctgggcacaggggcacacatcacctgagcccaggactgtgaggctgcagggagctatgattgcagcactgctctccagcctgggcaacggagtcagactctgtctctataaaaaataaaataaaataaaacgaaagaaaataactcatctattgtgagtttccacagaaatctgaacacctgaacaagtgggtaaagttagtaaactcattttagaaaggtgtaattactcagtggacttgggactcagcaagttccctatgctgcaaaaagtctgagttttggcacattagggacaaacatgaaaataggagactcatgttggaagctcataacggaaatattttaaggacatacttctacaatgagggcctccacaaaagcctaatacttgttagagtcatagattcgtaagtatgttgatctgaagggcaatagtaatatcggaagttggtaattgagttaataaacttcacacaaccagttctagggaaaagataagcactcccagagagaaaatacggcaactatgttgctgatggagacaatcttacagaccctctaatcattatgaatctgtaagactcgtattgagaaaaattcacaaggatcctcatagggaactatgaagtctatttataattaatatttatttatatttataattacacttttacaaagtcaagatttttgttgttgtgataccaagaaattttgtagcaggtttattgggaaaacaaagagaactacaagggaaactcagtttctcccaaattcaattgattctgtatgtgtccagagtcttttaaaatatcattcaatattataaatattactaccgacacctttgaagtgtaattcagtaaaaatgaagtgataacaatctttgcaccttttttattttataaaaacctatagaaacaataataattatatgtttcagaattttggcacatagtaacatctctaatataagcaattattggtggagagagatggacagaggaaaggtgaaaggacttttgaaagggctgctacttcaggggacactgttgataacaaaaatgtcagtctaggcactgcagtagcagagactatgttcatatggatactaaaaacactgctaactaacttgatccactgaattatgacctgcatagtgcttaatgtggcagaacttatctaccgccacaggagtgatgtgtatatcattataagttctcttaaccttccaatgttgccttataagagaatggattaatgccaaaatttgttgtacaggataagagctaaccacttatttggatctactgtcacccagataatggaccagatggaggaagccggaggaggcctgattattcttaaactatagtcgtgttttcaaa

SEQ ID NO: 915147 - DNA, 4001 bp, Homo sapiens
agttaaaataattgaggaagtgtagtattagataaaataaaaagcaaagaaacaaaaacatctatgcatatgtaggctatggtaatgacgacatttcagtctagtgtagatactcgcaggactcgggggtaaaaatttcaatatcacaaattctgccctgctctactttttgaggggtaaggattaaagcataaattaaattaacttgatttattgcagtgattaagagtatgggctctggaattagactgtctaatcctggctgtaatatgaagtgctttatagctttaagtgatgtacttcccctcttcatttgcctcagctgccctcatccataaactagggatactactaatatctgcgctaaaggactattgtgtggaatccgatggtaaaagcttggaacagagcctgacatatagtaaagcctcaataagtgttagctaaaattaatattaaataaatacaagtaatgaagccctaaaacatatagaaaaaaaatatgggcatgtgtttatgatgaagatattagttttgtttttttaaagaaaaaaaagaaataacactgatgcttaaaagcactttttatggtttggataactttctccttaactgccgtctactttcctagctaattgttatccacatcagctctcagtattgcagactttaacacggcttgtttttctgctttctagcaaatctcttggtctgaagaaagagtacaatttctttggaaagggccatgcagtaggcccagcatgaccaaaactctgtgactctatcttctcttcgccacctgtgtaacccccttgtcatgtccttccacaactcagatttgatcttgggccatggctgatagagtgtaagaacagggacagcagatgggaagtcctaggaggcctgctctttcagcaacatcagcctgcagggacctcctccccctaaaattctcatagcctttattttcccaagcacaagctttggtcctgtgacatctttaatttgatttgtatctatccagtgtccccagtcacttcctcatttgttttctaacttagtcactcattgtttaacactccttcaatcactgattgcacactttccacgtaccaggccctaccttagctgctaggtagaagacagtgaccctccctgccccagaagcctcctcctcctggattcaccaccttggagccaggcatgaggctgatgagtttactctttaatgaagctagagcaaggattccaagcacccagtcaattgtgaagagctctaagaggttatggcaagagaattatccactaaatgaacactcttctccctagctaagacttttagacccaattcacctggtgtcttccctgatgagcagggcttaacttcaaaggagcctcaggttttctttggcccagatgaaaggcagataaaaacagtaacatttcttcccattaggtgtttttttgttttgttttgtttttgcttttttcctcagacccacctggccttccaattaacaggacttcacttcatatgaccctcaggttttctttggctcaaatggaaggcagataaatgcagtaacattgctattaggttttttgtttttttcctcagacctatctggacttccaaggatggaaatttggggttcaatgtatatcttccccagtcagaggcagacccagagaactcacctcatgaacggaagaaaatggagaggcaagactttcctcttcatttcccctagcaccaccataaacaataggtttttctttaatctggacaaaaactatcccctaatggggagtggagtgaggggaaactgaagctgtatttgtccgttttcacgctgctaatgaagatatacccgagactgggcaatttataaaagaaagaggtttaccggacttacagttccacatagctggggaggcctcacaaccatggccaggagaagcaagtcacatcctactggaatggcagcaggcaaaaagagagcttgtgtagagcaactccggtttttaaaaccatcagatctcgtgagacccattcactgtcacgagaacagcatgggaaagacccacccccatgattcaatcatctcacaccaggtccctcccacaacaggtgggaattatgggagctacaagatgagatttgggtggggccacagagccaaatcatatcaggaaccttgtgctccacctaaacattgaaacctaaatcgctagaataaatgttttcccaaaggctgcttttatctcctttaaaccgtgtgctagcagctctaagttacacaggctgatcaaaatatcctgagctccaagtagaggttccctctctcccagtactgagtctctgacatctaaacacacaccacagccacttttaggtatcccccatcaagacctctttacttccttgataggaaaatactgtgaatgtttcttaggtttacacttccattttgcgatgaaactctgatttaacagactgtgttttgtatgtatgcttgtacatatgtacatagaatatacccatgtgaagacatatttaagtggatgtgtattgtgtgtttgtgcgtttctctacagtgggtttacctgacacatttgtgtgcatatggactggaaagcattatttactggcttgatttatgaattgcaacacttttaccctagaagtacatggttaatggaaggcatccttgaatgcaaacaaggatctagtctgagatcccaagggcatcttctatgtgttatgcacctcctacctcagtgcctttgtacataatagctcttctgcaggaaagctcttccctccgccttgaaagctttacctacttaattcttaccactttttggattctagtttgcagtacacactcacagaagcctttcctttctccccagactagatcaagaccctgttcatgctatttcacagctcctcatctttttctttacaccatttctcatagtttgtaattatatataatgtgaattatatagtcacaatttgcacaattcttgctataagatcataaattcattgaggcagggcagtgagtaaaactcttttgctcatattgaattcctaatagctagcaaaatgctatacacaaagtatgtcttcagttttgagcttgaagttgcaaaaaattaactctctggatctggctacaagggactgtataaagtcggtaagattcaggaatctgagaagtcaccctgactcctttgctgctctatctctatctgcttagagatcagcatcaaatcctggaagtgcaagctgcttgggggatagtcttcaggggagataaaaataagaaactataaccacttttcagtcaggctagtggtagggagctcggaaaaccagagcacctggtagcagctactacaggacacaaaatctgaagaaacgctgaaagaacactgggaaagttgcaggcctcgaccttcaaaaggttgcagcaacatttcctcctctgttcttcatacctgtgagtcttctaacttcagaccttttagtttccctccaagtccttccatccatgtagagacagcccttatcactacttcttctcccatatccatcctttttctcatagcccacatgaatgagactcaggcaagagttcacattggaaattgggtgtaattgcatctcaagataggcataagcagagcttagactggggccccccagtggtatagtggtacaagtggttgactcacacacagcacctccactatgttttggccattagtcttcctcgttgactctggaacaacattgcctccacagcaaaggacttcatagtaaatttggtttataatgcagctgtattcaaaaatgggagagctagggaactaggatatgggaaaaaggcacagaggaaaacgtatggtttgaatgaataaggctcctacgactgtctcagcttctccacagcagcatccacgtcgccccccgtagcaatgagggcctg

SEQ ID NO: 915148 - DNA, 4001 bp, Homo sapiens
attgcctccatcctctcccttcctccccactctccacatatgaccaactgtttgtttttcaactctgctattttgcacatgccagacacccctatctagtcttatctctgatgttcccctaaaccagacctctcataccactttatgaaaatgcatctctctgttcagtagtaactggaattaactatcaagacaatggtcatctgaattagaaattatatctctgttttcaaattattatcaatattatttgataaatgttaaccaaagttttaactgaacacatttctcatagagatactttccctagactcatcattttgaattgagggaaatggtttaccctcattgaagaaagtaattgagggaaatggcttactctcattgaagaaagtctcatttcttcacgtgcaattttctagaaacagcagccagctccatatatgcaagagaactggatgtatgtctgaagccaaaaatgccttattcctatgtataacaggactaatatatgcaagccatatggagagcaatgggcattgactgaaatgccggtgacccaaatcatagacccaagaattatatatataattggttcatatatatatattatttatataatatatataaacacacacagatacatacacacactattatatattaagtatatataatagtgtgtattatatatattaaatatatataatagtgtatgggtatgtatctgtgtgtgtatatgtatgtgtgtaagtatgtatgtatgtgtatggtgccagccataagctaatcaaacaatgtgagttaaattacctgagaaaacaatatcagttgagcactgagatatgtacttagtgttgtacatatatcttatacaaatcagcaatagacaggcagggtaaaataatgttctaagtagcagagggattgactgatttccactgaaatgctcagggattgattagttctcattgaaatgactttccctagttacttatgctggcaacattgtcatcctgtccaggtcccctgaattattcctcagagaccagtgaaacaatgtcatgctctagagtgaggcagagagaataaacgaagtatgccactctgaatctgcttagttttaatgctatagataaatgggttcataaaaggtgggaaaaggaagtggatgtagctcattgtgatgtgaacgacatgaggaacatgctttccaaacctatgaataaatgtcagacaaactacagtgacatagaagaccaggatgcagcagatatgagagacacatgtgttgagggccttggccctttctcctccagaaccaatgcccatgacagtcttgagaatcaaaatgtaggagaaaaagatgatgagaaagtccaacaagaccattgcaaataaaactacaactggatagagacggttgaaggtgatgtcagcacaggctagcttgatgacatcttggtgtagacagaaagcatgggagagtacatgggatcgacagtagggaaaccagtgtaggcgaacaactattggcataatggacagaccagcccttgtcaatacccgcacaccaatcttcattacctgggtgttggtcaggatagaggtatatcttaaggggctgcggatggtaatgaaacagtcataagccatggcaagcaagacacctgactccatgacagaaagagtatggataaaataggcctgagagaagcaggctccatggccaatctccctgtgatctaaccacagaacacctagcactgtgggcattgtggtcaatgtcactccgaggtctgtagctgccaacatagctaagaaatagtacatgggctcatggaggttatgatcattcctgatgagaaagagaagagtgccattgccaagaagtatggagatgtaggctgccaataatgggatgaatatccagtgatgtgccttctccatgcctgggaagccagtaagctggaaggtggaagcagacttattgagccccattgccagctttgcaaagaggcaaatatttactccaggtaaagcaatagtaatcagttgtataaaagttgctccttgagaattctacctgttcataagatgttcaccagtcctgactttcagtgacagcaaggatgataatttagtcattcctgggagatcctaggtatgggaaaatagaatgtataaagaagatattatttagggtttactctatgtaagattattggatactacgttggggatacagctattcatgcagaataaacattgttgaattcattgtaaatcatataacccagaaaataaaaacaaaatgaaagaagaaatcactatatttgaatagtgctgtaatggcctgaaacttataggtcacttttcatggtgctcttcatcctgactggtggtattatagggtggatgtaaaggtttcccaggctatgtgagacctaaaagatcagtagaaaaatggttctaagcactattggaaaagcagatataaagattatatggaaaaacaaatacacaagtaagaaatatatgagcaaatacaataaaatagtaaatttcagagattgacttttcttcaatattcctggagggaaaattcaattgatgaagctccagagacttttgggtagttagaaaatgacgtaagagtgacttacctgtgtgtgtttccaaagcacatagaactctaagttgcccagctttataaccctagttattgatacactgcttcaaagaattcaaattttcataatataaattgaagaataaacagtaaaatgtggatttgatgataagcttttgaaggcactaattgataatagcaccaaactactgttgcatatcacctacttggtgatgcaaaaataaaaattggtaatttaggcaagatcaaggagaattttttttttaaaactatggaatctgatgggatttgacaaaagtgagaaggctctgtgactcattagaattctaagatttcagctggtgcaggcagccaacctctgagaatacataaattgtgtgttggtggcatgagccagagaaaataggcccaccttctcttatggttggtttggactatacatctcatatactattgaaagagcatattgatgtaaatttatgcacgatttacaagacctctttctgtccatgaaaagaatgcatccaagattactggactttcattttcagaagaatttgttgaagtttcagctctgctctttctaacaataatgatcttgggaaagtaatttaatcttgagatttggttacataacctgtaaagactactagtgatttctgtcttctcagtcattctcttgacacaaagtaaggggaaatgttttgtaaagagtggataatttttttatttttgtgtttttgttattgtttcagagaagtacctcctttctctttctctagtgagtacatgtcaggattattcacccagaggtgtgtcaaatgatttcctttttttctgtggaagccttgggaacagatataagatgatgatggggtttttaggagcctgtgtttgactttaaataaagatattaaactatagtttctctaatcagcagataaaatgtgatatgtctgggtgggaaagggaaaggagaaaagattgatgagccaatgtgggaacttctgacatagctaaaagtaacgttgagcctggggcattgggactgagggaagtagaggggaaagcaactctgtcctcaaaaagtgagaaaaggaggtattattgctcaatctgcctgccagtgagaggttcagacaatactcagcttatgcaggattaaagaagcagtatggcaaataaaaattgtacataggtatataacttattgttttattataggtattcattgttaaatgattaccataatcaaactaattaatatatctatcacctcacataataactttaatttttttggtagtaaaaatatgtgaggtctgctttcttagcaaattttaaatat

SEQ ID NO: 915149 - DNA, 4001 bp, Homo sapiens
attccacacattccacacattcatgcaccacattcacatagtacaaataggaagaaaaggtagaggcagcattcttaccagatacacataaaggtactgcccaccatgcagatacagacaccagcattctcacgtagacacatatcatataccaactaacagataccacagaaatacaaatgcgcaatcagagacacgtctcatgaaacatacatgtgccaggacatagctaccacactcaccaggacacaaccagtacgtattccatgtgtgcaccctctctctcacatatacgcacactgaaaagcaagtgtccacataaacacacccacacattcacacccacaaccagaatacatggcacccttatggacaaatagtcatatagagccatacagatgcaaatgggcagatttcacaaatctgccaacacaccctcttgcatacagaaacttcaacattgcatgtgagctgcctcttgtcttgttgctgtctctccagttactattccccaaataccttcattaacccctgattatggctgggtaaccactttagggtatttgcaataacgtttatagtccatgcaaattcaccaacatgggcacatgggggcaagaacattaaaatcatacttcaaaactggaatgaaccatgaggtgtgatctttacagcctccccatgtcaaaactagatgtattttctagctgagagagaaggagaaggcaagaccaccatagcagagggactagtgcagtcattctccaggatgtccagacagggtcataagttcagtactgacacattcctggagacagaatacatgatctacttaaattgctggaagaagacagcacaataggtttgatactttaatcaccaaggcattcaataggatcctaatattcccatcttctgtagtagtagtagaagcgagacactaaggtgtctcacttgccaccttgtgagaacatacagaggacccttgaacagatctctttggtcttggctccatagacaagggggttgactacaggtggtagcagcaagtaggtattagccataaccacatggaggagggaggtgggaccacccagcctatgcaccaccgagagcccaatgaggggtacatagaagaccagaacagcacagaggtgggagatgcaggtgttgaaagccttgagtgctgccctccgagaggacagctccaaaacagcccacaggatgaggatatatgagaagccaatgaagagagagtccacacccatgactgagaggatgatgaagagtccataaaccacattgaccctggtgtcagtacaggacagcttcataatatcttggtgcagacagaaggagtgtgtgacagtatgtgtttggcagtaggacaaccacttgaggatgaagggcagtgggaagaagaatacaaaccccctggtcagggcagatagtccaatcttggccacagtacaccctgtcagcacagaagcatggcgcaatgggtggcaaatggccacaaagcggtcaaaagccatggccagcaggacagctgactccacggctgacagagcatggataaggaacatctgggccaggcaaatgttgaactcgatctcctggatgcccatcaggaaaagactggccatcttgggcatggtgatagaggagaggactaggtcaatagtggaaagcatggccaggaagaggtacatgggctcatgcagtcgcctctccacacgaatgatgaggacaatggtcaggttacccagggtggccaaggcatacataaaacacagtgggaaagccagccaaaagtgtatggtaggccccaggccagggatacccaccaaaaggaagtatgctgcgtggaccagatttccatttgaagtggctatgatagggaccaagagctggggcttctgcatacaaaatccagggtctaggaaagtagaaagggaaaagtagaaacatcatttagttgtggctcagaggagagaaaggactaatgaggaaaaggcattggagtggtgacagtaacaaacaggactaagtcatcctggtaattctgaaccctagtctctctctgctctgattctccttatatacaacttcctggacatcttgagccttaccctgaccctccaaggccccagtgctgcacaagcagattctattactgtcccatgaatctcagtgtgtgaagacccactcataaaacatgtaacacagtcctgcatcttcagagctgatgttgctgcccagggcactgctcttagccttttcccatcagagtagacttgcaggattgctcagaatggtccacattgaccagctcttctgatgtatcctggggttagggtgggtctgggttcagatttagaggctcagtctacagctgactttaagacctactataatctaatttaagatagggagcaggggctcagtctgggatgagatttcaagagaggtttgtgtttaggcctgaataccatttctcaaactttcctgatagaaacatctaaagtaattgacaacaccatccctccaggtcctgctccaggcccagaaaatcagaattgccagggcaaggttttggaaatctttttaaaaaacaataagccccgccaggtacagtggctcacgcctgtaatcccagcactttgggaggccgaggtgggcagatcgcaaggtcaggggttcgagaccagccaggccaacatggtgaaaccctgcctctattaaaaatgcaaaagttagccaggcttggtggagcgcacctgtaatcccagctactcaggaggctgaggcaggagaatcatttgaacctgggcggcagaggctgcagtgagacgagatcacccccactgcattccagcctgggtgacacagcgagacaccaactcaaaaacaaaacaaaacaaataaacaaacaaaaaacgataagcccctttcccctaggaaatttgtgctttaaatcagagaactttggggaaagttgttctggtgttcttgggggcagggaggtgaatgaagagggactatcatttccatttccagctcccaaacgaacaataagcagcatctgccatcaagatctctcaagccccaggtgagagtcagtcccaggttgcgctcagcaagaggagcatgtcatggaaatcagatgcagctgagacatgaacagaaaatcagccagtgctgctgctgttactccacagtgttcacaggcacacacacctctccctccacctactctccctggtgatcacacaacgtcccaggctcaacttctttctctctacagaccacactgttctaagcctgtgtcctgagattcagccatataacctaccgcctccttgatagttctacctggatagcctatgggcctcccactcatcttgcctctaacagggaccccttccaaacctgttcctgatctcagagaatgccactgctcagaacccacatcacccaagtcagggcagctggtctcatcttgacccgtctcctctttcacccccacatgcaattcaacttttccaattaattattggggccgttcctcttaatacacctcctcccaacttaattatattatccactctgccctgattataaaaagagccttccaacttacctccctgcctccaaacctagtctattccaaaccaccttccacaccactgccatctaaacagcaaaactggacacctggggctcctgctgagcaagttaggagtgattcccatagctttccagataaagtgagaactagtaactccacagtatgcagacaaggcccttcacagtgttcctctaactcaactttccagcccagcttcagtttccttcttcatcaccaatcaccaccagcaccaccacaacacacacgtgcacatacacacacacgtacacactcacacacatttttttcctggtaaagtaattccccttgccttgcttaagtgaagagtaggaggcaggaactgaggagt

SEQ ID NO: 915150 - DNA, 4001 bp, Homo sapiens
aaagcagatgaacccttgcaaggtgttggtcactcttcttaaaatggccaagatgaaaatggaaagatgagagagagcaacttctaactcccaaaaagccaagtgagccctcaccccaccctggtcactcaagtcagcctgaccacctaaaatcacccctaggcagagttcctaggtttcaggtctctgctcctccacttcctgagtaggaccagataagtgttctaaagatctgcaaagctgcacctagttaccagttccctgtagagctattctggctgcaagcaaatgtaaggcaagggaaatgcccaaagtgggattttgatcagtgtactcattttttcaataatcattgacggacttctgtgccagactccactgagtaccagagatatcgttccagccttccaaggatggggagaaattgagacaaatatgcagccatcacagcacattatgataaattctgggacaaggggaagcaaaagggcctcagaagcaaagacaacaatagctcagcaagctttttaggttccaagggcttccctgaggaggtgacatttaagccatggcagtggcgggacctgctgcaggcaggtaatggggcagtgacacaggcagttaatggggtggggcacagcagcattcggttagacaacaaaaacatattgagtgtcaaaaactggagatgaaacagtagataaatcagacaagatgatggcttttatggagctcatataacacgaggccaataatgagaagtaaacaaataaaatttcagttgaagataagggcacgaaagaaagagtgataggacagaggaagatgggtgcaggacactcatactggagacaggggtcagaaaaagcctctcttaaggatgtgacatgtgatgagaaaacaccagccattctaagatccagggaaagtgcattccaactgtgggagacagcaagagaaaagcgtcccccagcaagaatgatattgggggattcatggaacaaaaggaaggtcaaggtggccagagcatcaagagcacaacagagtttgagaagatgaggcgggaggaaggcaaggacctcatcaggtaacagggtcttgcagggtatggcaaggagctttggtttaattctgagtgacttgggggaatttcagcaacagaacttatctagtttgtttttaaaaatacatcctggctaatacaaagagccagagagaaagagaacagaccttgtttggaaagctgaaagtgacttagtgtagctagggtaaagagtacaaggcaaggggtgttgccgtgtggacactaatctactttttaaatgggctgaagactgaatcctgatcctagacacagaccaagctgagatcggagccccaggaagattactaagtcccagtctcagccacagcctgactcctgatgtacagcatacagtgaaaccaacctcactcagagccccacttccaccccagctgcagcctcatccccagtcatagactgagcttcaaccacgttcaccctgttcacacaccaaaccccgacccaaccccaatgcagccccagtctaaccccagcccagcctgtcctctgtcctctgtcctcattcacatcagcccctgccagcctccagatgggcatactagtaaactaatcactgaaaaactgcttgaaaactacccttaggctacctccagcacccacatgctttctgttcagcacacaaacctagagatcactaaggctgcctgtcctttgagtcaggggcttcctacacatctcccacttctggttcttcacagcctggcttctcatgcactcagcaagtctaacaggagacccctagctgcaagtaacccatgcacctggacatgcccctggcctcctgcactcacctcaaccgtatggaaggaatgtgtgaccccctttgtccagtcttcctccagaagaggtctggcaggctgcactgaaatacagcctctctgtctccgcctactcccttggacctccctggtcagggttatttattctctgcctcaccctctccctccttctgcttcttcctgcagggtggggcagaatgctgtccaaagggtacatcagcaggtacccctcactagcccactgtggttctggactgcttctcagcttccgtgccctgggaggatatgcctgggggtatggggaggagaggcaatggggaaagggatctctagagtcctcccctgatgggctgctgggatcctcatgccaactcccaatgtgaaggatagatagggaaagtgagtagaaaaaagctagaagaaactcattagtgtagtcttcgtgacggtctttatccaagtctcttctcaggtttatcaaactcaaacaggagaatggcaaaggaagtttgcagagacactccacggttaagtgtcagcccatttccatcctgaagtgttctttctgtcctcccttctctcatttgggggacactgtttaggtccttgctaagcgtggaattcactgggtccatcctccttttcccaaagccctagggctacatctttttttgtctcccaggctctggtccctgtgtctggataacttataaccaaggtccccagggacagtgcctctgccgtccactctctggccttggattactgaacttctggctgaggacagagaacgtggtttctttaaccctccccacccccaacaccagccacgtaagaccaatgacatctggtttctcccttaagggcaaaaatagtcagagaacattttagagagttagagaacaatttgaatgtaaaactaaatacctcgtattttgaaataagtaaaaactacatctataaatagaacaacatggtttttagttggtctccccttattttttactgatcagtttcacaactgtgagttttaaattcagaacacaggacacgctaaatcaagctatgttaaatagatcatggcaaatcagaccattctaactcagaccacatcaaaattactggtgacaacagtttctggtgcctacagagcacgcagcctgacacttgctatcagaaccctggagccatctctgctgcctccattaacctcattaacttagacatggcaaagactttaaaaaataccaaagggacttctacttccatccaatatggagtaacaatgagacatgtggaaggacagtgagacatgagacaaggtgaataatgaggtgaatgctacagttttttcagcttcctgccttaagggagtttccatgcggcaacagaagggagattgactggcttcccctccacccttgctttcccagagggattaggagaaactccctacaaccaaggctttttttttttttttttttttgacacagagtcttgctctgtcaccaggctggagtgcagtggcatgatctcggctcactgcaacctccaccttgcgggctcaagcgtttctcctgcctcagcctcccaactagctgggactacaggcacgcgccatcacacccggctaattgttgtatttttagtagagatggggaaccaaggacttttatacatgtttggcagataagccaaaaagggaagggagaggtgaggataccatgacttgctattgaggcaggagggcagggtttagggaggccagtgcctcggatagcagaggcaggaaacgtaggaagaggtaacaaaagcccttgaaatccttgtgttcaggatgaagaaggtgtggtctggcctgtgaaaaggtggagcaaggaagcaccgtgtttcctttcattctgacagactgagctatcacccaggctgaccccaggccgagaaactgggcatcttagagtcatgtcactcaactttggaaattatttctgctgctcacagccagacttcttcaatctccctcctccattccaagatacatacagacaccacacatcaatccatgctcagaaatacagatgctgtccccattcgtgtcacatacacacccaacacac

SEQ ID NO: 915151 - DNA, 4001 bp, Homo sapiens
tctgcttttctcccaagaagtacctcttcttttcttgcttttcatatgctctccttgagatatcttggttattctcatggctttaaatagcacttatatccagaagactcataaatctgcaatctaattatggcatctccagagttctgtattttaaaagttagcagaatctttaacgctgtggcaaagtttctggttttaagcgtaaaggtagtaatgagacatgaaaatacagtgaagcaatcaaacctgtaatttagaaaaataattgacagcattttggagaacaaagctccttgctgcatgtggtgaataaaaagtaaataaaatactgtggctacccctgagggacatctctacccatcatcactcagttacttcaacttctatatgagacaaatggaactcattctctcgtcccctccaaacctggctcttcctcctgcttcatttatcagcaaacgacatcgaactctagtaaatcattgaattaaaattactacccaccacacacacacacatgtgtgcacacacataccctcctctttctctctctcatcccttacatataaagattagtttttaactgattctactcctgaaatgtaaaagatgagaacctcgggaggtctatataagaaggccaagcaattgttagtagtgggtatttgcagctattatttcattgcatttttcttacattgaaaaaatcttaagtgtttatattcaagacaagagggggactaatgaatatccttagaaggaggcactaaatttcccccaagcttctcttttgtgctgccttcactctagaatctttccgacccatcctctccaatccatatatactttcattttctctcttgtgaaataagctatattctctcaactaatttttctgcccactcggattacaatgatgctcctctttcattgcactattataagctatagcttgtggctgtcttaatctgctgaactagaccttatagtgtcatcagtattctccatgctattgtcaatggtatggctatcatgtgtgactgacctgggttcagattcttgctcaaacactaactagttttgagaccatctacaccattaataaaaatattactcatagaaatagctaccatttactggacacgtgttctgtgaacattattgtcctcagtgctttataagcattattttaattcttactatgtcatcatgtgacaagtattattagattcactttaaattcatttttctggtaaagacactgagtatcagaagtctgaaacatatttgaaatcacatacaactggtgaaagtcagagctgaatttttaactcaggtctttttaattccaaagctcgtgctctcaaaaacaattgttttactgaaatctacaagtaatataaactttctgtgacccagtttcctcatctataagacaggatatgcgctgtgtctaataccagtagctggcaggcaatgcgttcgaaattggtaacttttcatttttagtaatagttattgggcatagaaatgagattcactgactgtgataaatatatcagcacactgattaaaccatttgactaaaaacaagttatctaacctatatcaggcagaacgaaatacccattctctacgtatttcctgggaataaataattctgaaattctaccgtcctcctcagcccaccataccaacatctaatctaattctgcacattgtgaggaaattactccctgtgggtgagaaagtccaattcatctagagtcaagcattttcattgaacaaaacagttttacttacagagcccatacagcagttcggcctgttcctttcaggctgactcagaaggctgaggaggctttagattccaggggagggccgagcttgcaaatatgaggagacttattccagcctgactggagacaggcacagagctgaaaggccaattcctggtggtggtgctaactcactgtgtcttcagggtgtggagattcccagaagacttcttttgcctcatacagtccttttatatctgttccattatgcaattacttacggtggctatgtgctttatgggctgatgtaacctttttttcatgtgtcatttcactcaaaagcttttttatttaacagctttattgttatatcattcacatactataaaattcacccatttatagtgtatgattcaattttttttagtaaagtcacagaactgtgcaagaaccatcatcacaattcaattttagaacattttttattacccttaaaaggaacctcataatcactagcagtcactctgaaggagattttaaaaaacgaaatattgtagcaaattgctaaatgacatctcccattatgagtgagagtccaactccaccccttaactcctcagtatctatgattattcacagcagtatggtttcattagcccacctgtggttctttgcagcagcagtctttctcttacagataaaaaataattcatttactcatccatacatatatccagtaaatatttcataagaatgtcccatattctaaacattatactcagtgatagagtttttttttttaagaatacaccataattcttactgtttaggattttagtgtagaagatagacaggttaaccaataattacatgttaaccaatgataaggttatcctagaggcatgaaccaaatgcttggtgaatacagtaggtaaaaatcttggttcacaacttacttgtgtataaaatacggtttcatttacttttttataatttgacctatttcgtattttgaagtcccaacctaccaggttgaagagaattagtcacaataatttggggttctctctacttatagtcaaattttgaaaatcttgtattataccaagaaaaattgcaggtaggtgggtgattgacttggccaatgatgtcaccttctgtcagtttactatcactctcattagtctttaataaatagaatgcatagattgctataagttgtccatcttttctccttatggcctctttagatccttagatattcccaccaatttggaccacacttgggcatatgggtctttgattcattctcagtttctgtctcttacaccctgcatttaatccattggtaaattatgtcaatctctttgaaaaatacaatcagaaattgatcactgtttatcatctccagaaatgtcacctttatttaagtcacaattatctctcacttgggtaacttcagtagtttcctaaccattctccctgcttccgatattatctcctctccactatcaaatctgtttcactactgaaaatgtcatggcctgagatattttcttcttcataatgtaataaaaacaataaataacaagaacaataatattttattatgcattctacatccatgatactaggccaagtgtttgtggtagacaggataatggcccctaaagatacctatgtcttaatgcctggaacctgtgaatatgtcaccttacattgcaaagggactttgcagatgtgattaaagttaaataacttgagatggcaagattagatggattagctgggtggatccaatatagtcacacgggtctttaaaagtagagaaccagagagatggcagcatgagaaggatttgatccactgttgctggctttgaagatggcagaaggaggctacaagccaaggaatgtggaaagcctccagaaggagaaaagaagataattgatttttccctagcccctccataaagaaatgcagcctggtgattccttgattttagctcagtgagatccatgtcaacttttgacttacacaactctacaataataaattcagtagaagaatccattattagtttgatttatgtcttaaaccatgtttaaaccaaaaattagagtgtaagtaacttacctaagtttctcagttataaatggcacaagtagtattcaaagcctcggctatctgacaccctctcagttttcaaaactcattttc

SEQ ID NO: 915152 - DNA, 4001 bp, Homo sapiens
gtctcttaaatccaaagagttaccataagttcgttttcagaaaccaaacattttgtgtctgtctctgtaaaactgtgtataggcaagaactatgaattctttaccttggttctttagctggttaaggagtcacataggtctttaatggcatttgtgaaaactgtgaaaactatggaaaataatgtgagtatgtttatctatggggaaaggtccataaatttcattagctttctaagggaccacaatgcagaaaaaggttcagaacatctgccccaaacttccttgtaatttactttacattcttttctagttctctcaagttcccattccctgtgataaattagcaagtgtgcctcacccctaaagcttttctttggactgtccaacactggatagtgactcacatgccatgacatatctattcctaccttttgtattatgaattatccatgaagaaaacagctagagtatattctaagaaggttactacaactttttaagacaaaggatggaaccatggagatccaggtcttacttttgatcttaaaacatttctgctacatgactttggcagagtatgtaatacagtgatgaagagcatagcatttgagatacagaacacctgggttcaaatctcaactgtgcctcatgttattcacatggcctttgggggcctaaatgtctataaatctgttccatcatctgtaatatatcgctaatagtaatatatatttcatttcgctgttttggaagaataaatggaatatgtcttaaaagcagttagtagaacacctagcctgaaacaaagagtcaatacatgttaattgccaggagtattatttatcatttcattattgttattttcctaattccactacaaatgtcttgggtgatatatcatacttatattttatgaccaaatatacaacatatttactatttgtttggtgaatgaaaaatattttaaaaacccacatgcaataggcagtaagagagcaagttcgcttttctacagtgcaagtcattcatgccaggtttgtatcaaataaaactatgtctgttcattttgtaagcagcagactgagcatagccttgcggatttgttttgtttttacactgtcgatgatggggttgagcacagggggtaaaagcaggtatacattagccatcactgaatggactactctgggggctgaccgaccatagcgatacaccaaggacaggctcagcatgtggatgtagaagaaagcaactgctcccacatgggagacacaggtgctgaagaccttgtgccattcttcaggggaggcaattctgaggacagagtgaataattaagatatatgacaggacaatgcatggtgtatctattccagtggtcaggatgagatcaattaatccacagatgctatttgcccgaatgtctgaacatgctaattgaatcacatctggatggtaacaataggagtgagaaagggcattcattctacagaaatagagaggcttaaggagcaaaagtagtggcaatattagtactatagcacgtgtaatcatcagaagacccatttgaatgattctggaattagtgagaatggtagtgtacctcagagggtcacagatggccacataacggtcaaaggctgtagccaccagcactccagattccataaaagtgaatccatgaagaaaaaacatctggacaatgcagctatatagactgatttcacgtgcctcaaaccagaggatacctaatgttgttgacaatgaagaaacagtcaagcccagatcagtggctgatagcctgaagaggaaataatacatgggttcatggagactctgctgggtaatgatgacaaacaggatcacgctgttcccagagagggcaatggcataaaaacaacagaaaggaatggagatccagacatgggcagactctaggccaggaatgccggtcaacaagaaggttggaaatttagatgttgagttgcttaggatttccatggtgtcctggttttgcagcatttgtcctcacaatgcttccatcctatagaagtgatacattaagtgttatgtaaaatatttagatacattttcttttagttagtagagttatccaaggtcatagataagatctgcatcattgagaaacctttaaattaaattataatgttcatctaccactcataatcagaaatagttcacaaaaatatgtttttgtaccataaaattcaagggaaatatgtccatatgattttatacattttcatgatagtgtccatttacagaatatattaagatgcatcatattgtaagattatttgaataaagacttagctgagaaaaaataagtatcctcaattttgaatattttgtgagtacaatgaataatagccacttaaaaatatccatggttcttcagtgaccataagggtatgagtctgcagacacagatctccagatatttgccaggaatataaagttatcaatgtatatttatcattttcatccaacactataggtaaacaacttcagagactagaattataagagaaaaacaatgaggacagaactctccagaagactggaatgcactatatacactaaagcaagatgagactggttttatggggactatgaaaaccaaaagaggctgggcaggtggctcatgcctgtaatcccagcactttggaggcagaggtgggcggatcacgaggtcaagagatcaagatcatcctggccaacatggtgaaaccccgtctctactaaaaatacaaaaattagctgggcatggtggcgtgtatctgtagtcccagctacttgggaggctgaggcaggagaatcgcttgaacccaggaggcagaggttgcagtgagccaagattgcaccaccgcactccagcctggtgacagtgagagactccgtctaaaaaagaagaaaaaaaaaaaacatggtgtgaagaccggatgttacatgagcagctgtgtcgaattgcttgcgctgtgaagcctagtaaggattaaaaaattcaaatgcagctgagagccattagcgatcccagaaaaaacagtggaaaattgagaacctgctacagtgtggtaatgatgaaagtattagcagtggaggtacggtttattttaagaaacttggcagtgaaggcaaggggagaagtaggccatgtctaaagaaggggtatcaggtagatggagaatttttgcaagatgggacagaattcgagaaattgatatgtttataaacggaggttaaaaatgtagcagataatgagaaatttaaaatatagaatgtgaaggatttattgatctataaaagtccttaagaaagtagtgggtgattaagtgtagagcatgagtaaccttcaaaaaaatgaggaccatcatttgcactgacactagtaagtgtcaaatatgtaagtttgtggagagttatataaggaaattgttacctttttctctgtgaagtatttgggggtaatttactgctgttcaaaagtgtaaagtgatggctgctggcttccggatacagtagacgttttcaggagacagcgaatgagaagggcaattggctcagtaaacagaaatgctatatcgcctctttcaagtaaaattccaagaataattttgtcaattaatatatttatattgttcaaatcaattctggggagaattaaattaaataatagcagtattcatgagtataatgttagtatttttcaatcaagtctttaaaaaattagatgtgtcaaattcatgagagtaaatattctgtagcaaggatacaagttactgttccctttatgctagtattctgtggtttattttaaatctccagttgtctgattttcaattcaatctgagaaacattatgaaaatatttaagtatgaattattagaggttgtatatctacatgttatgtggatcgatgaggacagggcaaaccctcatgatatctgacttttctataaacccatatgactatttgtgaat

SEQ ID NO: 915153 - DNA, 4001 bp, Homo sapiens
gttgtctgaagtctgtggatatacatggactaggactttgctaaaaggcttggataatttgtcaacagatggaactagcaactttgttagaagagatgtaagaaagtctgcatgtgatgtgctattgaagcacacacaaaggatgaaaagctctgtgtcttatgttaatattcactacagagtattcacttcagaggagggactcaacaaccagctataaagtatctatacgttgatatcagccagcctttgctctgccattgctagtccagtgagcccataaatgaaaccataaaatcagggatagagataaatatgagccaaaagtacagattctcttacaccaagataaatcttggtttaaaaaaaaatgaaaaatagtgttatccttactcctagaatgttaacaatgtaattaccaacttttaactcttcagctaacagcagcagtaactgatgctgagcacataatatggtatcttgtatttacattaggtagcccctgcacataataaagggcaaaataattccatctagataagacccaatgtggaattacattgatgtgtattttaggatccaccctatagaatctctattttggaatcgcatatataatcaagaatttcaagaaaagaaactaattaaagtgttttctgtgtgtcattcagaaaataacaactgacttatttagaaagtttctcacattaaatgtgaacttttataattgtatacagagcctgaattaatactttatgtagctttcatactgcttacaaatataattagttgtttatatatgtttcttcacttcatattgaaaacaaaatcataatttagttggcaatgacatgaatttattgacaaagaaattgactaaataaatgtcacataacctataaattgcttagtttggactgttggaggcatgtgtgggcactttgggacaattactccattgtagcaaagcacttattcataaatggctttatctctaatcagaaatagctgatgattagatttggagtgcttctgaattaagaccttgataatggccttttgaatctgcttaatctttacactgtaaataatagggttgagcacaggagggattagcagaaagacattggccatgatgatgtggacaaatggaggtgctgaatggccatagcgatggacaagagacaaactgatgagagggaggtagaagatggaaacagcactgatgtgggatgtgcaggtgttgaaggctttccgcctctcttctgaggaagcaatgctgaggacagatcgaatgatcaggatataggagagcaggatgcaagggcagtcaaaccctgtagtggacaaaagcgcaaacagaccaaggatgctgttgatcctattgtctgtgcaggagagttggatgagatcaacatggtagcagtaagaatgtgaaaggaccatagaactgcagaaggacaacctcttgacaaagagcatgactggcaacatgacggcaacatttcttatcaacatgctcatcccaatcttggcaattcgggcattggtaaggatggtagtgtatctcagtgggtaacagatggccacaaaacgatcaaaggccatggccagtagaaccccagactccatgaaagtaaatccgtgtagaaagaacatctgggcaatgcaggcatttaggttgatttctcgggcttcaaaccagaagacaccaagggtagtagaaagtgtacacagggacaagctcaggtctgtggctgaaagcatagagaggaaatagtacataggcttatggaggctccgttcacagaggaccacaaacaggatcatgctatttccagagacggcaacaacatataggagacaaaaagggatggagatccagtactgggtggctttcaggcctggaatgcccatcaggaggaagatcagaggctcagcaatggtattattgaggaccgacatagggaagcactgagaagacagggatgtttcagtcatttaacataacacataatacatagtttatcacttgtaacatctctctggcacttcaagattcactgagttattatttctaattttcaaagaacttgaattttctttttagcttcccagagctacacatttctctccaagtctgtcagtgtttcacatttattgagaaaagtgaattccctgaactgtgccacatcaaattttcttaagtatattaagcctataattctcattactagcaataaacattacaattaagtcacgtctgccaatataaatccccagtaaaattcctaaacaatattatgagaaacctgctttccagtacttgttgaaaataaattttgattctggaataaaacactgagcaaactaagtcatatctgaaatgtgaatattattatatttccttggaaaatatccagaagaatgccaaaaaatccctgggacacacaggcccatatatgtggtaatagggtggcccaaaaaaacaccctaagaaaaataaatattgatcgcatttgttgggagttccctgtgttgttgacattttatatgcattatataatttcatccatacaccaactcttggagatagatcgtacacgaattttgcagatgagcaagctaagactcagcaattaatcacccaatgttatctttataaagcactgcctaaatgttgagagaaaccacaaaagtaagaaagttggagaaaggagagagacaacgatgacagaggaggaggagaagaaggaggagaaagagaaagactagtgaaggtggaggcaggtaagagcacaaaggggaagaggaggaaagtgcaagaggaggaggaggaataagaggaagaagggagggagtgagaaagaagggaaggaagaaagggaaggaatggaggaaaaaagcaaaccttaccataattttactacaataaattaagcactacactatgataaataataccacagactagtatcaaaataaaaaaaacacaatagccagcatttcttgaacatgtgccatatgccagacacaattatcttcatatccataatatgatccaatcattattattcaacaaagaaaataaatttcttatccctaatatacatatgaagaaactgatatttacattaagtaatttgccccaaattatgcagttaggcagtagaagaaatgaggatgaaacctgcatatctaacctcaatgccttcactcagtaaagctgaggaatgcataaaaggaatttctaaaccagtctgacaaaggctccaggtgtatgattttaaagagacatactatggtccgtgtggtatctttggaggggagtttgatgtgtcaaatgttaattccatgtgaactgtggagatatgaagctctttaggcttctctggaaagtagtcttaatatcgatagttcctgtatgcaaagggccaagaaaatcaggtatccaggctatatccactatggaaaataacaccaaaatggaaccatcaaattcagttgaggccaggcacagggttcatgcctgttatcccaacactttgggaggtcgaggcgggaggatcacttgagcccaggagttcaagaccagcatgggtaacatagggaaaccccatctctacaaaaacgtttacaaattagccaggcatggtggtacatgtctgtaggtcccaactactgggtaagctgaagtaggagaatttcttgagctcagaagtcaagattgcagtgagtcatgaatgtgtcactgtactccagcctgagtgacagagagaaacactgtctcaaaaaaaaaaaaaaaaaaaaaaaaaaaaaatcagtcgactcatttcagtgaccatctcattctttcaacaatacatattttgttgatgattctggaaattttctctccctcattattttatgataccagtctctcttaatattctcccattaatcagctctttctctgactgtttcagttttcttgtttctttcccccctctcccgggtac

SEQ ID NO: 915154 - DNA, 4001 bp, Homo sapiens
tccttctcatgactccacataaagtcatagcagaaaatacctacatgaatatataaagagttactaagttcactccctatgtatctagatatatgtgataatgtacagaaatgaattcacacaaactggccaactaggatatatgtaccaacacaaacaagcatgacacagcagatttatatgccaaggaatatcaaaatacaccaagaaagaaaaacagcagtatttgtttcttcatgcagactttgtttgatatggctagatacagagatgagagaaacgtcttacaaataagcacaaaataacacataattttcttttacatttttactcttttaccttcatatctaaaggaagaaatcaaggcttttccccagttactcaggtgataatcctcaatctcaattacatcttttgaggattatccatgcataattttgtgctgtttcaatttgataacttcccttaaactcccagggtgtctcctccttttcttaattttgtgggcatatgtttagtaaagactatcatgaaaaatcattgcctggggtgtggatatagatatgtacaaatatgttgtaaatgaataaaatctgtaattatgataaagtaacataaaaataaataaataaaaatatgtttaaacagttaatcatcaatgaaattacactggccagagaattgaaagatgaaacttttgtactgttttagattttgtccaatcataatggttaatatttattgaaaattgtatatttgccagacactgtgttagaaaactacctaaattattaaatatttacaacatccctatgaggaaggaaggtattataattatttccttgctcattctgcagttgaggaaactggagaacagagaggtaagtaactttctcctggtcacactgccttatgttgcacagccaattgcctttttgttgacagtcaacggtttattattttgccacagcacagctgaaaacaaacagaaacctgtgggctttatgtccaaaacttcctctctttactctaacttaatccttccaaaaacacctaagtgactttataaactgaaacttcttaatgatgcgctggcgaatttgcttggtcttgatgctgtagatgatggggttcataaggggtggtaccagcagatacacataggacatgaagaggtgtacaacgcggggcagatgttcaccaaagcgatgcacaagagacaagccaatcatggggatgtagaagagcagtacagcacagatatgagagacacaggtgttgagggctcggagtcgctcctggtgggaggcaatgctgagcacggtgcgaaggatgagggcgtatgagagaaagatgagcagggagtccacacccacggtgcaggccacaacaaagagcccatagatgtgattgacaatgatgctagagcaggccagcttcatgatctccaggtgaagacaataagcatgagccagcacatgggagtggcagtattggaagcgcttcaggaggaatggcaaggggaggatgaggagagcacttctaagcactgagcttagccccatcttgacaatacatgcaggtgtcaggacggtggagtcatgcagtgggttgcagacggccacgtagcggtcaatggacatggataacagaactgatgactccattgaagacaaggtgtggatgaagaagagctgagtgaaacaggcagggatgccaatctctctggtatcaaaccagaaaatgcccagcacagtgggcagtgtggaaaggcaaaggcctaagtctgtgacagctagcatgcccaagaaatagtacatgggtccatggagagtggcatcagtacaaatgacgtggagaatggtgaggttccccaagataactgtcaggtagatgaagcagaagggaatagagatccagccatggagaccttctagaccttggaagcccgtcaggaagaaagtggctctttggaggctgctattaagaagaattgtcatagctttacaatcttggactcagaaacctggaatatagaatgagattcctggaaagtgacaaggctgaattctcactcacctaaatgtcccaagatcagccagtaaggaagcatctgcagatggcataggggagaactgggtgggggctgatctattagccttttctactgggtctaggaaggagacttttgatggatgaggaggcaaataatagtaggctaatctgaagcctggaacaaaggaacatcttggaagaatcttggacttcagaaaacaattctagaaaaggggaatttgggacttcgttctgagagatatgatacgagatgtatgtctttaatagcagggcagttaagccaggactggatctagagatgggaaggaagaagagatttacactaggtttgaaacacaaggagcaaaggagaaaaatctgaaatcaccaggaaaagcctgaaatctttggtttagaatgaggaaacgaaaccagaaggcattcagagtgagttttgcctgtggggctgggattgatatgacatctaggtatccaggtctgttcctgtaatatctgaactgagttctcctttgttctgccttcataaattttattcaattgcattgaaaaatgctctattgtgttatatatatataagtgtagtgtgactagtacattgtcacatgcattaaaatcctaaaagataacatttattaaatgcattgtgagcctgttaatttgtaaatgcctaatgtgcattacatcattcaactctgacaccagttctatcttgtaagttctattcttaggagcatagtacaggtgagaaaattgtagcgcagagaggtaaagtgacctgggtaggtttacagagcaagtaagtgttggggatgaaatttaaaccctgacattgtactgcaaagtctatgttattggacattaaaccgtattttcccactactattgcacagtactttagccattagaagagaacattaaaaaaattaaatttaaaatcccatgcgtttcctatcttggaaaagtctatgaatagacatttccattatatgaataccattcaataagtcaagatggatggcaacagaagacacatgttttagagaccgagtccagtttggatatgctgaatttaaagagaaatttctggggagagggtctagaggatattatatgtagcgattgtggtgtgactgagggcttgagttacaggtatgcaccgtgggtatggagaaagtccctaggagatgaatggtgaaaaggaaagatggggggtcagttcataaaactgataacttttaaatgagggcaggtcataatgttaaaactagaaaggggacagagaatggagaatcagagaaataggatgaaagtaatagtacataatgtcaataaaaccaagccaccactgttaactacaaaaaaaaaaaaaatgaagtaggacaagtttgtttgtttgtttgtttgttttttagacattttacttacaatggctaagtcactgttaatttttcagagactgttttaatagactggcaaagcattgtaagggcttaccttattagtgggtgaggaggattaagtaaaaagtttatattctgtgccatttccctctgagagaaaatctacagatgggtgagaatattaggattttttagaaaagaaagataggaagttgagaacattctttcaaaaagcttctgtttctttcctggcaaagtagaagcacattgaagggcctctactgaagaaagaatacaatccctgtagcttttgccactcacatttcaaatccaaatgaataacaataaaataataacaatttaatataagaataaaaccattcttgttttatgatttcaaatgagaagcaaaaaaaagggatataaagaacgatggcaaggaaagaggaagaaataaaggaaagaagtagagacttggaggggaactgggctgtgaaggaaaaagtagatatcaaaggatttgca

SEQ ID NO: 915155 - DNA, 4001 bp, Homo sapiens
ttccacttcacctcatttttcttaaaccttcctgacattctagagaataaaaatggcaacaaaaacaacacttcagataattctcagaatacactgtcctctctctcacttctgcttcagctttgcacatgctgttcctttggactggaacatatttttgtctccttcctcttacagtttttgactgcctaatgcctacatttcccttaaggctattactgtgtcaactcagggaaaacttttctgatgctcccttcccccagctaggggaagacaactcccaaaccaatttcttttttctttgaagaatacaattaacatgtgattgtataacgaatcttcccaaaatttagtgtcttaaaaatatttattttgtttacaaaactgaaattttggctgagtcagagaacaattgattgctttaccagatgccaattggagaggctggaaggttggggaatggaactatctgaggattctctactcattggtggttaacactgactcagctaaggtctcagccttagctgagtgagaccttggctgagcctactggatggaacacctacatgggccttctccacgtcgcctgggcttcctcttagaataggggctgggtttcaaaaacaagcgttgagtgaaacagacagaaacagtggtggaatggaggtggaagagagagagagagagaagatacatgggctatttccacaatactcaattcatgaggcatttacaaattctatccagtttcaaggggagaagaagtagaccctatctctttatgaggagtagcaagttcctggaagagcatgtgggtttagaattattgctgtggctatttttagaaaataaaatttaccacatcatattacattttacccccccctgccctggccacaacagagtgagggttctgtaaggactgtaactcatccctgtacatgtttgttgagtaagtaaatgtctcctttattttatgcatgttagaaattataaaggataggcaaacaagggcacgtttcaggagacagtggctctaacactagacacagttagtaacaaaaggcatgcgtcactcgatcccggatctgtttggtcttcacactgtagacaatgggattcatcacaggaggaaagagaagatacatgaaacccatgaccacctggaccaggtggggtgcctgctttccaaagcgatggatgacagagaggccaatcatgggagtgtagaagagcagcacagcacagatgtgggaaacacaggtgttaagggccttgaatctctcagccctggaggcgatggacagcacggtgcgcaggatcagagcataagagaagaggatgagcagtgagtctatacccactgtagagacgatgacaaacatgccgtagatgctgttggccttcatgtcggcacaggccaatttcatcacttcttggtggagacaataagaatgtgagagaactggggagccacaataggggaatcttttgagcataaaaggtaatggaaaaatgagtgctacactacgacccagagagaccaggccaatcctgccaatgactgtgttggtgagaatggaaacatagtgcaaggggtggcagatagccacaaagcggtcaaaggccatagacagtagcacagaggactcgaggaaggagaagcagtgaatgaaaaagagctgagcaaagcaggcatcatggctaatttctcgtgctccaacccaaaagatgcccaggactgtagggagagtgcaaagggagagacccaggtcaatcagagccagcatggacaggaagagatacataggttcatgaagtgagcgctctgttttaatgataaaaagaattgtgcagttgcccgggatggaaaccagatacatgaagcacagtgggatggagatccagatgtgcatgcgctccagcccagggatgccactcagcaggaaggtagcagaaacgctgctgctgctgtttcccagggatcccagggtcattgtgtgaggagacaagggggaaggtgggtgccctccaaaatcctgaagtaaattgaggcagtactggtgattgcacctggtggaaattaaagaaaaaaaatagaatcaaatatacctagaactgtgcagctctttctagtggttatgtctttctggtccttgacttcctctcagtatctttttgaggaaatttgtctcatagtttcaataagaagcaaagacatggaattgtgaagtgatgagccaaactgggtgagttggagattctaaatgagccgctccaccctttttgctcttttctgacttctgtatcaaccaggtcttcttagccactagagtttttactagtctcacccagtgggatgcacccaggggccaggtgcagtggctcacgcctgtaatctcagcactttgggaggccgaggcgggcggatcatgaggtcaggaggttgagaccatcctggctaacacagtgaaacccagtctctactaaaaaaaaaaaatggtgtgggaggagggagaattcagcctccctctgctggcactgtgggttggcagtggctgtgttctgccactgaaggccacagctgttgttggggacttttctcttatagcagcatactccttgtgttgtagtccttgctctctgctccttcagactaagaagtgagagtttcctcattattcctcttggccctatttaactttgcctgcctcttacaaatagatcttttactggaaaaaaaaagtcctcacatgccttttttctaccaggcctctcactaacattctaacttttatttcaccttcttttcttttcctttatcttactgtgctttctttgttatagttttagtttttttctttctttctcttttttgtttttgattaacttctccaggcacatacaagccctaattctagacagaccaacccttcactcaccttctcctctggtcttcctgacatagaagcttagccttgtccaagtagctcataaatgctgctcagcttacagaattccagagaaaggtggagagtatgtgaatgatgacctgtgaagctatttctgactgctagagtaagacatcaaagccctgatcctcctgtcaatcagtaaccagaattccccagaagtccaggaatccaactgctgtggacctaagtggcaggagaggctaaagcaccatcaaccatggccacatccccaaccacaaggtcatgtccaggagagcccactgaacacagggcagtgatgctggaaaggcccagtcttctacagaggaagaaatgaaggctcaggagagtcttgtcactgggaagaggtcatatgccaattcaggcctcctgacttccacagcagtgatcttccattctcaattaatatcactggaatatgagctcaaagagggtaggggcttttctttgtttacctctattaatccagtatttagaacatgccccagtacgcagcagatgccaagaatgtttttttgcatgaataagttattttttatttcgctaactaatagtaacttggtgcaggttttatctccttaaaaagcctatgaatattctattgataatattatgctgtagataagaaaacagaagcttagaaaaaattatttacatttctaagatcagacaaatagtaaagacaaaaataggatttgaacgaatatttgatttttctctagacttcaggatataaacaatgattactctttcttgccatatagataataattcagtgtcaagtggcagagctagctcaacaggcctttaaaagcattgctgattctttagctgaataaataaataaactgattggagaaacacacataaagatatacacagacactttctcactccaataacggtggcattaatagtttgggccgttaactcactgtccacctgaagatcatataggctctcacaccgtgctcctcagcttctgctgtggccgtgatcagtggttaccacattacatatcaa

SEQ ID NO: 915156 - DNA, 4001 bp, Homo sapiens
cttgcagaatgtattaaaacacaaacttcttggtctcactcctgatagttttttgttcagatgtctaaagaaagtcctcagaatttgcatctctaacaagtttcgatgcaaagctgatgatattgatctggaaatcatatatcgagaaccacttttccaaactcttgttaatcatgagttttgttactcttgttgcacagcagatgggcatcaatctaatacctgagtgctgtcagaaaagagaaacattgtccttctcaaggtataatcacccaaggttcttatcaaaagcagttctcattcagtaggacttatgtggggcctaagaatctgtttctctataaagctaccagaaatgtcaatgatattgtttagtagaccatacttggaatagtactgttctaaacgtttctgcctaagtgtttcttctcaggcaattatctctgccaaaatcagtacccttctttcttcctgccatcctgaatcaagaattctaacttctctcatccttcacaagctacttcataaccactcaacatagcctgtttttattaccacaaacaaagtagatcttctctcttgcattaaatacaaagcctccatatattttgtctctctttaatatttattatctccttcactctgggcaggagcagaattatttttgataaattctgtttgccctgctgaacttcattattcccgtatatgtcaaacaagaatttttcaggataccgatggctcttttttatattttctcttcacatgtctatctggttacttgacaatatttcatactcaccattataacatgcctagtagcaactagcacaataattttcacataagtattgaataaatatgtatgccattttatagtcaaatattattttattagtgatacattcactactatcaagatcctgggtcctcttcatccttactttagcattccttaagttgttaacatgtcccaatccttcctccaaaggagcttttggggccttcagccttcctcaggcctgggatttatggaagaacttgagaatccctttgcggatctccttggttttcacactgtagatgatagggttgagcatgggtggtacaaacaggtagacattggacatcatgacatgaacaacaggtggagcacttttccagaagcggtgaatcatggagacagcaattatgggcacataaaaggccagcactgcacagatgtgtgacatgcaggtgttgagtgccttgagccgctgttcctgggatatgatgaccagcatggctctcaggatcaatgcgtaggaaagcaggatgaaagttgagtccataccataggtaaaaatgatcaccaagagcccataaatgttgttaacatggatgtctccacatgctactttcatgagatctggatggagacagtaggagtgatgcaaaacattgcctttgcagaagggcagtcgtttcaccacaaaagggaaagggaagagagtggtgaaactcttggtaaggatgcccagacccatagccaatatacggttgtgagtgagcacagtgacatagcgtaatggataacaaatagccacaaagcgatccaagctcatggccagcagtatgcctgactccatgaaggagaaagtgtggatgaagaacatctggaccaggcaagcattaaacgcaacatggttgtagttgaagcagaaagtagaaatcacagtgggaagtgtagaaaaggacactcccagatcattgagagcgagcatagagaggaagtagtacatgggctgatgcagagcaggctcccaaaacaccagagtgagaatgctgaggttacctacaatggagatcatgtagaggatgcagaaaatcagggcaacccaggtgaggcctgtttgtatcccaggaatgcctgtcagctggagtgttgctggctggaagggggtgccattgagacccagcatggtgggagaatatagatagggaatggacccaagagggtgtgttgggaaacttcttcactttctttcagatatcctgtctccaacaaaaggtcatagattgaaaatgattgcctgtattcctgccttcccagtaagacactcatctctttaaggaagcaaccgggttctaatcgtttgtgtaccaccagggccctgctcactatctaggccatagtagaaactctgtggtttgatgatcaaatgagtgcccataacatagcaaggcataataggagacaacattaacaattgcttctggtagaccagaaagaggaaatgcatcctaggctttggaaagtctttggtagatagcatagatggaacatctactactataaatttacagattcaataacctgtagctcagacttcaccccagcctcccaatcccaatggctgcccctgaacttgtcatagccaaaaacttttctatccctgaaatcctaaatttactgttttcatatccttactctaggcttctaccttccaaccttctcatgcccgtgcacttgctcttgagtctccatgattcccccattttcctctggtctatgaactcttcttcctcacttttctcctgaactactcacccacactaaaactggtattttcatctcctctttatctctctttcaccttcatatagtaaactgcaacctttaataaattctacaatcaaaccaggtatgcagctggataaaaccaaagaagaaagtattttatgggaataaaaaaagagaaaattattacttaaccattaccaaaattttaaacttatacacacctttattcattcttaacctctattttctgagaaagagatttctctccttctccaaggacaggctctccaccttcaggatttcatttcttgtcactccttcagagcctttttcactaatccagtggatattcattctctccctttctgcctcttttccttcagacaataagtatgtgcaagactattccatcataaagatgcgataacattcttctctacccaccactctatgaccctttcccaattcttaaccaaatttcttgaaaaattgtctctccaggtacctgaaaatagaagcttgtattttatcattattattttttagttatttgcctgcttctccagcttgtttctgagatcttcgatgtcgggattcaatcttacttacattaccttctatcactgctcaattcattatatcgtggcttccacactcccctcctctgagttgaaacaaatttctctatggtcacctagtgacctctttgtctctgaatctaatgaaaacattctctctcctaattcacttgatcttcttgctacagttaacactgtctttaactcacctgtttagaaccaccttctccattcaagggtactatttgtccacaattgtatttcttccttggcttctccttctctgccttctttactgaattatcttttctgtcttttttttaagcagcctcagcctaacttcaggcaaaataaacaatagtcagaatgatgcaaactgagaagtcacaccataagagacttcatctcaacctttatttaaaatagctcttctactatattttcatggtatttgatatctcaaaattaaacctccattctggaatttcagcataatgtctcttttattatttttctcattttagagttcccattttattcctaccactcctcataaacagagtgaaattagatggtgacaaggtgctggatcatatcgagatatcagtcataatcccaaatatatataggtagtgagaagagattcatctattcctttggtttctctctcctcccaatgaaaaggcaaagcatccatttaatgagtagtgttttctccttatgggctactctccttgctaaacctctcttcccctaaacccacatttaaagtccatgtctctaagaggtctttttagatctagcctgttcagatctgttttttttttttctttacctttgctgcaagattttctctgagt

SEQ ID NO: 915157 - DNA, 4001 bp, Homo sapiens
ctggtatctaaaccataagtgctctagtctgtctatcctaggctttttttttttgcaactggaaatcctagactgacttaatttctaacatctcttaacatgtcattttgtggaagacagttaaaatctcaagaaggaaagagaaatagaaattgtgcccctaccacaattccccctttcccccaaaattctatgagtcagatatttcagatattgaacattgttttctgttggtaaggattgagtggtgggcagataaaagaagtaaagaagaatctggagattttcctaaatggcaatatctatcagtttacctggatcacatttgttcatacattttatggtgagttctaatagttaagctgatttcactttgtgaagttaaagcaatgtatgagtgtttgagaatgacagtggtggggaaagcaaaggcagcaatggtaatgttaaatgatgccaatttgaccgtcaggccatatttataccggttgggtgctgcactgacactagagagagattagtgttgaatgtcaactggaccacatattatctgtgttaggctgaagaattaacttaattctctgtgtcttagaggatttgtatgaatattaagtgaattaatacacacaaataatttataatagtacttgatacattttaggactaagtttgttaattattatattagtaatattcattattatagaaaataattcctagcttaaattagtcttcctctgtaaaacttgtctaattactcaattgcccccaatatttatctttctaagaatactgttggtatttagtgaatgtactattcatttggaactccttgttttgtgttataagttttgcatcaccatctcctggcctacttttcccgcagcacacaatctatcttatactttgatgatgatgatgacgatgctactgatgagagcctatggccaaaataacagattctaaagccaagtgtgaaagtcatattttgatgtggtgaaacatgcggaaaatggctcggcggatttcctttgtcttggcgctataaatgagagggttgagcacaggaggcacaaataggtacacatttgacatgaggacatgtatgtagcatgggacatgcttcccaaagcggtgcactgtggagaccccaatcattggcacataaaatgcaagtacagccaggatatgtgacacacatgtgttgagagctttgaggcgttcctcacgggaagcagtggccatgacagaacgcagaatgagcacataggagaggaagataaaaaacaggtccatgccaaaggtggatacaagaacaaagagtccatagatgctgttgatactgatatcagcacaggcaagcctcatcatgtctgggtgcaggcagtaggagtgagaaagaacattggatctgcagataggcagcctcttaataagaaagggaagagggaaaagggtgatgaagcttcgagcagctgcacctaaacccattgcagcaatgacttcagtggtgagcacagttgcatagcgcaaggggtcacaaatggccacatagcggtcaaaactcatggccagcagaatacctgattccatcatggagaagaagtgaataagaaacatctgaattagacaggcatcaaaagtgatgttgcgggcattgaggcagaaggttcggagtacagtgggcagtgtggccatggatatggccacatcactgaaggacaacatggacaggaagtagtacatgggctcatggaggctgggctccactcgcacagcctgcaggatcactgtatttcccccaagggccacagcatacatcacgcagaggggccctgacagccaggagtgagagctctccagaccagggataccagtcaggaggaagaatgcagggtgagtgacattgaacaaccccatagcaaaacaaacttagggtacttttcagagtcagatcttctgacttggagaattctaacagttgcacttgctggaggacaagaaatcaggagataagagacaaagcgatgatgttgacataaatggaaactgacgcattcatgaaatcactgcttttgagatgatgcaggcaaactccttttcttcatattttatgatgatcagcctgcaggctgagctaatatttccctctattttatgaacaaggaagacattgacaaatacttcaataatagaaattagttaaaaggaaaatgtttaaactacatttctacaacttgcatatattttggaggcatgattcaatagaaatatgctaactacaattcatagccacaagagaagaaagtcaggagtttgtgttatcagtagcacttggaaatatttaaatattttcttgaaaatgttgcttaattcatatgtatcacaaattaatgagagactttcccagagcaagttttgtatcatgttgtgtgcttggatggagagggaaaaggacagtgggctgtggaggtaattgactgcctccagaggcagtcatgagcttttcattggcagaattactgcaaaaaagcaacaacagaaataacatatttttgtgcaaaggcacaaggctgtatctgtttctggaaaaattatgtatttgtccctaaatattctataggtacactagcattcggtgtgggagagcattgttccaaatacaaacttacataccatcacatggttagatgtactctcaaaatacccattagtcacaaggacacattaatgtaccttcacaacaggtagtaagaaagctcattcatagtctaagaagacgctcattcacatactctctccatatctccatatctcgtaaagtcgctcttgttgtgcaaatatattcaaacagtccctgttgattttttttttttttttttttttttttttttttttttttttgagacagagtctctctcttttgcccaggctggagtgcagtggtgcaatctcggctcactgcaactccacctcccgggttcacgccattcttctgcctcagcctcccgagtagttgggactacaggctcccgccaccatgcccggctaattttttttgtagttttagtagagacggggtttcaccgtgttagccaggatgatctcgatctcctgacctcgtgatccgcctgccttggcctcccaaagtgctgggattacaggcgtgagccaccgtgcccggcccctcttgatctttataccatttaacatgtagatcttgtcctcatactctcagtctgcactgacatatatgcaggatttatacatgtatacacactcatagacacatagatttgtatactcacacaacacttctatctacatgcttggggactgcccactgatattaatctactaacccacacaggcactttttaaacccttaatggcttgtatttatttaccatttttcttatgctggcattcacatattatttcttacagccatttctctgtcacagtgattgtattgtttattctgtttttgacacacttttgtgttcattgcctcatcgtggatgaggatacagaaggctagaaggcttttcactaagcagacatttcaagctaataggtcaccctcattttagagaaggaccccagaattacataccgctgtttttcctttctctttcctctccaacctctaacaaagcaagaccggaccatgctctcagagttctttctgatgggaatgaaggagaaaggggacccaggaacatatgaggtatctaaaagtaacagaggttgtggaatggggtgcaatgaagcattgtcaccccaggaagcatttttaaaatatccccagcaatacataactcacaggtactatggtttccagcaaggcagtggctgtccctccgtgttgtactgaatatgtcccttctggtcttagagctcagtctgcatatgcttgtgtctcttcaagaactctgattacttgggatccagaactgatgtttgtctcttatttctcccatttgactacactctcattc

SEQ ID NO: 915158 - DNA, 4001 bp, Homo sapiens
cagagatcacgccattgcacttccacctgggtgacagagcaagactcagtctcaaaagaaaaagaaagaaaaagaagttccatagaccaagtcttaaaacaaaccaagcaccctaccaaattctcccccactggccagactactggatgacccaccagatgacccaagataaacatccgtgagcaagccttatagaccccacaagtctatgtgccttctgcatggcctgcataccaaaatttctcttattaaaaccctgctttctgcccagaatgctgaagtgtctcctttcagtacaaatctggccctttctcatcactaagctctggaatagtaacattcttcttaccaccttcattcttgttatatgattttgcaagtggcatcaactgaaactatatttggtaacactcccatgtatctaactcagtatttgctggcaaattgaggaagctgatagatctagaatagcaatgagagaaaggacacatcactaagtgatgagattagaacttgtacatagcaaatggccacagcagcaggtcaaaatcctgtcaggaactcaagttccaaacttgccctaaggactcaaatttttcataaacagttatgacattgtagcatgaacaacaaaatacgtgcagcagtactagtaaaagagatagagattgatttctgagttttagataattaacatgagaaacaatataaacacagctacatttaagaaggaaaatactgttatcattaacaacaatgacaacttaataacattaataattttgtatagttttcaaaaaacttgacttagcacatacattttctattataagtcttgtaatgacctggggacaacgtaaggccatagttgtcacaatttgtccaaaaaaatcctgagtttcatattggttaaagattaactgaaattacatgtataagaagtgaaagaattaggattttaaccagatgagcaacacccagatattttacttttcatatactaaaacagcttccatgagattttcagtggaaaagttggaggacagaggttacttaaaacctcctccttaggacaaacttgtggagaattcctagacgaatctgctttgttctgacactatagacaatagggttaaggactgggggaagaagaaggtagatgtctgccatgaggatgtggactatgggagacagatgcttcccaaagcgatggaccattgacaccccaataactggcacaaagaagataagcaccacacagatatgggatacacatgtgttgagtgcctttagctgctcttcacgagatgcaatatccagcacagtattaagaatcagaacataagaaagaagtatgaagattgaatccacacctagtgtggcaatgactacacaaagcccataaatactgttggtcctggcatctgtacaggataatcttagaacatcctggtgcaaacagaaggcgtgagagagggcattgccatggcagtagtgatagtgtctcagtagcaaaggtgtgggaagtacaactcccaagcttcgtagcaaacaggccaaaccaattttgccaattacactgttggtgaggatggtggggtagtgcagtggatggcagatagcaacaaaacggtcaaaggccatggccagcaacactgaggactccaggaatgtgaatgtgtggatgaagaacagctgagcatagcaagcacttgcctggatctctggagcatccaaccataacacagcaagcatggtgggaagtgtagacagggacatccccaggtcattcactgctaagatggaaataaagtaatacatgggctgatggagagaggattctatccaaatgacagacaggatggtaacattacccataaatgctaccaaatatgcaagacagaagaggatggagagccaagaatgaacatactccagtccaggaaaacccctcaggataaatatgggctccacagcatcactgttattccagtctcccatagtgactttgagtaattcagcaagtagtgaggaatggttcgtgttttccttcctgatccctcaaagttatctcttttgagtacaaataatggaatgaggacaaaaatacatctttcgtctaacctcacagaggaaggaagctggtatctcttgtcggccctatgtaaaaaacatttcccaatattaaggagcacaaattctggaacaaaaatgtggactacacaaatatggtcatctctggcaagaaatacgttggatttgcatcaaagacactaaagaatttaagcaacgtgagaatagagaaaaaagaacttttactaattattataaagatgaaaatagagaaaagtcagagtgaatgtcgatggatttgtatgagtttctggccaatgttcttgagttaatcagttattgcttctaggctatcttttcattcatgacaatcgaattgatcccatggactcaacataatttctattcagctgcatttttatttaaagatttataatatttaaacattttaaatatttaatattttaataatacaagataaatacccctatatgaaaagagagcatgaacataagaaacagaatccataataccagaatccataatcccagcatgctttattgagctgctatttaaccaacacagttttgagctgtttagtatagcaactattcctgacctaaaaaaaaattcacggtaaaaaaactatatatatagtgtgtgagtgtatatgcgtgtgtgtgtgtgtgtgtgtgtgtgtgtgtgtgtgtgtgtgtttgtgaaataagagtttaaatagtttgaaaataaatctttaggccataacatcacaatataactacgaaagtccattaaagacatttccctttctgctcttccacaaaatgagaacaatgcatttaacagttatctattacatgttttcagtaaaagaggtacttttccactttatttctattgatttttttgattgattgatttctgtttccaaacgatgcttttaatatcatttttaaaagatcatcaatcaaaatattaagtggttcttaattttctgacccacttgcacctacttctgtgaactcatgacaatccagaatttaggccttaaatattcactatcagtgcctcttagaaacaaccaagctcttctgagtgtttcaaaatatgatattaacatctggctttactttccctcagcaattgttattgtaatagcctccttgcctgtgctgaaccagtgttgcccttgctgtatcatactgtgttgatggcacttggtacagcagctgagcattatgagattatctgccccttctgttacctaggtctttattttaaccctgtctagttccattaactgcccctgagaaaattatttacttaccttgtcccttagagtctgggcctcatagacttcagcaacatctctctgtagcaacatctcagtaattccctcaaccctccttctggacccttagtctctgaccttttgaaagattaagataagacttagcctcatcctagagtaaaaatatttccaaatgtggtctcaaactcgtatcacaaggctccagctagctagctgtttctttttattatctccattatatttaataaaaagctttattttaaaaatcccttgactgattcttatctcactttcataccgtgaagactgaaagttcttagatggcacaacttagaattccaaagaggacttgatttagaatctgtatctgaggaacaaaagaaagcacaaagccctcttctccatgtaatgagaaggatttgtctctttttctacttttacccaagtacaggaatcctccatcttctatgagtcagaacctaacctggtactcttctctagcctaggcaatgtgaatgaagctttcatttgagaccctcgtcttaaataaagcagtcagctacccatcaaattcttcacacccagcagagtatgtgtttagagcatttatttttct

SEQ ID NO: 915159 - DNA, 4001 bp, Homo sapiens
tgacaaatgttacaacgggaaatgcagggcactgtggaaggaaaccgatggagcatttggtgctttaccattggaaagggaggagctatctgtgaaaatgtccttgaggaagcaatttcaaagctgagacccctgcaaggattgcatttagtcactcgtagggacaggctgatcagccaatgtaaagtttatttcctcctgagcaatgggattgtgacttcaatatgtttgtgtgagtttccttggctgaagctttctcacgttacatgtcattgttcaatatcacacaactaaaacacctacaagtaaatactgactgtagcttaatgtcagacttgaggttgtaaggtaaaatcagagatgagaggagtcaaggataggatcaaagtctcttcttctagaggaatatggtcaggagagagcacaaccttagaaatttgggggggtgttgcttgaaacaggtgttgaggaagaatgcaggagttctgaggtttctgatgtgacttgggggtctgaaagttactgctgaccaggatagaaaaagatgagaagaaacttggccaggtagataagatggaagcagtcccaaggaaccatggaaggaggtgtatttccggaggtgagttagagcaaatggcatttacctggtctctgccaggctctcctctgggtgctctggtatttattgttctttttagtttttatttagtttcattttagttttagttacattgatgatgaccttcaataaagttgccttctggatagctttgatgctaccaaaaatgccagttctcagctgtaggaggagccattaaaatctaagcaagagaagttcagttttttaaagccacaactccagacataaatttgcccatattttatttaggacaggggcaaaaaatctttaagagcatgctatatactcaatactccaaattttcagtccaatttggggccttcttataggcctctagggggagttttagccccaggactcatttactggcctttttaagacctaggaacttgataatggcacggtggatctccttggtcttaatgctgtatatgattgggttaagcatgggaggcacaaaaaggtagacattggccataagaagatgaatagcaggtggggcatgcttcccaaaacggtgcaccagggacagccccatcatgggcacaaagaatactagcacagcacagagaggagcggtgcatgtctgaaaggcacggcgctgctcctcttgggaggccaggcctgctactgtgtgcaggatgagtccataggacagtgcgatgagcaccaggtccagcatcacagtgaaaactaccaccatcagtccatacagattattgaaggtgatatctgtgcaggccagctgtatcacttcctggtgcaggcaaaatgagtgggagaggaccacagatccacagtagggaaaagccttcaggaggaggacaatagggatagtggccacaggtccccggaagatgacaattaggcctgctctgaccacttgctggccagtgataatgaccgaatacctcagagggtggcagatggccacaaggcggtcaaaggacatcatgaggagcactgaggactccatgaaggaaaaagagtggatgcagaacatctggatttgacacgctccaaagtagatactatgggagttaaaccagaagatccccatagtggtgggcaacgtggacacacacagccccaggtcagtgagggccagcaaggatagtagatagtacatgggtgtgtgcagacgagggttggtcttaataatgatcagaatgaaacaattgcctgagatggcaaccatgtacataaagaaaaaggggatgaaaatccagtgtttgatgccttccaatccaggaaagctggtgagatagaatatggggctaaactgagtaatgttggatagcagcatgaattgaggactgagcgaatattggactgacattcctcggggattgagctgaaaataaatggatatttctggttattaattcttcagcttcactaacattcacaacatcacaagcagtaccatggtcatcatcacctttagtattatctactccacccttatgaattctgccaatctcactactttattgaactttctttgataacctcgccctcaccagttttcctctgtatttcaattatttcagttcctctctgcctctttgctggtgtgcctttattgctcaacccttaagtatagttcttcccatccttggcaatttcctggccatattctattatttcttcttaatgtcatccactaccatgatttcatttaccatccatatattgataaataacaaatatataattccagaacttgtctttctctcttttgatttccagactctagcaacatctgtacttttcattatctcagtggctcaagtcaaatgtcatgttttatgttagacttctccatatcacatctctccatagtatctaatcaaccaatcaccaagtcctagggtttctgtttactgaatacctcaagtctgtttactcaccgtcaccttcattgatgctattctaattcagatcactctttcaggactattccagtgactcatcttttgtactactgtattcagttgactactatatagcaagagagacgtatacataaacaagtttttaatgaagtaaaaaaggtttaaaatgacattcaagaccctaccttattttctctccgtgtatatcctattttcttatctatcctaatttcctctgtatattcacggtgttaatgacactaaacaattcttccagtttatctagtatgcttgctcataggtaaacatttgtattttcattcttcctggaataaaaacattttttcctgaaatagctttcccttaatctttgtctagttaacttctactaatataacccaccttagcttagatatgatgtccttcagaaggccttcttaaattccccaagtttagtttgaataccctctcctatgtgttcctgtagttcactatgcactaattaccatgatattttccctgcagcattgtcaatttctgtattgcttctataatgtgaattccttgtggacataaaccatgactgtctcttttttaattttaatattagctctagggattgacttttttagccaccatatcattggaatcctttaaatattatttgaataaattattaaatatgtatcattaccattaatcttatttcaataattatttcaatattcaattatttcaataattattcattaattgattcaataaatacatattgaaattgtattacatggcagacataattctattaggttggtgcaaaagtaattgtggtttttaccattactttcaatggcaagaactgcaattacttttacacctaggtactgaaaatacaatgaacagaaacagaacagagacaaaaataaacacatacatacatactgcaatgcaaggtaatgtaatgcaataaagaagtagggagcaaaggaggaaggtaagagtgatgcattttatatagggtagtcagagaagacctctctgagtaggtaattttagagaagaaatcaaaatcagagggcaagtgtgtggctatcttagggaaaaacattcaaggaaggaggaagaacaagtgaaagttcctgaagcagagagcagcttgacaagtttaaaagacaaaagaaggccaatgtatattcaatggaggaagcaaggtggggaatggtggcaaatccacttgaagtagcagctaaatgctacgtcatgtatgatcttgcaggtcacgcaagctactttgaattttattatacttgtgagcttcgagttgagagcagaggtgctgcatggatataaggcttacatcactttggcaaggggtaaaaaatagtccacatttatcttttccatttctttacttctcagtttactactcaaccaaccaccctataatgttttttttaaaaccc

SEQ ID NO: 915160 - DNA, 4001 bp, Homo sapiens
atcaaatttatagttgtcccttcaaaccgatattgctgggaaagtttatcttgtttccacaaaatattttttatgatccttaaggtcatatcactgtactagaatatttgctcgtgaaaaattcatgatgcccaaggaaatctgcctgtaagaagcagagctacattaagaacataaaagtatgaaaaaagtctgctctggtccggaaaaaaaatgagtttttcttcccacaagaaagaagtttgaattctgaatactgaaaaactctagcaaggtaggaactgtgaaaagtcttaaaaccttacactaattttagacttcttgcatatgtttattttgcttgctgagtgtttattaggtaaattaaattacttgggtgttaggtaaatctgaatttacctaattcagattaggtaagtgctggtgttaattaggtaaatctgaatggcagaaaaacttgatgtgtctattgtccctcaaaatgttatcattcctttgcaaaggaaagtccaatcacccgtgagagtgacccagaacagaagatctaatgtttacctaaatgcctaaatggaactgcctaagagaataggtgataggggcaacaacaggatttcctttaaacttctgggagtttaagtttaaacaagcccgtaggagagaaaaatatccagaaagaaagacaagcttcgagagaactttactcaatccattaaaatcctcccgttgggatagctgctaagatgtgctagaattttatcaactcagatccatatctcttttgcatagaatcactgctgctagctcacctcagccaaaaattccatgctaaaagccagggacttgtcatactgccttaatattatgatgaagttttattttatagtttcctaattctgaatatattccccccttaagcctatgactcatacttgtcagtaatttaagaaatgcattccctcatcttgaatgcatatttttgagggaaaggaaatttaacattccccattggatctgcttgttctttacactgtaaatgatggggttcatcaccgggggtgccagcaggtagatattggccatgataacatggaccagtggagaggcatgcttggcaaagcgatgagtcatagatacaccaaccatgggaatgtagaggaccaggacagctagaatgtgggacaggcagttattgagggcacggagtcgctcagcccaggtggctgtgcccaagatatttttcagaataagtgtataggagatcacaatgagcagaggatccacgataataatgagcaaggcaagagcaaatccataccagctgttgagcctgatgtcagcacagaccaggcggatcatatcctggtggaggcaataggagcgagagagaaggtgggagtggcagaaaggcagtcgcttgagtaagaaaagggagggaagaaccgccagaacacagcagcaaatgatggctaacccagttctaccaatgacttcattggtgaggatggaggcataatggaggggacagcagatggccacatagcagtcaacggacatagccaggaggacagaagactccataaaggagaatccatgaaggaagaaaaactgagcaaaacaggcctcagagctgattctacgaacgttgaaccagagaagctgcatgactgtgggtagggtggtgagggtgagacccaggtccgtcagggccagcatggagagaaacagatacatgcgctggtggacagatggctctgtgcgaatgacagtgaggatggtggtattgcccatgatggagatggtgtagagacagcagacggggatggagatccagatgtgggaggcctcaaatccagggatgtccgtgaggatgaagtagatgccttcttgtgtggtgttagtcacctgggacatgactgatgaatgtgtcttcagattcaggatcttcactcagggagaaaaagaaacattagaaataatatctctttgccccatttaatccaaattctacacaaataaatgttcagagttgttgagggtaactaaagcaagatttaagaacattgtgatatatgatatcctttccttagcccaattctgcagactgctcccacacagctaatcttcccttgatgacggaatatatattaattcatgggtaactctaatttttcctgcccccattttcccactcccattcagttttcagcacatttaaatcagcctttcatacaaatctcactatcaatactgttctcacaaaggctaaaaatgaactctattgtataaatgtgatgcttaatattcaatctttatctttttttgatataaatccagtgtctttttccaaatatctcctttgacttttgtagcagcattctcacctatttcactagttctaaacctattgctactttttcttcatctcctaattttttcattcattaaggttttattactgtactgcagtctatttctactctgtcctattctcattagctaatgtcttctgatattgattttatttctatgacataaaaaataactggaaataagggaggaaacataggaaagaagagaaagagaggaaatagtcagaagtctgtttaacagcccaggtgaagacaatcacatttattgagtactatctacatttaggcactgctttaagtggataactcgtattaattcttatgttctaacaagtcatgtgcccttttctttttcctgatgattcacagaggagtcttacctgtggtttctcctgccttggaggtaccctcgtcaccatctgtggcttctgttttctcagcttagctcagagagcaggtgcggtataagccccttgcagatctctagtctggagggtggaaggtgtggcaggtcgcttcaggattacacggaggcatcgcatcttgggacctgggtcccacagggagcccagtaaatcaactctggtggtgacagcctttgctgcccctggtgtcctcacagagcaataagttagaaagccatattgaatcacagtttcattagcttgttgaatgtgatttgaaactgcatgcttaagcttgaactgtacaatctctcaaaaattagttctaaaagacttccttctataagtactccgaagctgggatagagtttacaggggcaagagagctgtagttgaaagaaatattgtgcatcaatttcaaggggcattcatcttaacctgagcctctggaaacactaagaaaaaagaaatgtttatatatatgtacaagaaataaggaaatgaagacagaaatcaaaactgaattagaaaaaaaattattcaatagttagctatttggtggttcatctctcaattcccacaaaactaatttcaaaatgaattaagtaactaaatgaaaatcagtgacaaaaaataaaatagagaaaataatataagcatttaaatctttcctttgtgaagactttgtaaatagcagcaatagacaagaatcacagagaaagacaagtagatataatctttaaaagtgaaattttctctgtagcaaaaaatggtaaaatttaaacatttcaaaaatatttataaaaatatggaagagattactatcttaaatatcaaaaattaaatatatcaatatttatcaagaaaaatacaatagattaagaaaaactatatgacaaagttaacagtaaaagaaatacaactacaaagaagcataaaacaatgttcaactgcatccaaaaatgcaataatggaaagttaaatcgtataattggtgttttaaactttcaaaataacagagaaatttttatgacaacatgctatgcaaataaggaaatggcagtgtagaaacattcatactttcttaagtgtaatttgtatgttaatttctggaaaatgattcgatcatagatgccactttaattcagtaaatttacttctggtagtaaatgataaaataattttaaataaggataaaaccttttaatgaaaatagacttttatgtaa

SEQ ID NO: 915161 - DNA, 4001 bp, Homo sapiens
tatgtgtctaaagtgagagtgaatgtaaatacaatccgtccactttgtccctcctgatgtggatgtgaatgtatactgctgctactaggaagtaaagaattgagaccgataattccaaatgccacttgtaagattccatttacataaaacattataagtgttcactaaacagataattatagttaagtttgggggatgtaatttaagattattcttatttgttctattttttctgaaatatgcaaaaatttaaaaaattaaattaaattttattttaaactgacaataattatgcatagtcatagtgatgttttggtgcataccatgtatagtgatcagatcagggtgattagcatatttataatctcaaacatttctcatttctttgtgttgaggacattcaatatacatatgtattcaaaaatatactaacattttgaaaactaaatgaagaattaaaaaaattatattccctctttttttcctggcctgatcagagttaaataacctatctcttggtgtgaagaatctaaatgagagacttacttgcattttcctcatgtatctaattcctaaggattggtcagaattcttacttcttaaggaggtacaatacaaatggaagatcttctatctagttgagaagaatgcttctgtcttatttttcctttgctatgtagatgattaactcttctagctttatccagtattaaggtatagatatagtgacaggactaacaacaataagataacaacaggcacacacttggatagttgtgacaagatctggactctggcccttcctatgtcattgatatgtaatgtaccagtgggtggatcatgttcattctttggggcttgtaagtttgcatcaatatacacaggcatacttccagggacaggaagctacatgcacatatatgcacttatgtgtacgtgaatgatcatttcatgcttggtgagctgagttctcacagaaactttagtatcaggagccctgtaccaccaaacacggagggacatcctactcactgagcaccacccaccttcctgggctgcaacctgttgagtattctctttctaatctccttcatcttgacactatagagaatagggtttatcaatggaggaagaaggaaatggacataggatagaagagtatgggtatgctgagtgattggcagctcaggatggttaatcagtgccaggaggatcatagggatatagaagaggagcactgcagagaggtgggcagcacaggtttgaccagccttccagcgatcctctctggactccacaccttgcaacaccttgccaatcaggccataggagaagaaaataagcagggggtccaaacccatggctgaaagaaccacaaataggctgtaggctgcaccccaagcttctgggcaggccaaacgagccacatctggatgcaagcaataagaatgggttaggacctgtgggaggcagtagggcatgtaggccagcaggaatggcaggggcagatggagacccaggcatcgaaaagaaatggccaggctgattttgctaattacaccattggtgaggagcgctgggtagtggagaggtcggcagatggccagtgcccgatcaatggacatggcgagcaagacagaggactccatgacagaaaagacatggataaaaaccatctgtagaaggcaggctgaggcagggacagtgtgagcaccagcaagggcgatgcccagcagtgtgggcatcagggcagtgaccaatccaatatcagacacactaagcaagaagaggaagaagtgcattgggcggtgcagggcgggctgcagggcaatgatccagaggatggtgccatttcccagtgcagagagaaggtagacagcaatgaggggcaatgtccaccaggagggtgcacctgataggcctggcatgcccaccagcaagaaggtgggggccattgaagtgctgctattgggggctatctgagttggtaatgttgacatagttcaggattccacgttgaactctggaacctgaaaaatgattagaaaggtttacttaatcgcgtgccaaatttgcatgaaacgttccaaaatagcctgcatcttcccttccctgactcatgcactcacatacacgtacacatatacacatttcctccctgtgcacgcacccatcctaatagtatatgcagcattcattccttgcctttgaggtttttctatagctgtcctcatagctctgtggttctgtttcttttcctagattgttttcacatgtttttttagcttgcctctccctgtagtgttatcctattttttccctccctttatgacaaacactttaggaaacagtccatttatccatatttttttctcttcccaaccccagacagtctgacttctagactgccttaagatacttacattttggtgcactttaactgttcttattaagtccccaattactcctttatttctaaattaaggggcactcattttttctaagcttgatttatttcttaatgagctttggctactatggatctattttttacttttttaaaaattctccctttcagaatttagccttttacttaactttgctgtgtccctatgatttatacatgggtatttaaaatttttattttattgaaatgtaataattgcacatatttaaaggggtgcatgtggtattttgttacatgcatagaatgtgaaatgataaagtcagggtatttaggacatccatcgccttgagtaattataatttttatatgttggaacatttcaagttctgtctactagctattttgaaatatacaatacattgttgttaactatagtcaccctacttggctactgaacattataacttatttcttctatctaagtgtatgtttatatttttgagatatttttccttggccctctttattttcctaagtggtcttatctactctcatgacatcaactcgagtctacaaacagatgaattactaatatatattcccagatccttctaggttcatcttaccttggatgttccaggcaatttaaattcaaataatccaaagcagatcttaacagacacatcttaatgcctctttcagagtcatcagttaggaaacagtgaagaggaatttatgtcaatagcaaaaccaataagacactcgtttgttccctaagtcagttgttggtgccaccattaatcaatttcccaaaataaaaacctgagaattagcttctcctcacatgtaatatccaaatattatttataattttaacaagaaggactggacacacaccatagtcatattttcttccctgcccaaatgcccagaaagattggaactgaaattctggacaaaaagaccacgaaaattgggatctaaagaaaagtaaaataaaaaaacttgctaggttttgttttcaggataatgatatagatacaagttaaccctaaacatttattacaaaaattccaaatacatatgttataaaatattatgttaaaattttaaataaaatataactttcaagctaaaaaaggaagataaatgcaacaaaaaccttaatcccacagacttttaaaaagcaataaatagaaacagacattcatttccagtgtgatggagtgaggaggctaaccctaaacatttattacaaaaattccaaatacatatgttataaaatattatgttaaattttttaataaaatataactttcaagctaaaaaaggaagataaatgcaacaaaacccttaatcccacagacttttaaaaagcaataaatagaaacagacattcatttccagtgtgatggagtgaggaggctaacacatcctctcccctacaaagcatgtataaagctggcaagctgtcaataagatccattttgacaccctggaaatccattagagatataagcttgtttattgaaacgactgaactttggaaaataacagccagttgcctagcattttggcaaggctgcttcattcc

SEQ ID NO: 915162 - DNA, 4001 bp, Homo sapiens
gtgcctgagtttacttcttcacaaaacaaatattgttaataaaggcaatctagaaatttcctattcaaaagcatcaaagctactgtgcaattctagagtgatgagtataccagaaggtagaagcagtcaatagctaggtagaaaattaacaacccaagaaacaagagcaaatagaaaaaagctgcagttctgagagttagcaatggagtagctatggaatcaggattagaactatattagaatatataggcaatgagaaaacaatgaaagtcaatgtgtaattttatatattggatggattggaggtatataaagtactaactaaaactgaaaaaatatcacttctataagaagaaaagggattaaagaaagatagaggtatagggagtatatttgtaaggatacagcactctctagaagtgacaccaggaactgaaaccaatgtacaagattttcctaaagtttttaattataactttctacgtgtgtgcctttgtgcacatatgtaacttttccttttaccagctcaagtaacaaccttcattgcctcactggaaatatcacctcagggaaaaaaaaaaattgttcagctggatgtgaaaataaaattttaatttacttctggtctaaaaattactgtcttaaaggagataaagttttccactatattaaagtgactagtctgcttttatatgcacaggagtcatgtcattgtttaaaatggttcagggacatatgctcaattaatttggtttaaattatggtattaaaaattaaaaataaaactctttgataagctcaggggaaaattactgtcttcttcccactcctaaaattcaattggaattgactcagcaaccaaaacacctgtggataagactgccccaagtccctttctttccaaagcataattcgtgtcctgacaatttcctaccttcaatcccatcttcccctaagacccctcacattaaaaccccatgaacccttggattggagcagctggaacatagcctggcggattgtcttggtcttcaagctgtaaatgatagggttcagcacaggtggtaagagcagataaatattggccaaagtgctacagagcacccttggggtggagtggaagaggcggtgtgccaaagagaggctgatcagtggcacatagaaaatagtgactgcacagatgtgacagacacaagtgctgagagctttttgttgcttctttcgggccacaatgcccagaacagtacggaggatcaggacataggagaaaagaataaacaatacgtcagtgccattcaggtagagctgaagaaacagtccccaaaaactgctgatccaaggtttggaatatgtgtatttgatcacttctgggtggtagcaaaatggatgggaaagctcgtgacccccatgaaaagacacagtgtttatggctacaagaaggggaagtaagaaaactgctggtctaatgcagatgaccagccctatcaccaggaccatcctgtctgtgaggatagtagcatagttcagtgggttacagatagccacgaagcggtcaaaggccatggctaccagcaccgaggactccagcaaggagaaagcatgcacaaagaacatttgaatgaagcaagctttaaagctgatctcccgggcatgaaaccagagaacaccaagcacagtgggaagggtcgtaatggtcagacatagatcaacagctgccagcatggagaggaaataatacatgggtttgtggagtctccgcttagtaatgatgacaagaaagatcatactgtttcccaagagggcaatggtgtagagacagcagactggaatggagatccagacatgagcacattccagcccagggaatgcagtgaggaggaagtttgaggaagacgaagtggtgttattgaatattgccatggttggttgaagacactgaactatgaggaaagaaaaataattaagattctttatatatatagcatacattttattagtcattttatatacaattttaaatttaaggtagttatttttcttctgttttaaagaaaggaaatggacccaggaaggttaaatagtatatctaggctaaaatagttcaatacagattcaaattcaaaaccaaatttactaactccaaagtctattattttttactaaacttcagatgatcagagaggccaggctaatgagacaatttggatagctgaatgttgtaatttccttcctttaaaatacaattttttaatatccttttatacttgtatatgatgtacaggaggggtagagatgagaaataagcaaaatagagaactatgttctcatgactcatctaaagaagaatgtttgtggagtccaagtgtttttaaaattatgtataaaagtctacatatgtttgtattgtttttgtcttcacgtgcagatgaatgcagagggcatttgggggtgcaaaagtaactgagcgatgagatgcttataaagcagatatcagttatcctctgttcttggaatgatatctcataaaggcaaagaaatgacactggataatgcaaggcggtaagaggagaggagacagtggttccgtttgctgctggggaaatctttcctgtggaatggagacagaagaagaagcagagggctttctctctgtgaggtcatacactctggagccagtggtaggtcaaagttcagtgcctaaatttatcaaggttttctcaacattgctggctaaccagagcaatatattagtgctttctctcttcaggtacaagtctccatctgactggccaggaagaaggtagcatctgcccattcatatacagaagaccaggtgaaattatttgaataacactcactcaactcaataacagagtgacccaaaggtcaacatccctattttctggcatcagtaatgttacagacccatcctcttcatttaccaacccctaccttctgttaatttgttaacactgaattatatttcctccacaattcagaatataccctgaaagttccctgacatattaagctaaaactaccctctgcttcaatctttgccccacattttgcttggacctttcccttggtgcttaataatgaggcacaactgatattggtaatttatatatccaagtactgtgttcttctgccagaagtttgagattcttgaaagtttgggaatgcacgtttttaatctctcaatgctagttactaaagcaggatcaggaaaaacagaaatcttcatttagcaacattgattgattaccaaacaattatggccacagaaagggagttttgagtcctatcgtcttttgcctttttctcttctttctcctcctgtcttctctctcccatctcaatttcttccagtatctgttacacccctccctttcttcatcccatcttacttgtagttcccatcaatttattgctttatcttcttcctctccttatcttaccatccctcatttttaaaaaactccccctgccccacttcagtttttttctccacgtttgcactcccgtcttacctggtcacatcagcaggaaacaccaccaacttctcttcagtcccataacagagcagggactaaaccagcttccaaaagcgagggctttataggcagcctagtagagtccccaggcaatggggagcattcttgattagtaagcattctggttggagtgagtgatggaacccatcagcaactcagacacatctccgagacttacccccaaaccctgctcccaggcccaagcaaatcccatccatcaagggctgggagaagagccctagccctggaggcagacagtaatagatatctgctaagactgcctgcctgggtcaaataactataaccattcctctttacccagccttaggctaaggaatctcagccaggaaggctccctgaatgtcagagctggattaggagagcagaaagagtcatcccattgttctctgttttcaatatatcctcttcctaagaggtctcatt

SEQ ID NO: 915163 - DNA, 4001 bp, Homo sapiens
taccttcttagatacctaatagaatataggaagattaaaacaattattttcttgttatccatgcatagttttgtacctgatttccttcctttctttccttctttggaaagctgcactagcttacttagaaaagaaccgctttatgttcttttatcttttttcttttaaactcagaataagtcggtagcggacagtctcatctgttcagaagatcccccacttagatataaaagcaaaagatctagagcaaaatctgcttccagccttgtagcagtggagtccacatataaaatctaaaaaataaggattctaatttaaattagacatggtagaagttgaatccaaagtcatatttctttgtgtcctctttatgaactgtagcttccctgtccaatatagtggctgctgaactgaactgtccaatacaaggacattaaacatttaaatataaattaacttaaagtaactgaaattgtaaatgcagttgttcaattacactaccatcatttcaagcgcacaggagccatatattccactttagccattttatggtattttatagaacatcgccatcagtttagaaaagttcccttggacaattctggtccatacagatatcacaacattcctgtgagttggctatagtctccattttgaaggttaattaagtaaacctcagagaatgaaagaaacttcaagttttctactttgaaacttgaaaacctaggtttttaatccagctttgttttacagcaaaggaaatgctcaaaagtacatttcaggcaaataaacaattttttcctctttcttaaatatggtcagactgatagagtgacctacatgtgtccaggctgacacaatggaacttgtttgttgattctctgactatatttaaatattttttaaggtcatttgtcatggactcagagtaaatctacaattttaataattttttcttttttatggcactgatttttgtttattattgttgctgcttttctttcttttttttaggcaatacatctcaatatctctcaatatcttttcagagaaaagagtctaagcattctggtatgaatctgttgggtcttgacactgtagatgatgggattcattaaaggtgggaaaaggatgtagatgttgccaatgagaacgtgggccacgggggaaaggtgcttgccaaaacggtgcaccattgtgaggctaatgatagggatgtagaacacaaggacagcacagatgtgggagatgcaggtctgaaataatttatgcctctcttcctgagaggcaactgccaggactgacttaagaatcaggatgtaggagaaaaggatgagtatagcatccaacaacagtatgcaaataaccagcatcagggcatagtaactattgaatcggatgtctgaacaggctaagcggagaagatcctggtgcaggcagaaagagtgagaaaggatgtggaaatgacagtaattaaaaaatttcagacagatgatggggggtgtaataaagaaaaaactcctacctattatagtgagcccaattttgataattctggaattagtcaggatggaggaataacgtagtggattgcaaattgcaatgtaccggtcaaaggccatagtgaggaggacagaggactccatgaaggacagaccatggatgaaataggactgggcaatgcaggaatccaagctgatctctcgaatgatcccccacaggatccccagcactgtgtacacagtggacagccccatgcacaggtcagtgagggccagcatggacaggaagtaaaacataggctggtgcaggcttggctcagtccatatcacatggagaaccatgcaattgcccaaaagcaccatggcatagattgaggagaaggggatggaaagccaggggtattgctgctccatgccagaaaatccagtgagaagaaaggaagaattcgtgctggtgctagggcttactgaagtaatcattctggaactgagaaacatgtgagagtattttttcaaaggaaatgtttcaatttcacctgaatacaatgaaatttctaagtaaatgaaataccctaaaacttactgacttaaaaaaaacagctgagaaattctgtttctttgagacatagtatccattgcctttgagaaaatggtcttcttttgatgtcatttaaaagtcattattttttcactgtctggatgtgaacatatccttagaagccataagcaaaaacaaataaggaagagattagtaaaaggagaaggctagttttaaaaaaatacgttgcttagacattttcccaaggatagtggtaaaaattttataccagtaaagagccgaggttcttgaaaaattattttcttctctccaattcattaaacattcgaagtgaagagtaatctttgggctttaaatatcataagtctattaaatagtcacttttccgtcattttccattttgtgccgtctccaagtatattttttctccaaatactatttaatgaagatactcctgttttctccccctccagatgacgtagccagcaattactttttcttcattggtgataagcagacaggaatatttatgcatgagaccttgggtaaatgatttctcactggagctctggcctcttgagatgttcaactcatttgtgcctttgtgatgtagagaattagattgaagacactgagcctttgatagcagctcagtgcttcccattcctttatttattcagttaatgagctgattaactatttattcaatatacatttattcaatgtattggccaattgtgttttctttcttagaacctgcagttctacagatcacaaagccaggctcaaacaagcaagcttataatttcaaaagcctcatggtagcagaatcaattggcttcttctttacattgtttgcctgctttaagttccagacctgagaatcatcataagtttttttaaagctctaataatgtaaacagatgttcaaaagtccatactttcatgtttgattgagtaacttcgagatgttaaagtaacttcagatttgggctgccctttatgtcctacttttcagctttgtcttattagcctcacaacacagttccacagactttcttctcaatgtactctctatactacactgacgtcttctagcagtctaaccattgtttttcttgccctgactccttctcagcattgaataacttagctcactatttttaatacttttttctccatagaatgcttgaagtttcttcgtttcttgcagaggatttttcagtcttttgaatacgtatcttctttcatttctctaaatcgaatttctcttctttcgtaaaatttttctcgaaatgttctatctgcctaaattattcatcatcttttcctcaatttcttcctaccctttttaaaacgatcttgcaactcaacaatcacttttcaagaagtttcttaagacaaatttatccatatatctattattttggtatcatgtttcaattttaaataaaacttataattttgtatttattagctaaatatttaactaatatttaaactaaatatttaactaatatctctgttacaaactaaattctcagttccttaatgtgcagactatgtcaactttttcttattatttgaaactaacatttgcacctctgattcctgaccactcctgagagctcaaattcatgaatacaactggctatttaatatattcatctgagtgtttaatcttaaaataagaatgatgccaataaagtacttgattttccccccaaaatctattttctgtcccttttctcctaatattataaagtgactccaccaataacacaattgcataagacaagtcttgagtcatttttaaaattttttatttctctctttccttccctttcctctctccatcaaatctttcatcaatttctaccatttctaccagaaacacatcccagataggcccacttttacacattgcccgtcttggttta

SEQ ID NO: 915164 - DNA, 4001 bp, Homo sapiens
cttgtctccccaagttctaccttgcactcataccatattgaaaaaactagagttaccttaaactacattatctagtttaaatctcctctactatctacctggcatgatgtgttcttacttccttggctactcatccatcattcctcaagaatcagaggtaactacctaaccaaaaaacaaaatacaataaatgcaactcccctgctttggttagatttcaatgcttcattctctctgaactccacatcctatgtgtacacttgttatttctctcttctttcccttgcctgcccattccccacctctcttcctttcagtctctcttttccagaattacataggtacaaactcatgagaattattcactgtgccagatttactattatgtcacgattctgtagtatagtatttttaatattgcaggtttttgataaaatgatgaattaataaagaagtaaattttgaggttagcaaaaaaaaaaacaacaacattgatgtgtcaaatgcaacacctggttctaatttttgtgcctgtaattccttgtatgactctgaaaatgtatttaaatttttaggctttattgtctcttgatattcataagattttctttgacaagaacacagttaacatgtacttcctttgatttttttttttaaggcagggatgatcaagaaaatgagagtcaacaacttgttttcattgagtccctggatgtttcagaacaacgagccttaggtgcatttaaattcagtgacaaaggcataatttataaatcctcctggagaaatattcttagaagaataactcaaccaggggctaaagaataaaagagaaaaaataatatatattcactacttcactcatttcacacttctcactttcattagtcacgtagaattcacaatcccactgattgatatgagccatgatgatctaaaaccagctattgtgctggcagatttcacaaacccagcatctcaaataatatgttttttgttttgttttgatatggttactactgcaaaagaaaaaagcatgtaggcattaattaaggtggattttatgaacagaacatttttaccacatgaatgcgaatctgtgtggtctttgcaccatagacaagtggattgagaaatggagggaccagcaagtaaatgctagaaaagagaatatggatataaggggagatgtgagacccaaacctatgtgtgaagaaggagaagaaggcaaggaggtagaactggaggaagacacagatgtgagcaatgcaggtattgaatgctttaaacctagcctccttctggggcaaacgaaaaactgtgataaatatctggatgtaggacaatgtgatgaatgtgaggtcaaatcctgctacagtgaaggccacaaacaaaccatagattttgttgacttgaacatttgctgctgctagtttcacaatggccatatgctcacagtaggagtgggagatgactgttgtgtgataaaattgaaaccggcactttatcagtactaggcatggggctacaagaatagcagccctgagtacgaccatagttcctatctgaatgacaagctggtgggtgaagatgttggcatgtcttagtggataacagatggccacataacggtccagggccatggccacaaggatgcctgactctataccctgcaatgtgtggatgaaccacatttgaagcaagcaggaatcaaaatagatttcaggcacattaaaccagaatattccaagcatctttggcataatgctgctagcaagtgcaatgtctgtggctcctagcatgcctaagaaaatgtacaagggctcatggagactgcgctcagatttgatgatgctcagaagcaaggaatttccaatcatagcaatgagataaatggcacagaatggaatcccaatccagcactgcacagattctaggcctgggatccctactagtgtcaacacagagggcatgtagactgtgatgttggaaatggacatagtgtcgttgggtctcctgatgcaaacaaaagaagtttctcagtcagtgttactgttcctcttctgctttctgattttctccaaactcattatattgagtctgtctgatttgggtataactctaaaatcatccatcttattcacagttttgaaaggaaaagatggattcatggagatacatcactgttttcaggtggggcattcacaggcactgtgccataataggatgttatgtgcatggcaatccaaatacattagaaccagcaaaatcacctggacaggggattggactactggccagtctgttatttctttccagacctgtggacaaaaaaaaaaagaagtttatttttattggacattgcattttaatttggttaataaacctctccatatttcacatttcagctattcctctagtatttaactatttccaattttctttaagaacattttagacaagcaaattaacagactctgaccagtacattggtgtaaaagattcccaatgaaagagaatagaggtagaaataattgacacccaagaacataatatatttctttttatattcagaataatgtaaagagaatgctttagaaataattgaaatctttatacttttgacaaatctgagccaaagctcctggttgctttttatatttctttaaagttaaagggaattatattttttcctatatattttaaacagctgaaactcttgaaatgttgtgagtttaaaattttaatacactttatggaatatctagagagaaggaactgctaagggacaagatgagcagcagcaatgcctacggcaagagaacttgctcctgataaaccacagatactgaataatgggcaaatgaatcatttagccagaatagagtccagtttcctggttttaaaatgttcagagttataattagcataatatagcccaataaaggctcattagttcttaatgaaatataggtgagatgcttatataattttgtgagctctgacataagaaattagtaaaaataaaaaagctaaaggacagatttcttagaagaagtcaaatgtagaactagacagggaagacaggacaaacttggggagactaaaattgaggaaagcactatgaataaccaaagaaaatttagtcacttttcaatttcactgatgattgaattttctgaaaaacctgggctcttatgctttatataaaagttctctgatcaaaatagttattttctaaaaattacatattttgaatcagtacattttaagctatacattagagaaatgtttgtgatacagtgaaaagtaaagttacttcattctttcctagacacttcaataaagttgttttatctcagtaagctcatgaatcagctaaccgtatgcttcatgtcaccaatatgctggaaattcaggaagtagctgttctttgaaagaaaaagcagctttttttttttttttttttttgaaagaaaaggaaggtaagtaacaaggaagaaagagaaaagaggaaatggatacaagtttactcaaatattcaacaacaaatgttcaactgctgctaaacttcaaatgaaagaaccaaatcagcagaggacatttcatgacagggaggctgtatcagctaacatacatttaccgtaaactagtaggtcaattaaatactttgatttccacagatttgatccccaatgcttagttttatgacactcccatccataagtcactggctttttctaataggggcaaattttttcttctccaaagataatcacaattagaataagaatcctttaatggcaatcacaatgtctgacttattcaagaccaaagagctgacatgtgagtactacctgacaggcacagatagcagggttgcaggtggtggtgtatgtaagttcctggttagttggatagagtgattgttattggagaagctggtaattaaattatggagaggaaacttggaatcgtgagacttactcctcaattattat

SEQ ID NO: 915165 - DNA, 4001 bp, Homo sapiens
tttctacattattgacaagatttttccccaaaattgtatgtatctatgtctgcctcttgaatgatatgattttttacatcagaacgttttaccatattatttctttctttgaccatgcatcttttcaaaattagtgattcagatgactctgtcaacttgattcttaaggaaaaaaaaatttgtttggttctaagtcttgactaaagtccttattcaggaggtggtttcttatatgccagttctgtgtttagctaatatattatttcaggtttgcataatgattatttcaagtcttcacctttcttttaccctgataatattggaataaaatctctagcatggttttctgtatggtaagattgcatattacttagagcctccaaatttgtggcttttgaataccattaattgacacaaagaaaatgtttactctgttcattattcaatgtcatttttacttagattctaagaattctcaggcattgtccactgttttcctgataaagggtaaataagatagtttctgtactcaagatgctttcagtgggtaacagaatttgtatgttcaattttagaacttaaacttccaaatttgagtaaaactcaagttaggtaaaaatcaataaaattgtgtggttctagaaggatatttgatatgtaagcccagatcactgattttattttcctgaaaatgatatttgtgaatatgtttaatatttttcaattttttttgcattctctcctgtgtaaattccttagtgtttatagtcattggttgcattacataagttttatgttgtagatatcggtattactgatttcatattatttttatattgataagtatttcagataaagtaaataagacacagataaatgattccaaatttatcaaaatatagattcaaagcaaatactaaaaagtgagacatagctagaattacaggtatgtgttgagctagtagtttgagaatattgatctgtgactttcattatatttaggtttttacttagaaccaaccctaaatctctataggagtcactaacgatcaagttacttttttgaagaaaaacactttcacaatatggtcacgaatttgcttggtcttcactccatagacaatagggttgagaaaaggtgggactaacaggtaaagatttgacaagaggatatgaatatatggtggtatgtgtgaaccaaacctgtgtgtgaagaaagagaagaaggcaagaaggtagaactgtaggaagacacaaatgtgggcaatgcatgtattaaaggccttgaatcgtgcctccttctggggcagctgaaagacagtgataaaaatttggacataggacaaggttataaatattatgtcaaaccctaggattgcaaaggcaacaaataggccatatatcttgttgactcggatatcttcagtagccagcttcacgatggccatgtgctcacagtaagagtgagagatgactgtagttcgatagtgtttcagacagcatttgatgagccctaaggaaggtattataagaatggcagccctgagtgtcaccccaagtccaatatgagttaagaactgctgggaaaagatggtggcatgtctcaaggggatacagatggccacatagcgatccagggccattgccagaaggatacccgattcaattgcctggaatgagtgaataagccacatttgaaaaagacaggcatcaaaagaaatctctggcaaatgaaaccagaagatgcctaacattttgggaagaatgcaggtgttaagtgcaatgtctgtggctgccaacatggccaaaaaaatgtacatgggtatatggaggctgttttcatatttgattataactaaaattagggaatttccaatcacaccaataagatacatggcagagaaaggaatcccaatccaacactgcactgactccagaccaggaatcccaattagtataaacgcagagggcatgaagactgagccattgaatgtcggcatgatttgttcatcagaatcaagtggtagatttgctgtttcatcttctattctctgttgagccttgatgaattaaaaattaaaaatatgttaatttattttaggaaaatatactgtagttattttaggagtgtatcatgttgtattttctattctaactaatcttctctaattttctgtctcctttaccaaagtcactgaaagacaaacatcaggttctgtttctccatgtcttaatcattttcaatgggcaaaattaaatggattagacggcttttttctggttcatgactattggatcaacaatattttatgtttattactcagcattatgtgctttttctttgacttaccaattgaaattgtaaaaaaaaaatattatttaatgcagagcaaagaattttaaaactagacttcatctacattagccataaagaaaggatccacaggccgggcacagtggctcacgcctgtaatcccaggactttgggaggccaaggtgggtggatcacgaggtcaggagatcgagaccatcctggctaacacggtgaaaccccatctctactaaaaatacaaaaaattagccagtgtggtggcaggcgcctgtagtcccagctacttgggaggctgaggcaggagaatggcatgaacccgggaggcagagcttgcagtgagccaagatcacaccactgcactccagcctggacgacagagcgagactgtcaaaaaaaaaaaaaaaaaaaaaaaagaaaggatccacagtgctgtagaccattctggtcataatcagaagacaagtttgactgaaatgttctttagttttgaaatccactggctgttttttttttttttccaggttaggttttttgtagtctttttctcatataggctcaaaattctttcaacctaatttttcaaactttcagtgtcttctcaaaacccaatcatatatcttatacattgtcctgtgcattctctaacaaaattaattccttatttttgaattcatgggtcttttcttcagcacttcctatcaaagcttcttctcacctaccatgctcagccatgtgcacatctcttgtattaatatcaagtgccaacatataccctctaattttcattacctagaaataggcattgttacctccctaagcctgaaccatcatctcttcttaacaacttgaaattacatgaaactctctaagaaatattataatttttttctttacataaaactttatatatctatacatcttctatctactcaaatacaattatttatataaaggtgaagattttctttggcacgttattttgcataggactgtttcgatactcttttctgtctctgcccttcactggtaactccagcatgtaacactctaggcttccagagccttctatctctgttaccaggggacaagtgtcagtgtagagtggctttgccttctcatcatccaaagctcaagggctttttattgtctgaattaatctctgcttcaagaaaatacttgcatcacaaaatatgtgaaatattaaataatttacatattacctgtattttcttttagtaattgcaaaactcactctctgaaataatttaagtagactgcaaaatagataaagatagtagtggggggccaacaaggaaaaatctcaccaacctgccagcctcatcacctttcaattgtctatttgtttaattttttctttttccccgatatacttacattgtttctgggaagtgaaagagcatgtataagctatctccagcaattacagaagcatctctttctttctttccataaaacttatccaaaaaataaattagaggtttattatttaatgattttaattaacaaagatttattaagtatccactatgatccaaatattgtttgaagcaattgagaaacaaagataaatttatttattccatatttattaattatctacattttgctgaatgtgtggacttcaaaaagtaacatgtaccatttatta

SEQ ID NO: 915166 - DNA, 4001 bp, Homo sapiens
cctggccatgaacaatgtactataattcctaattctgggtctggtcaaaaactagatataagagagaatcaagagtaccctgtttcctcctactttgtcttttcgctggtccctgagttacagcagagagaagtactgcaaatcagcagttgatttggctcaattatgccaaactgccttcatgaggagctgatttactaatcactggttttgtgaaataatttagctggtcatttcagtgtaccatagagatgcctgttctgatctcaaggagataattgcgctcccattcatttttcaaaaatgtagtatgtgtcaggcattttgtaatgcattggggatacaaatatgaataatatacactcttctgatttcaaggagtttgcagtcaattgagggtacaaataaatgaacaactcattacattacaatttattatgcacatttggagatttgtacaagatacactagacatgcaaacataggacccttggcttgcctggagaaattagaaaagactcaacttttcttgaactaaaatttgaaggaaaggaagtttttccagatgaccaaaggtcatgcatggctgttcctcaaactcacctgccattgtggtagtgggtggcaggccacttgattctgtacaaagaatcaatgcacatttgggatttttttaaaaaattaaaaccccttaaaatggtaaatataaaattatttttatccacttctttataacctcatttcatgtggtgttcagatccctgcgcttctggcgtctatctagtctactgagggtaccaaagcctcatatcagaggcatgtacacttagttattatttctgggttgtagggaggaatatgtaaagaggttagagaaaacaaacaagagaaggaggaagaattatgagaaaagaaagaaaagttgggggcggaagatgaaatagaaagaagaggaagaaaagccttctcagtccaggaaatctctgtatttcacatctagcttccttgaaggagctggacatgaagattcatgagcccagaggggaggtacagcaccaagtcttgatgtcaaagaaccggtgggctacaccctcacgtatctgcttagtcttcacaccatagacaatggggttcagcattggtggcactgccacataaagattggccagcaagatatggacatgttgaggaatattacgcccaaaatgatgggtcaataaggtaaagaaggatggaacataaaacataaggatgacacagaggtgggagccacaagtgctgagggccttgtgccgagcatcctgggagggcaaacgaaacactgctcggaggatcagtgagtaagacacagcgatgaggataacatccaagatgaccatgacaatgggcactgagaagccataccaaatgttaacagtgatgtcagcacaggctaaacgagccactccaatatgctcacagtaggagtgaggaacaatgttggttaggcagaagggcagccgcttcagcaagaatatgactgggaagatgatgcagaagcttcgggtgatgacggccagagcaatcctccccacaacaggccatgttagcactgttgtatatctcagtggggcacaaatggccacaaagcgatcaaaggccatggctaacaggatagctgactcccccacaaacatcatatggacaaagaagccttgggtgacacaggcatcaaaagcaatgttatgtgcttgaagccaaaagatggctagggccttgggcacagtggtggtagacagcaggatgtccatgacggccagcattgagaggaagaaatacatgggcacatgaaggttacgttccatgacaataaccactatcaggatgctgtttcccaggactgcagtgatgtaaatgaggcaaagaggtattgacagccaaatgtgataagcctccaacccagggatgccaggaaggacaaaaactgcaggatggaagatggtaacattggtgtgactcatgatgcactttatggtcctctctataatgacttagaagctgatgagtctactgaaagtgatagaaacagaaagcactcccgaatatgtataaatatcataaaagacagcatggatttctaaattgctggactctccagcagcaagtactcccagagaatgttcacttggtataggaatggcttctggcccatagtgcttcctttgcagatagagcttctgtggcaataatgcttcaagtatgaacagaagtggcagcaccttcctgcaaccaccctgcccccagagtttggcctcactctccctttctgacctcattctactatttccacacaagcagcattttccacctacctgtgttgtacttgtccctttccccaagattttgttctgcatttacctttaatttccctccccttctacttctgtttaacaaaattttaaccttaaaataagtcctcaagacataccactttgtaatggtctgtgttcatagcaatatatctccttcctaaaaaactattaactaaactatattttaactgggttatatttaatcctattaagtttatctggctattgccttgaacatttcacaggacacttgcacctctggccccttgtgcaagggagtagagtatcaagtgggaatccagaggaagcctagaggggtacatttctccactctgatccagattcatatcttccctaatgcagtgagcaatggggcagccaatgaaactgagacaggcaattttcatcaccagctcctcatggacttctcatgctcctcctcaaatatttctatacaggagcctcttggttatgtctgggcttccttatctgtagaagccccccaggaaaacgattctgagcaaaagaaatcaatctattgcccacctgtaaactctgctgactccactaatactgcccttcttcccaccccactgttccccaacgctcagaaggaaccatgtttccctgctgccaagaaggattaagtatagagcccttcttggcttgcctgccactcaggtaatatttgtttcattctgaagttctgaactatctgtcagctattaggactagggaaagagtgtatgattaagaatctagaagggaacatgaagaaaagggaccacagagacagtaaagagagaatcagaactataaaggtaccaaataaacactagactgatcttctgataatggtattcagagggccccaaagaagagatgcaaaggaatcaaatcctcagtttattagtccatccctctgcctctatgcaaatgaactttctcagagcacagtgggctgtggggagggagcaatgggactccagatgggtacaaggaagggaatagagccagatccagacaagtaaaggccgcaggcaggctaataatctgacagcattcaagtcagtatattttaaatatttgggccaggcacagtgtctcatgcctataatcccagaagtttgggaggccaagatgggaggatcgcttgaggccaggtattcaagacctgcctaggtaacataacaagaccctgtcgctacaaaacaatttaaaaattagccgggaatggtggcacgcacctgtagtcccagctacttggaggcggaggcaggaggatctcttgagcccaggagtttggggctgcagtgaatgagctatgatggcaccactgcactccagcctaggtgatggagcaagactctgtctctttaaaatatatatatatacatatatgtatatatataaaatacatattatatgtacacatatatgtatatatatatgtgcgtgtgtatatatgtatgttcaacttctacttagaagagaggctgagctttgctggaatgagcacagagaagaagtcattagtagcactgctctggctctattttaaagtattgaactcaaatttatacaagcaaaagccccagcaaaaaaaacaaattcattttccttaggaggaaatttattggacatttattt

SEQ ID NO: 915167 - DNA, 4001 bp, Homo sapiens
gaattgtgattggagaaaatgtcacagaggagatgacatgagaattagatatgaaaggaggaataagagttttccacaagttgatggaggttatctcaagagaaggcagagtacccgaagagtatggtataacctgagaaaacggacaaattaatggcctggtgtatctaaagctcaggttgcatagaaggtattgggaagtgtggttgtaaaagcacgcagaattcacgtgaatagacatcttgaatgtcctcctgaggaggagatcattgaagaacacagcctgacactgagaatgaaggagttccctttcttcagaatttccccagcacacaccacaccttcagaaaccatatgtcatttcccaacacaaaaatgatcagactcaggttcctcaagggttgttctgcaaaatatgaatcacataatttatttgcaatcctctattatagacattcatgttcataggatataaattataacataatagaaataaatggaaaacctaggaatcactgattctaagaatgtcacttagctagaatgaaggacataaaagaatggaggtttgtacgtgactttacatgaatacaacgtgtctcagagcttcagaaactcagtacaggatggctgaacaaattccaatgccagagcactgttcccactttatttccgaagattatgatagtgttgtcctgttaaggatacatgacttctgaaaaatcaatctattctctctcaggctctgtgcaggaggtagtttgttcagtcaaacattgcattgctttcctaggttgtttaaaaaatggaagaataagccctgtaacttcccagttgaccttgctccagacatcgtactcactgagttatttcctacggtatcagctgacctctcccatctaccactttcatacccacttaccagatagctagagattctgaaaactcagttcttaaaccaaagttatttctgttttataaacaaaaactgaaccacctgttcctggatttgcttggttttgatcccataaataatgggattcagcataggtggagccagaatgcagacattagccaacgggatgtggatacaaggtggaatgtggcgtccaaacctctgggtaaggattgtgaagatgccagacccataaaagaggatgatgatgcagacatgggagccaaatgtgttgagagctttgtggcaagcatctggagaaggcatgtggaagacagcatggagaatcagcatataggaaataaaaattagtacaacatctaagaccaccgtcgacattagaatggaaaacccataccaaatgtttattcgaatgtcattacatgcatatttggctaggccaatgtgttcacaaaaggtgtgtggaataatattattctggcagaaagtcaatctttttaaaagaaatatgatagggaaaattgtaccataacttctcagagagacagtcacacaaattttcttgatcagagcatttgtaagaatggtggtgtacctcagtgggtagcatatggcaatatagtggtcaaaggccatcaccagcaagatccctgactcagagatgaaggtggaatggatgaagaagagctgagtgatgcaacgatccagggagatgtccccagcacggaaccagaagatagctaaggcctgaggaatggtgcacgtggagaggacaatgtctgctccagccagcatgcagaggaagaggtacatgggttcatggaggctgcgctttgtgaggataatgaagatgagcaggctgttcccaagaagggcggtgacataggaaatgaagaatgggatagaaatccacatgtgctggtcctgtaggccagggatgcccagcaagtggaagactgtgtggctagtgccactgtggtttacagtaggcatagctggggagaactttcagaacctcacctcctactcacagaggtagaagaagataaaatctgcaacattctttgcgatgtcaccaggagcttatggcatattccataatcttcgtcttctttgaacatgtaaataacaaacatgcaaatatgaaaggtggtggtctatactctaatgaatgacagccagacaatatctccaagtaatcagaataagagacattattgtatgcgctttaattatgaatggaggattatgaatatacagaggaaattattatttctgtgtgggaaagctgaataaggtgatacttaaaattgagtagtttatcgtaaagttaataatgaagagagaaagaaagtagcataagaaaaggtgagtgtacagatcaatgcacagtatgtttctgaaatattttcaggccagggtggctggtgcataaggagtactgaggagaacaagggaggtgatggtataggcaggtttttcctgaatgtgaagggcttcgatcacaacttcactcttaggccccatcctttacacaggggcagtcattagtttagaaagatgatctgttgatatttgttggaacgttgattgattgaagacactaaagcctaaaaggccagtggtgttccaggagtggacaaaatcttattgtattacagtcgcaggagaatttagctaatgtttattaagcatcactttatgccacgggctgtagtttgcactttgtacgttcttaatgcagggagtagacatccactcttagaactggatagtacccctatttcacacttaaggaaagtgagtcttagacaatgtgaataacttgccacttgtcacaaagcagcaattgatagaaatgagatttgaaacctctgacttcaccacatacagtttgctcacttatgaagagggtcaaggtacctctttatctgagatgaggcactctttgtgctcacaccccagggaactaggcttagaagtgactgaaattaggtaaagagttatttctgggggatgaagaggggttgcagttcttgatatttgagaaattcttctgctggtagaaatgaacatgtaacttcatcatttacttcctagaatattcttcttcactcattagtggattcattcacaggcatattttgagcattgactattttttcctgcatcatgctatgtgcctgagtcctaaatagctttatggtttcagagaatggtgggcttgtgagtaaatagatttactaaatgttccatgtggaatggcttcagagagtgccttctgagaagacagccatattgaatcccattttcaatggaatgaagaaatggcaacaaataataaaatacactcttcatggggtttctgaggatattaaataaaggaatatcttaaaatatttagttgttggctaagatatatcttatgatcagtaatattttttcttccattctagttcacactcttggtgcatcctcttctttctggggaggataattggctcttagttatttttcacacctgctaggatgccctggctgcctccacaaagctccttccaatgtgtggcttggggcaggtgactcagttccctgccattttcagggctcctttcatattatgccaagagttgtttgcagcctacatcaatatattttatgttttctcatctctggtctaactcttagggtgcctactagttactggattgcttctcttttcttcccttcagtaaattccatctagcccacgttctctcaccctcccttctcagatcctcatctttcacttccgccataagtggagacttgtgcctctggtatatatatatatttaccacatatttcaacagtctctaagagtccttttacctctggcctgtatgatataacaccagcctagttctaaccttatttctgaagccagtaccacccatagatgtctaattcactcactggcctcagactgagacttcaggaacagaaacgagctctgtgataaaattcagcctgatgagggccaggagttgggctgtttatcttctttcagaagaacccttgagggaagcacttatgccgcactctc

SEQ ID NO: 915168 - DNA, 4001 bp, Homo sapiens
atccaacaaaatagtgatttagatgaaaagtggggcagaatctcaaatgatggctctttcactgtgggctgagtataggagtgggcaggattgagatgtgaactgttttcaagaatagtttggtcttgggctgaaattcaggttgagttgctcttctcaatcttagagaacatcagcctaggctaattcctgatgttagtagttataattgagcaagttagtaaataacatatagatgtttatatttctttcactatttattaaataatatatccatccataggtatcagatatgagtaggtatttttgtttctaattttaatgatgaatataacttttaaatacaaagcatatttggatggaaaagagtcctatacaattgtctacatgtcagggaaaactttgtccagaacaggtaatggttagttcagagttatttgatagaagttgataaatggatatgtccacctatttatgctgctgctgcgttagtatctctgaacatgggtatatacatgtatgtgattgtgaatttgtgcaactggtaagaaaaatatcattccatgagactataaattcttagatatgacagttctcaggggttcccgtcatgagaaagatgttgaactggcaaatgtcaaaattatatacaagtgattaagaacacattaggaagccaatgtaagcagttagaaaaaggtttcacttagaatgtaaacttggttcttacatttcccctaactagctagtttttcttgaggtgatgggaaatcagattgcatttcaataggaagagtaagagaatgagacagattttactaaagatttccaataaaagaaatcagaggtgggtttgaataggtgacatatttaaaaaaattgggagatcgatgagaataacacagggataattggaagatgtagaggtgagaatgggctaaatacgggacaattgataggtatagaaaagggttgagactaagttgaaagcatttatttagatcctttggcaagatttgaaaacatctgcttagccccttccagtattggcttagtcctcactccataaataacgggattgagcataggaggaatgacaacgtagaggctggccaggagaatatggacatagcatgggacgcttctcccaccaaacctgtaggcaaagacagaaaaaagcgcagggacatagaagagtaggatgacacagatatgggatccacaggtactcagggccttggagcgggcatcttgagaaaggaggcggaagactgcttggaggatgtggatgtaggaaacagtaataagcatgatgtctaggcctgtggagagaagagcagctgccaacccataccagacattgatggagatatcagaacaggacagatgggcaatgcccatgtgctcacaaaatgtgtgtgcaatgatattgatctggcaatagtgcaggtgctcaaggagaaagatggatggaaacataatgatgaagctgtggctcagggcggcagtgacgatcttcccaatgaccttgcttgtgaggattgtgacatatcgcaggggggagcagatggccacatagcggtcaaaggccatggccagcaggacagcagagtgaatgaagaggaagtgaatgaagaacatctgagtgaggcagccatcaaaggaaatgaggctataacctagccacaaattggccagggccttaggcatggtggtggtagagagcaagacatcagcactggccagcatagataagaatatgtacatgggctcatgcaggattgcctgggagaggatgacacaaattaggatgccattgccttccagggcagtgatgtacatgatgcagaaggggatggacagccagatatgtagttgctccagcccagggatgccagtgaggaagcagcctgctatgcgagtgtcagagttgttcatagcacctatgctgttagcagaaaaaagggccatgattttatgcagcgccctcacctgtgccatagggaaaaaagagcttcagatttttgaatacattagtagagtgtccatatgcacaaggcctgcatatacttacaggcccgatgacagttatggcttctgcacacaggcatatctctacagataatcacacacaggctctgcacacagccatattctccgtaaataattacacataggctctgcacagttacaggacctgcccacagacaggctcagtgttcttactcagaagctctccacacagctttaagaatttcaggaaactaggccgggcgcagtggctcacgcctgtaatcgcagcactttgggaggctgaggctggtggatcacgaggtcaggagttcaagaccagcctggtcaagatggtgaaaccctgtctctactgaaaatacaaaaaatcagctgggtgtggtagcaggcgcctgtaatcccagctactcgggaggccgaggcaggagaatcacttgaacttggagggcggaggttgcagtgagccgagatcgcgccactgcactccagcctgggcgacagagtgagactccgtctcaaaaaaaaaaaaattttttttcaggaaactaaagggctcaaaaacattgccagactcagcacagtgccataggtccagaaaagaacagggataggtagaacatcaaaaccaatctgtacaatctctttgggcatgtgaactgtaatgagctctgcaaaagccccaggccctacagagaggactgcagtcctacaacaagaggactaaacaacaatttgattagcagattatgtgaaagagtagggttgggggtggtgggcactgccaaccctacacccatttttccctaggcacagatgcgctaagtatgaaggcaattaaggtagctacggcatttagaaagaacaccgcagagggtgtgaaaaaacctgggtcagaggtctgccctgttaactattggctgcttgatcttggacaagtcactgtcttctctgagtaacaattttctttctttctttcttttttttttttttttgagacggagtctcgctctgtcgcccaggctggagtgcagtggcgcgatctcggctcactgcaagctccgcctcccaggctcacgccattctcctgcctcagcctcccaaggagctgggactacaggcgccctccaccacgcccggctaatttttttgtatttttggtagagacggggtttcaccgtgttagccaggatggtctcgatctcctgacctcgtgatccacccacctgggcctcccaaagtgctgggattacaggtgtgagcaattttctaatttttaaaatgagcataattgttgttttgttggtatattaagctaaattttctctgtggaaagcttattaaattgcgtgtgacttcctgagtcacctctgtggctgtgaaatgtggcactgtcatccagagcagaaaggaaggtgtagaacaatgcttctgaagcttggtctccacagcaccatcagggaacttgtaaattcttcggccctaccacaaacctacggatgagaaaacctagagttgggataacattctgtgttttagcaagctctctaggtgattctgattcatgctgaagtttgtgagccactgatgtaagaactttttgaactttcttccctatctactctagatgtctatcagttccaccaggatcattaccttttagtatccattggtttcccctgcatctgtaaattctcagacttcaactaaatctaactagtgttatcctcagcttacatagtcaggatgtgaaaaaatgacacaatcacataagtagtctttagtacatattaggacacatgattcctccttagtcctattgaactattctcacaatgaatatacgactttttttttttttttgagatggagtctcactctgtctccctgcctagagtgcaatgacgtgatctccgctcactgcaacctctgcctcctgggttcaagtgattctcctgtctcagcctcccaaa

SEQ ID NO: 915169 - DNA, 4001 bp, Homo sapiens
accttaggctattagtctccctgaatgacaggcttttaatttataatgcaaataacaacaatcatctctttgaacagttggaaggagatggctggacttatttatttcagaactgagattactaaagcattattattaaaaaaggaacttggatttggggctggctcccctgaattcttaataagggataaccttataactaaaaggaaagagacctcaaaatggatgagtgtgggaggagtgaaagaatatacagttgtattaagtaccagtcatatctctagcactttaaaaatattatagaattgttatcacaataaccctgtgatgtgaggtaatgtaaaaaaagttttatataagtgtctttactagtaacgtttagagaggttacataacttcctcattttatattcatttattgagtacatgttagtcactgtcttaatttttctaacttatttatttctcactacaacattcaaagttagatgttatttttatccccatttaacagttggccaaactgaggcacagaaacatttcaaacatgctcaaggtcacaagtagaggagccaggattcaaacgcaggcactctgactttatactttgtgcttttaaccaatacgtcaatattcaaagtggtggaattcagactcaaattcattccaaaccttttctttgtttttcacttggagtcacaggagaatattcctactcttaaatccagatgcctctgaagaccaggaattgactttctccttagtaagtcacagacacttttaagacaagtgtgagaatattatcacctttctggggtattcagagttccccaaggagcctcaggaaaatagtatgttcagtgtgataattgatagctctgattcatctggctattcctcttccttccagagcttcctgccatgtcataccattcctttcacatcatcactgtgtgtccatgtaaatgtatctagacagccatcctacacttttttttaaatctccaacttctgctcagcattcatattgaagtcttccccaggtgaagcagttttagaagtcgactccgaatctccttggttctagctccatagagaataggattgagtacaggaggcaccagcacatagagattagccagaaagatgtgcacatgcttggggacttcgtggtgaccaaagcggtgggtgaggaaggagaagaaggcagggatgtagaaaaccaggatgatgccaatgtgggagccacaggtactcagagctttgtgctgggcatcatgagatggaagatgaaagactgcatggaggataaagccataggaaatggcaatgagaatggaatccagtcccatggccagcagagccacagttagcccatagacaatattgacagtgatgttggcacaggccagtcgggcaatgcccatatgctcacagtatgtgtgtgtcatgacacggtgaccacagtaggggagtcgcctcagcaagaagatgaagggggagacaatagccacactacggaatagcccaacaaagccaattctgcctatgacagcatggttgagaatggttgtgtaccttaatgggttacagatagccacatacctatcaaaggccatggcaagtagaattgaggactccagagcatagatagaatggacacaaaacatctgggccaggcatccaccaaaggaaatctcaccagcatggagccacaaaatggccagcatcttgggcacagtggtagaactgagagccaggtctgtgagtgagagaaggcagaggaagaggtacataggtgcatgaagagcattgtccatggcaatgaccaggatgagggcagcatttccaaccagtgctacaagatacatggcacagaaagggatggcaatccagaagtgggcagcctccagccctgggatccctgttaagaagaaggtgtctggaagatggttatcactgaggttggaatctgacattcttcctggcaaatgaagggctctttctgaatagtattgttatgcttgccctgtaacatcagatatttggttgatttatgtaaaacaaagatctttctgtgaaataatcttttttagactaaaaaaatttgtttttcacttgtacaaacatctgaaatgactaccacatataattcattttaaaaccttctgctaatttctatattgaacaatgatgttttgagttctatatccaaagcaccaagctaagtatttattagtcttctcaaactgacctttccagacttatctccctccatatcctgcacatcatttattgacctctagtccatccacatcatgggatatttcttacctctcattcatgccttttctcttacctagggagtctcattcctttattttcctcctctctattaagttttaatacaagtttccctgcttcccagaggccttccctttctaaactggtcttggtaatctctaattttgtatttttcctacttccactatcttacaaaattctgctgggttagaactatgtctttatgcaaccgtaacctctacactgcccatgactgtatttgtacctagacattttgacaacttcaataaagactaaattctgatcattcttagtaacatggcattgatgttttaaattaatgatataatgatgcattaactttttttctgcatttgttatgtgccaaatatacaccaaatcacttttgtatatatatatcatctgaagtgcctatgaagaggctaggcaacctgaatatgctttcatatcatgattgaatatatacagcaatttgagcattcacatgggtataccagaaggaagtgtgaggtaaatcagatatgcttgttgaggatactgcactcaaccatgacaaagccagcgtatagtcctccaatccaccactataatggctggctgtgaggtcagatcagaatggcaagtgctattagagacagatataaaaagtgaggtattctggatttaccacccataaagggactggaaggggattctgttcttgctgtagagggatagctagtattatacacattgtctcagtaacatgtatccctaaaagaattctgagtagaaatgccaggaaatctgaattttagccccgattctgtaacattattgatttgtgactttgaacaaatctcttacttatctggacagtctcaatttagaaagggcaatgaatgtagtcattctctgattttctgtctgctcactatgtggcattgaaaaaaattccaaagcctttttgtggcttagtttttatctttaaattgggaatgacaccatctgacctaacttcacaaaattttgtggttgacaaaagatgactattcatggaattaaacatttgtatacccagaataattcccctattttttcctaaaaaaataagatatttatattttaacaacatatactctcgataaaagagagtacagttatcatttacatccctaaccaatgaaaagaccaatcccagagaagtgaactgatataatttagatcacgaggcattttatttgcagaactatgattaggtctcatgtcccttgattcagagtttggcgtttttgcctcaccctactgtccattaataagtccaatacttgaattcctatctctttcaaatgaggctaatatcttttttgtctaatatcaattcctagtgctgaagtatctttactcattatcttagctccaaagaggtggaattaggaagtcccctttatttgcattgagatttttttttttgtaagaacaggaggcatcttattgattcctaccataacagagcacctaggactgtaatacaaagaaacacgattttactgcagtaaagataactgatgaccgatggtgtttaggaagttatgagacaaaagatacagagcaaacaaaaagtcatgggcatcagccagtgcagggctgtgctagaggttcctatctagcccagacacttagctcatctgccttcc

SEQ ID NO: 915170 - DNA, 4001 bp, Homo sapiens
ttccccaaaggacctatttattcattgtgattttgaaaaatacctcttttgttttagaataattttagatataacagtaattcgtgaggatattgcagatagttcccatatatcccacatttaattccccttattgtaaacatcttatattagtgtagtctattttccaaaattaatgaagcaggtaattgatacatatttattgctaaagctcatactttattaagattttcttactttttagccaatgtcctttttctaatccagcatcccatttaggataccccattaccattaaatcgctgtgtctcttaagggaagataaacataaattataatgatatagaacaattaaaacaaaaagtatggacatttcaaagttgaagttgctcattaattttagactctataaattccacaaagtaagggaaggtgacatagtcaaaattttatctccagcatcctacagttataaaagttgacactcagaaaattattataattgtattgtaagaagcagctccatgaaacatcaattacccagcaaaaatgggtgcattcatatctgatataaacacttcaaccagctattccaaataatagagaaaaataacattacctgcttaaatgaaattataagagtattgaatagagagaacaagaatgcagcaatatggtaaaaccccatctctactaaaaaacaaaaattagccaggccatggtggtgcatgcccatagtctcagctacttggcaggctgaggcaggagaatcacttgaaccccagggacagaggttacagtgagctgagatcatgccactgctctccagcctgggcaacagagcaagactctgtctcaaaaaaaaaaaaaaaaaatgcagcaacagatctcaaaatgtggtatgaaaagcagatggagaaattcaatgtatttaaatacagaagagagccaataaagccacatattagaatataatttttatgacaagacatttctctcactgaaatttcataaaattgcattcagaacctcgtatgtattaggtactcttccttttccattccttgttcctgcaataatattttcttcacacatttatagatctgcttggttctgactccatatatgacaggattgagcattggtggcaccacaacatagagattggctaggagtatatggatatagcggggcacatttcggccaaagcgatgagtcataaaggaaaagagggctggtgtatagaaggcaaggattacacacacatgtgaaccacatgtgctgagggacttgagtcgggcttcatgagtaggaagacggaaaacagcacaaagaatatgcacataagaaagggcaatgactgtgatgtcaaacactagattacaaatggcacataaaccataaataatattgattttgatgctggcacaagatagatgagcaagacccatgtgctcacagtaggtgtggggaattacatgattcccacagaagggcaaccgcaatataagaagtatagagggaatgacgaaaattaaagccctcacaaacacaccaagaccaatcacagaaacaaccttgttggtgaggatggcgctatattggagtggattgcagatggccacatagctgtcataagccattgccacaaggactgctgactccataagtgtgaagttgtggataaaaaacatctgggtgaggcaggcttcaaagatgatccctctgaggttgatccagaagattccaagcatcttagggatggtagctgttgagagacccacatcagtggtggccaacatggccaggaagtagaacatgggctggtgtaggctgctgtcagtcttgatcacaagtagaatagtgaagttccctatgagtgcgatcatgtacacagcacagaagggaaagccgatccagatgtgaagtgtttctagtcctgggatccccagcaacaggaaggaggaggggtgaaactgggtgtcattgggaaggaacatcctgcttgtgaatgcataagtccacagtctacagaaatgtatgctcacccaatctgcatgtaaccacacaggcttctgcagttcggagacaaaaatttaatataagaaacatacatttgtgcacatgattttttgcaggaaattctatcactttgaaacatactgtatacagagcactttaggtaagtaacaaacatctcagggataaattcttagatgaatttatacagtaaattaaaataaaatgttctacgtgatactttcaactttgctagcattctactctacctaaaccctatcaatataacctcactgccaatattatgctaagatttgcctgaatactttttactttagctattctctctcattattaccatcatcaccaaagaacccctttgaattttgaacaaggtagggttttcctagcccttaaatgtagtggtggaaattaattccagttgattgaatgataacacatatggattaacacagagggtgggtacactctattcaataaacacacagactgatcaaaatttatgccaaaatatactaaaaatcacttaaaggtttaaaactgtccatttaaaaatatttactcattattactgtaaaataaaatacagaataacagtgaaaacagtcgcatcaactaccaattattgaagtactgcctactatttgcaaagctttgttatgtgcaaatcatctccaatttataaaaagaacacccttcaaggagaatattaatttttcatattttccatgtaagcgatcaatgagtttaagaggcttgtcagatgtttaaaatgcttctaatggatgatctgggaaattaagctagggataaaagtagtgaatttacatagaaggaaaatagaaggaaacaaaagtgtaatgtatgacttatctgtgttattcacaccggataaaatacacacacacatgcataatattacacacaggttagacaaatacatatttttttcaaaactcacaacatccatctgaataacacgttagtatctctagctcaaagctgaggcaatcatgacttcaggaatttaagatatatgtcaaatgtttaattaaaaactagtgagaaaaaacaggagccttataatattagatttatgataatgcaatcatgttatttatttatttatattttattatttgagacagagtcacactttgtcaccctgattggagtgcagtggcacaatctcagctcactgcaacctctgcctcccaggttcaagggattctcctgcctcagcctccagagaaactgagattacatgcacgggccatcatacctggctaattttttatatctttagtagagacggggtttctccatgttgtccaggctggtcttgaactcctggcctcaagtgatctgaccacctctgcctcccaaaatgccgggattacaggagtgagccactgcacccagtctcaatcatttcaaagttacctaaattcatctaatctgtcttcatgcaccttgcttgtaatatttgatgggggagtattttcagagcatttctgaccatggaaagcttttactgttccatagaaaaatgccttactcaagattagagaggttaacaaaccctggcagtttgaaagaaatgccatgtaaattattgggattactacccaaattaatgatagtgataagtatgtaaatgatatgctatgtaagtctataccccattttataaaatgtgggatgtttaacaggtaaaataaagaataaatgactacaagaaaaaaattgtctgtgtacataaaatagccatcttcttgagaaatatgtaaatgaacaaaattacaggcatcatgtttttgaatacacagaactccataaaatataactaatggttttcagaagatacaaaaatagaaatatctggcacaacaatattttggtgataaataagtgccaccaatcctgtctatcatgtcacatcaaacattctttatgtgtta

SEQ ID NO: 915171 - DNA, 4001 bp, Homo sapiens
agaacgaatgtaaaagaaaagtgtattagtcagtgttctctagagggactgaactaataggatatatatatatatgtgtgtgtgtgtgtgtgtgtgtgtacacatacacacacacacaaagggggaattaagtattaactcacatgatcacaaggtcccacaataggccatctgcaagctgaagatcaaggagagccactctgagtcccaaaactgaggaacttggagtccgacgttcgaggaggaagcatccagcacaggagaaggatgtagcctgggaggctaggcccatctagtcttttcacatttttctgcctgctttatattctagctgcgttggcagctgattagatggtgcccacccagattgaaggtgggtctgcctttcccagcccactgactcaaatgttaatctcttttggcaacaccctcacagacaaaaccaggatcaatactttgtatccttcagtcaaataaagttgacactcagtattaaccatcacaaaaagagagagagcaggaatctgaaagaaggaaaggagcaaaaatggcagtaacagcaagactgagagagcattaaaataaacatgggagtcaaagattttggagaagaacaacaaaattttggattctgtaaagaatacaaagctatgaaacggacactactgctggattacagcttattttgttcatctataaaatgagatttatttgatcagtatccttcaggatctaaacttacctagagagaagacatatggaaaaaaatggagctacctatcacccttgtttacaagcagttctactccaaagccacctcaaccttcagcatagttaccttctccattaatctctaacctttgtccaggtacttggagagaagtaggggaaacaggcagcaaaggttttaagtttgcattatctgtcaacactaaagcacttccagtcaaaaggaaaaaatctgacaagcatgaccaactgttacagaagattaaaaagggagctcagatgatgataatttgggttgtatatagatatatttatccaaactttaatacagaattattctttctgtacaaatattttcacaatttgctctcggatctgcttggtcctgactccataaatgacagggttaagggcaggtgggacaaccacatacaggttagccaaaagaatatggatatagtggggaatgttttggccaaaacgatgtgtcataaaagaaaaaaatgctggtgtgtaaaagcacagcataacacagacatgagaaccacaggtattgaaggcctttagtcggacatcttgagagggaaggcgaaaaacagctctaaggataagcacataggaagaggcaattaagatcacatccacaataatataagaaatcaccatgagcccatagattatgttgatcttaatgggtgcacaggccaacccggccagacccctgtgctcacagtatgtgtgaggtacgatgttatgcccacagaatggcagacgcagaatgagaaacacaaatggggttacaagaactaaatttcttccaacaaccacagaagctaggatactgatggttttattggtgaggatcatggtgtactggagagggttgcagatggcaacaaagcggtcataagccatgaccaccaacagaacagtctccatgcctgtaaacatgtgaataaagaacatctgaagaaggcatcccccaaagctgatctcttggaggttgaaccagaagattcctagcattttggggatagtggatgtggacagacccagatcaatcatagacaacatggccaggaagtagaacatgggctggtgtagactatgttcagttttgatcacaaagagaatggtcatattccccacaatggcaatcaggtacacaatacagaatgggaaagaaatccagatatgtaaagtgtccagtcctggtattcctagcaggaggaagaaggggggatagaagtgggtgtcattgatagaaggcattctcccagcaagtgtcactgaattcctaagtatgaaggatctcactttctttaaggtcctctcttgtcaagttcctgaagaaacagaaagactcttatcagtgtgctagaggtaatggtataggtggttaatttacaaacattcaagactcacttctttccagaggataatcgaggaagcctctcaacacagattattgttctgagatccatcataggcaatattgcttatggctttatgttttgtaatctttgagatatttgaaagaatgggaaaaatttcataatgcaatgcatatttatattacggcattcccttccattactttcctaagtagcccttctttactttttgggaaatcaccattccatgtgttctttgaagtgtggtcttgagatctctggggttttctaagtacctttccagaagttcacaagctcaaaactatttttataatagaaaatttttagccattctcactctcattctctcataagtacatagtgaaattttccagaggttatatgaggtgctaccataacagattaaatgaaattgtaaatgatgttgtgagatttcagctctattatcttaacttagacaataaaaatatttgcaaaggaaaatgataccatttttacaactaatttcttgaaaaacagtgattttaacaaaaagtaccaaattatgttttatataatagtttgttaatattattttaatattaaatatttaaattttgctctaatgtctaataatataaatattatggatgtaattcagagaaactaaaattctgagtatctcaatagtttctagatgagacaaagattcctagtacaaaggagaagtactactgtctaccactttctatgttttattataatataaacgtaaggatcttatacagtgacatcacataagtgtagttaatcagtctctgttagaactttcctggttctaactcagctaaactgataagtgcatttctattatggattaattactaattttgatgcttctaaatcttcatgaacaatccagtttctccaagatcctgtcattctgattccctgatatccttccaataaaatgccttgtgtgtatctgccaaattatgtttatcttccttacaatctataacatcagttagtaacataaaaaaaattcccatgtcccaaaattgtgcctaccttcaggtgtaaacagatcaaatatttagcaaattttaatattgaaattaaaatgttttaaggactcttcattgattccttgacaataacaaggaaaattaccttattttaactttgcatccctaaagacactgtacaactctgtagcaactaatgtaacctggattgtataatatttatgcatgtactggccttatttctacaaagagaatagctgcaactaagagttgagaaccaggggtaatcattgtaatactctcaaaactgccacatgaatgttggttcccagttgttcagcatttaattgaatcagagttggggtttgtaataagtgtgcttttgtttgtgtgtgagtgtgtgtgacagagacagagagtgagagagagagagagagagagagacggagaaggttggagagataggagtagagagagaaatcatgttttattatgtacgtggctgcatacatcagttgtcctgtaactttgccaggtagctattttacagcagaagtacacaagcaaaggagttaataattccccattctgtatgagaagaacaagagcatttcttggtccccgagaagctgagagaaaattgaaaaaagaacataatgtttgccagtattgaggaaaagatgccaggctgaaaaatcagagggcagtggtttttgtgatttcacctgggagagtctgaggaaatagctaggatgatgtgttgtgagatttacagtccagagtcagcccaatcttaagggtggctgtgtctcaacatgatactttgccagctgagaaaaacattcccagg

SEQ ID NO: 915172 - DNA, 4001 bp, Homo sapiens
aattaaaaatataattggtatatcaaaatttgtagagactttaatgcaactcttataaaaacaagctgtttgagaacgcaaaagtaagtaaaagtaaagagaatgtgcatttaaaaaataattggagaatgtatattgcttttaaatacatctgaattattgttaaatgtccattttttaaagtcacatacacacacatgcacacacacacacacgtgccccaaattataagcctatatatcacttgaaattcaaaataaaatctaaccccactaacttatttatctgcggattaaatacataatagaaaataatcaatggcttaaaatgaatgcccaaacagaaattaggttacattttaatttgaacaaaaacaaagctcaacatagaaaaatgactggtgttcattcaaatcagtactgaggaggaaatgtcagttactaacttatttttctcctaattacattagaaaggtcataatacaagaaaatctccactatcccacaaataaaccatgtgtaccacaccctacctgattcataagtctgtcctttgatttatcactctgcattaatatatgttatgtgcctttctctctcaaactggataaggagactttctggaagaacagagcatcaggagaaaaagtcttgcctatcaatagaaagtgctggttcaaacaattaatacaggcaaggattcaatccatactggtcaatttaattgccttctaccagttcctctctatgaacatatgaacataaacacatatacacaccacattttctaaaagattacaactatttatccagaaacaaaaagacaaagcaaacccagcaaaaacatgaaaacaaacaaatggatatattttgtggttgggacatttcactgaaggtgactgtgaaataatatttatctaccaatacactcataattattttaaattttattcagggtatctcactttctctgtacccaaattccttggtgtctcttctctcctccctagtggctgcttcatcatgaatgctaagagagaccctccaaactccaactggttagtgatctgtcttgaagaaaatcctcagcactgtctccctaatatgtttggttctgaccccatagattacaggattgagggtgggaggaacaaccacatatagattagccaagaaaatgtggatatattggggaatatcatggccaaagcagtgtgtaaagaaagagaaaaatgctggtgtagaaaaggctaagataacaccaatgtgagagccacaggtgttgagagctttgagtcgagcttcccaggagggcaggcagaagacagcatagaggatcctgatatgggagagaataataaggagcacatccaataacaagagagaaatactgccaagaccaaacataatgttgactttgatgctggcacaggccagacgggcaatgcccatgtgctcacagtaagtatgagggatgatacgatgtccacagaagggcaaccttaagaggagaaacaccagtggaatgaccatgtacaagctcctcaggacagcaatgcctgcaatgaggctgatgattttgctggtgaggatcatggtgtaccaaagaggtttgcaaatggcaatgtagcggtcaaaggccatggccaccaatacgatgctctccatgacagtgaagaaatggatgaagaacatctgagaaaggtagcctccaaaagatatttccttgatattgaaccagaagatgcccagcattttgggaatggtggccgtagacaagctcaggtcaatggaatccaacatggccaggcagtagtacatgggctcatggagactctgctcagtttggatcacaaagaagatagcagcatttcccaggagtgcaataagatacacagagaaaaaagggaatccaatccagatgtgcacatcttctagccctgggatacccagcagtaggaatgaagaagtatggaactgggtgtcgttagctataggcattctttctgtcacaaaaagctgttgtgtgtatcagtgacaattattgactttccattagtgattcttgctccacttctcactttatcctgattcctggtaaaataaaaaatagcattgtactcttcttggttcctttctgaaaaagagtaaaatacctcttactctgctagggtcatatgagcatgaaacagaatcaataattaaatcagcttcacctgattgccacttttcctaccagaatttattacacatgaggaataaagtggggagaaacctctatctgcctgacagaaatttataatgaagagtctatgcagaaactaattttaaaaataagatttcagaacctatgaatctgatcgttttacactcatttttcttaactttcaggctgatttttatctgtaatctctgttaatcccttactagagatcctgctaacaataaagtttatatttgtgcactgagtgtgtgtttgtgtgtatctatgcatttctacatgaattgtagagtactagtgggtttacttttagagcagagagaaaaagcctatatttacacatacatgtaatatttattatttatttctttttttattattatgctttaaatttttggatacatgtacagaatgtgcaggtttgttacacaggtatccacgtgccatgatggtttgctgcacccatcagcccgtcatctacattaggttgttctcctaatgctatcccacccttagcccccaaacccccgacaggccccagtgtgtgttgttcccctccctgtgtccatgtattcttattgttcaacccctacttatgagtaagaacattcattgtttggttttctgttcttgtgatagtttgctgagaatgatggtttccagcttcatccatgtccctgcaaaggacatgaactcatccttttttataagtgcatagtattccatggtatatatgtgccacattttctttatccactctattattcacaggcatttgggttggtttcaagtctttgaaaagcgtatattttttatataccacttaagagttctcaattttaaatgttaatcaagttaataaattgaaaaccagacagcaaaaaattttaatgtgatgtttcagaaaataaacaactccttgatcatcacaatttcttttgcaaaaagaatactgtatccatcatttttggaaattgggtaaagaaaattaaaggaagataattaatgaaaagtattttgcacttaaagctaaatatggaataaaagattaatttagataaatacaccatatatagaacccataaaaaaacacatacattgaagaaactctagagagtgggttttttcttctagagaattttaaatattatctcagacttacatggacagggagaagaattttattttacaatatatttcctaccaatgctgttctccatctggtatgttagtgtctttatggaactttgcttttcacggcacagaaataaaaacatttatatgattttgttttgtaacactctttctgtctatggaaagattccgggctcatttataataaattaaatgtttcaaaaatcaatgtgagagatgtttattattgagcaaattcttttctaaaactagttgtacagataatgtggagtgattgtgaattacacaattgaccagaacactttgattcaaatttgggaatacgtggaggcttgaagaagtcagagtcgagaggtctccattagaagcaaataagatcagtacgctctactttaaacctgtaacaaggcaagtgtctaaaaaaaacctaccatttgaagctaatgatggctagcagaaatgggagaaaattggggaaattacctcaagaaggagaatatatacatggttattgaggctgttgagaatagctttaaagttctcagatctgtaataggaaagtcaaagataaagacacaattctttctttccccattagtgaataatacatgagggatgtagaaggg

SEQ ID NO: 915173 - DNA, 4001 bp, Homo sapiens
tatatcttaactgtataaatggcaggcagagcagcaataaagaacttacattcaaggtgttcttcctgcaattatcttcctccaagttttttaagggattataaatttcattatgaatgaaactgctaatagccacacaatttccaaatctcctgaagaaaaaaaaaatatgtctcaacactactttagaaacaacttattatttcttttttctcaaagtatataagtacttaaagacaatacactgtgtcttcgaatgttcctacagctcataaacccacacatgaaacatagtagaagtatgcacacgcacacgcacatatattcatatatgtaaaaatatattatgtaaatattatttaaataattaaacaagcaaatgaatgaaatatttacgaatgtatatgtcatgctcatgctgcattatttcctttttcctttaatatctaattttatgactatgcttgcatctctaggtgcatgagggaaattatagtaactattgaataagattatggtgggcatgatatgagtatattcatgtgtggtatacctgtcaatacccatatatctacactgcatctatggtatgttaatattattactagagtaagctattattattattttaagaattctagaagccacttattctgtttattatctttttaaagtaagaattttattccgtattctgttatttcttaaacatactaaagaaaactataaggcagtctatttggcttaaattactacttcctattaaacatgtagtttgagtaaatcactcaacttttccgaacataagtatattaatcacaagaatggaaaaactaatacatactttataaaactgccttgaggatccagcaatagaaataaaagaacttggaaaaggagagttcgacaagggtaaaattctcattattataattaaagtcaaaagcttcagttaacagataaataatgttattggctgcagcattcccttctgtttttctgctttctattaggttagagtgacagactctccaacctccaactggttagtgattggtcttgagaaaaatcctcagcactctctctcgaatctgctttgtcctgactccatagattacaggattgagggctggtgggacaaccacatacaggttggctaatataatatgtatatactgtgggatattatggccaaaacgatgtgtcaagaatgaaaaaaatgctggtgtaaaaaaggctaagataacaccaatatgagaaccacaggtgttgagagctttgagtcgagcttcccaggagggcaggcagaagacagcatacaggatcctgacataggagagaataataaggataacatccagtaacaagagagatatgttgccaaggccaaacctaatgttgactttgatgctggcacaggccagacgggcaatgcccatgtgctcacaataagtatgagggatgatacgatgcccacagaagggcagcctcagaaggagaaacaccagtggaacaaccatgtacaggctcctcaggacagcaatgcctgcaatgaggctgatgattttgctggtgaggatcatggtgtaccgaagaggtttgcaaatggcaatgtagcggtcaaaggccatggccaccaacacaatgctctccatagcagtgaagaaatggatgaagaacatgtgagaaaggcagcctccaaaagatatttctttggtattgaaccagaagatgcccaacattttggggatggtggctgtagacaagcccaggtcaatggaatccaacatggccaggaagtagtacataggctcatggagactctgctcagtctggatcacaaacaagagagcagtgtttcccaggagtgcaacaagatacacaaagaaaaaagggactccaatccaaatgtgcacatcttctagccctgggatacccagcagtaggaatgaagaaggatggaactgggtgtgattagacgtagacattcttcctgccatataaagctgctgggcacaccagcgacgattataatattcctattagtaattcttgttccacttcttcttttgttcagatttctagtcaaattcacaataacatattaatctttctttatatatattcatgagtaaggtaaaatactctccacaatttctcctagcctctcctgagcaacattggtaccaggaatagaaccagtcttattctactgccccttcacctaatatcaaagactaatataaaaagaaatggcagaagaatgtcatctgccaaataaaaatgcaaaatctggaatttagccagaactaaatgagaaaaataaagttccagggtcagtgtctatagaaatgttacacatatttttgcttcacgatcaaggtatttgtaatctcaactattcctctatttgggaatcaaaaatgtagtgtgtaaaaccgtttctgtgttgttatgcatttttacaggtatttgtgactactagactgtatacttctatatacaatttagactatactgtatacaatttgggactactagactgtatacttctgtatacaatttaggctgtatatactgtatacagtttgtgactactagactgtatacttctgtatacaatttagactgtgtatactgtatacaatttgtgactactagactgtatacttctgagagaagaaacaatttatcttgctcatatgcaggaaaaagatctgctacataatagttctcaatttaaaacctccacaaatagacattgattacaaggaggcaaaactgtgggtaattttaatgtcatattttaggaaataaataatttagtttccatcacacctgtgtttgagaaaagaagcttatccatcggatttggaaaatgggtaaaaacaaggaaaagaaaatacttgacaaagagtattttgcagctatgatggaacatggatgaagagataattttaatctagataatcctattatttggagagtgcataaatacacgcattcagtaaagaaactgtttatatataggccagctttttctgtggcaaggaaactaaatattctgggctacaaaattttcaaatatatctcagtcttatattcatgggaagaaagtagaagccctttggatgacctacagtttagctgctactcaaattctatcccagctgttttgtctctatggatgtctccaatatagtaaatcctgaatttacagatagtaaatcctgaatttacggatagtaaatcctgaatttacagatagtaaattcaaaatttgaagcaaaaagttcattactgcgcaacttacttttacttgggaaaaactagttttacagataatgcggaattggttaaatgtgacgtggcaactacacaaaaagcattgattacaatttaagaatacttgaacattgggggaagtcagaattgagacgtacgcagcagagataaaagtgtgtgaatgtcagcaagttctactttaatcctgtaacaacaaaaatgcattgctggtagtacctatttgaagcatacgaagaatagcaaaaatgagagattatttgataatttgggaaattatttcagagagagagagagagagagaatgtgtgtgtataaacttgggtgaaactatcagagataagggtataaacttcctgtttttcactaattgagaatacacaaaataggcagcgaaatacctttcacaatttatcccatcaaatattgaagaggttctctatgtatcagtggtaattaggaagtttaaatacaaaaaatgaataaaactggtcatatatccttaaggaaatcaccacgtagtaaagaagataaaattccaaacatgaaatttaagaactgtactgcaagtgctatggtagaaatgtgcacaggatgttttaaatgtagaggtgagtcaagaaaaattgtatagaggaagttaggcttatgctgacttacagagaaattcttctgacaaaaaagaaagaaaattttat

SEQ ID NO: 915174 - DNA, 4001 bp, Homo sapiens
cctcggaaaccactgggatagatcaactctacatttaataacagtttatgattatgcttctaatttccttctttgatctcaacatatagtattttctcagttccaatgcttacaaaatttggatgcgtttttccatggatgtgttactttattgtagttttcccaccctcattccctctcctcactgtaaaaatgtgtcttgcaatcaaggaactgcagtatatagaacagtgttccacagatcctctaactagtatggttacattattactttagtttctaaatgtacagaagtctaatctgtgtactgtgagaagtccagctcttgactcaaatctccaactattttgaggggttatgttctcccagtactaccactgcagctcactttctcaatgcatcttggggcctagaagcaactctcctctcccagcaccaaagccagcaaccctaccattcattgatcaatatgctaattcactcattcccttcatagcactgctgatataacattattttagcaggcttgtactgaaggctcttcaatttttcatattgtgtgtgcatagggaggaaacatttaaagggaattacagtgaaacataaaaggaagataattagaatcaaatgttatcattaatgtcctaaatatccatctggtaatcctctcactgagaaatttctcactgatctttttacttttattccctcttcctcagtgtttctgttttacttaacaaactcacttataatagctgcaaatctcaatttccaaatttttatctctttttcaatttagagtaattttgctctgtgttttcatctccttcttcctgatcatattctgtacagccccctatttcacaagcaaagaggtcatcaaggattttttttatacatatgaccatcattgtcatacagatcatgccacattcttggcacatgaaagcagtttcaggtagttcttgctttaaagagcatttgccatttcactctttctacatttctgtacactataaacttatcctagtaaaacatcatcctgtacccttagaaaacaaaagtataaccttatctctgatctgcttggtcttcactccgtaaaccatggggttgagtgcaggtgggataacaatgtagagattggcaaacatgatgtggaaggtgcgagagacattgtgtccaaagcgatgggcgaggatggagaaaaaggcaggtgtataaaacatgaggatgacacagacatgagaaccacaagtgccgagggctttctggcaggcatcttgggagggaaggccaaagacagcacagaggatgtgtgcgtaggaaacagcaatgagaatcacatctgagatgaccgtcatgatgggaacacaaaagccataccagaagttgatggagatatcagcacaggcgagctgggcaacacctatatgctcacagtatgtgtggggtatgatgcgtgtcctgcagaaaggcaggcatgtcagcaagaatacatctggcaggatgatgcagaagcttcgaaaggagatgcccatagcactcttgatgatggtcttgggagtcaagatggtggtatatctcaagggagaacagatagctacatagtgatcaaatgccatggccatcagaatggctgaatccaggacaaagttatagtgaaggaagaacatttgtgtaaggcatcctgggaatgtgatttcgcgagcccctagccaaaagatactgagtgctttaggcacaccagctgtggacaagatgaggtcagtcatggccagcatggagagaaagaagaacatgggttcatgaagactatgctccaccacaatgaggtagagaaggatgcagtttcccacaacagctacaatgtagatgatacagaagggaattccaatccacacatggaattgctccaggcctgggatccctaccagaatgaagggtcctggattgtaactgctcaggttgaaaatgatcatggcagaggcagatggcataaatctcagcccctaaagacagagggtgattaaggatagagaaacttgagtaactctcaaactttcaactaattataattattgcctcctgaagataaagtgaccatataatttgtcatccaaaatagaacctgtctgaaatgaacaaaggttaaaattagtaataatggtagcaacatgcaaaaaccaagattgttccagatacaaatagatacattattaaactacctgaagagaatcttttctttcttctgacctcccccagtagtttgcacagcttctacaggaagccttccagactggttacactcttccttatacactgttctcccatacaagttaacaaagtacagaatacactttttcatggtggattatagctcatatgaccttatggacatcattgtttaggatctgcttgctctgtcattgtgaattatctgtctctgcccccaagacaactgtttgcttctcttaaagctacctgatgactgtggctcttacatttgtaagatcagcacccctttattgccatctaaaaacctaattcagttcagcaaacaccagatgagttcctacactatgctggataacatgtgtaagtcagatttaaactaaaaaattcccttatagctgaggttcactagcctttctcctcaaaaaaaaaaaaaaattcaatagttttccaacactttatatactacgtaagtgaataatattctaatactgtggacttagtgacactatcagtcaaggtttctgtccaaaagaaggactgcttttttgtgaacatacatctattagagagacacatcgacccaagacacatactctctcaaacacagacccttaatacttacattctcaggcatatccagacctacacttacattctgtcatatattttgccaccatatatttacccatacataatcttacacaattacaagccccctgtcctcccatcttcccccgacacatgtgctgacaatataaacaaaatgtttcacaattagattttgtcactgtcacaggctttgtaaattcctaaaacctctccactggtcctataccttcttccccagtaatgcctctataacaactcacagcactcccaacttgtctgaggtcatcctttattcatacatatgtgaggaaaggttttctcaagtttttgtatttccatgaactcaaatacaacagatgttcatgaagtcatccaaaagcattcacaaacacacacgggtgcacagacggttaactctctcatttaacaatcagacaaatccacaatgtggaaaaatctacaacaatctgttttcttttttcaagtcaatgccattaaagggggaaggggaatattagataaggaaaatccatttccagattaaagtacatttaagagaaaaacaaataaatgcagtgtggttatttatttatttattttattgagacagagtctcactctgtcacccaggctggagtgctgtggcacgatctcggctcactgcaacctccgcctccccggttcaagcgattctcctgcctcagcttcccgagttgctgggattacaggcgcccgccaccacccccagctaatttttgtattttcagtagagacgggctttcaccatgttggccaggctggtctcgaactcctgaccttaggtgatccacccacctcagcctcccaaagtgctgggattacaggcgtgagccaccacgctcggcctgcagtgtagttcttgattgaattctgtttaaacaaaccaggtattgaattcaattaatgaatagttagggaaacttaaatatggactaggtattgagtgatataaaggaactagtgttaattttatcagcaataattatggtattatggtagatacacatacatactctcaggcatccacagtatgttagcaaaatattggcacagagcatgtactctggagcctcagaaagctaggtttcacaatttaatcctggttccacaattta

SEQ ID NO: 915175 - DNA, 4001 bp, Homo sapiens
aatccagtctatcattgttggacatttgggttggttccaagtctttgctattgtcaacttctttatctacattgttttctattagcctcttcatcacagagcacaccccctgagaggtgcccacaagaagaaagacctgtgtatatttgatccctttcttttatgccttaaggttaagttacacggactgggactaggaagcaacaagaaagatttccaaaaccaaacttatattaacttagcttctgttgcttaaaaacaaaaagctggtaattggttcactaactccaactagcttaacaataggagatacatttaaaagttaagtggtattttacagaacataacaatatacctgggtgtccaaagtgatttggaatcagagaaccaaggacttattctcttcatccgttcttggtgattggcttttgatgcatgggccaatcccaattttctccttccagtttatgtgttgtagaattaccaccatctctgatcccaagtttatatctccccagatgaacagtagaccatacagcttgggaaggaccctggtctaggtgtgggcattaggacccaaatggagtgagatcactattgggccagagggcagggtcatatattaatagcttcttccatgtaatcacttggaggaaagaacagttctgagaatatcagtcaggttaaggggaagataccaaacagttggtctcttcagcagaggggatggtaggatattaggtaggaaatataggtcagaagctatagaaggaaaaattacagagctgtattctataccaaacttactctgattcagacactatcatattaacccattaaaaatgtcagaaaattagaaacatttcattcatattattggtagaaatttaaaagttacacaaagatatcctttatagcttcatctcagatttccttatagtaccaggtaaaccaatccagctccacagatctctgaggcatctttgaagttggctagaatgctctggatctgaacagatattgtgttcatgaacccaggttggagtggtcaaagaggaagtgcatcagataactccatattccctccagcaattgtttggtcctcatgccatagatgatgggatttaaagtggctgggatgatcacgtacaggtcagctagcagcacttgggtgtgcaagggcactatatcctgccccaaccaggccgcatagatggatgccatcccaggtagatagtacaaagccataacccccacatgggagccacatgtgcttaatgctttcaactgagcagtctttgaggagagatcaaatactgccctgagaattaagatataggaggcagcaatgaaggccacatcagagcccaccataagagaggaaccaatcagactgtagagactgctgggcacggggtcagcacatgctaacctggccaaagctatgtgcttacagtaggagtggacaaccacattggagccacagaaaggtagatgattcatcatccaactcagtggagtcatgaatgtgacagctctgatggtgacggccatactcattcccagcatcacttgaggcgtgagaattctcttgtagtgtagaggcttgcagatggctacatagcggtcaaaagccatggtcagcagcagccccgtctccacagctgtggctaagtggacaaaaaacatctgagtgaaacaagcactaaagctgatggagctgtctcccgagcagaagatgctcaccatcttgggtaccacggaggaggccataacaatgtccacagcagccagaacacacagaaagcaatacatgggctcatgccgagtggaatccatccagattgcagtcacgatgagggtgtttcctaacagggctgtgatgtacatggcactcagtgagatagccagccaaagatgtgaagattgcagtcctgggatacccacaaggaggaaggaggcaggggtttccattgtgtggttgtaagctggacccagcatcacaggtgagacttcttgcctattaatgtatagatgatgtaagagaatggtgcagtcctataagattagttcctctttgtggtgctgggaaaacctagggatattctcagcttggtggtatggcaggatcagaaaaatgacttctaatactgtgctacttttcatcctccttacaagtttctattcattgttgaaggatcagctcgtgaattccttccttagggacttgtgttctgctctcttcctcacccaaccccatgcccaggttaagttaattacctcttttgcagtttcctgaaatctcctgtagggactaaatcgacaattccagtactgtatgagtttatggtattcactcaagtgccttataggaagattgtgatccatagctgtggtcacaagtcacttgagtgaagatatatatactcattacagtaaacaatttccacagaaagaacgattaacagaggaaagaatgacttatctctgtgtgctgttactaaatgttgaaaccagaacttcttgaaaacaaacatcacattttatatgctcagcatattgcatagacaaaacataaattcagcattcttgtgattcatgaagtacgttagtaagttcagtaaaataaaaccattagagaataacattatcacattttacaggtgattataaattatctataaataaatataatccttaccttctctaaatttaccctggatcctattcactttggttcagttaatagattaaattactacaaggaaaatcttagggttaccttatagatgaccccccctccccaataagttgttatggttctttaatacaactaactccctcttcctgataaccaagatgttccaaacaagaaagctttatcctttagaaagttaagcactttattattaacacagtatgtgccagtactatgttaaaagtgtagtattcataatctgagtgtatttctccatttgtaatataagacaaacatccattccatacaacacagtttgtataacttagattaaatattctagccaagatcatgtagtacgtgtgtggtaagttttgggtttaagctatgactcccaggtgtccatccagcccaacataaatagtcaacaagacaactatggataaaacaaggttaggggtttcacttggccacgtttgatgagacaaagatagctactgctgtgcacagccagcagctgagctctaccacttgttcatctctgtttattgatgtattcaccctccattgcctcattcaggtgttaccatatcatataatatgtaacaatctaagtggggaaacctgaatataaagaagtcagcattaactaccattctattcctgtgtgatagctgtttagttactctctccttaggatgattggtttccatgatttcatattcatatggtgtttggtcataggcacattttccctgccatctgagaagactccttacaaggggaggctccttcctctgatgttatcacctagcttttggagacattggttaatcttcttcatggaacccctagattctatttcatcagaatagagcgtacaaatcctgcatacttttgtgtaccctactcaaaatatgttattggtcccacatcatcaaagggcaggatagcaaagtggcaaaaagcatcggttctagattcatactcctagactgaaaaccctactctatcgcttgctagccattttgcatcagtcaaattatgtaactctccaagcctcaacttcttcacccattagagttaataatacttcacagagatattttgagatttaagtgataagctatgtaaaagtgcttagtgtaatgcttggtacataggtgttcaataaaatatagctataatatagtaaaacagaagacggttttccctgcctgattctatacttctagattgctccaaataacatccttaaatgggtgtatgtgatttgaagaccacatttacaaagtaaaaagca

SEQ ID NO: 915176 - DNA, 4001 bp, Homo sapiens
taaccgtatttcacttcactttatggtagaactattcacactgacagtgtacttcatatctcaaagtcgagttcacatttcctcagttctgcctggggactcgggccaggtttcactggttagatgtttcccatgacgctgttatagcatcctgttgaacggagaagggaaagaggatgtaggggagggcaaggaagatgagtttttcaactggagatagggcatgcacctgagcacaaaagtatgagaagggacatattctccaaatagaggataaaccagaggcagtagagtcaggggacttgaaagggattgaaaatacaagaggctagaggggtgcatggggccatgttttaaagttcatgtcttctgcctgagcatcatctgtggaaaggaataaagttggcagaaaagagtcaacaggcacaagctataaagtttctagtgtttttctttttaatggcgaagggtagataactatttggaagtatgaaaaactaagaaatagagttgcatgctctcagttccccagatcctaagtggacacatagctgttcatgaagagaatggtgagcggtctttgttgtctttcattttaagagttggtgaggcaggagcaggaagaggctttgtgccttcctcagcctaacctagcacattcctaaagagcagggaaacataagttcaatcaaatgtgtattctctaccaaaacttgtctctgattcagatacaagttgattgaatccactgagaaagccctcagaaaatcagaaacatttcattcacattcctgctagtaattgaaaagttatgcaaggatatcctttacaccttcatcttagaattcctgtagcaccaggtaaactaagctctgcagatctctaaggcatctttgaaattggctggatctgaacagatattgtgttcatgaacccaggttggaatggtcaaagaggacatgcatcagataactccatattctctcccgcagttgtttggtcctcatgccatagatgatgggatttaaggtggctgggatgatcacgtacaggtcagctagcaggacttgggtgtgcaagggcactacatcctgccccaaccaggccgcatagatggatgccatcccaggtagatagtacaaagccataacccccacatgggagccacatgtgcttaatgctttcaactgagcagtctttgaggagagaccaaatactgccttgagaattaagatataggaggcagcaatgaaggccacatcagagcccaccataagagaggaaccaatcagactgtagagactgctgggcacggggtcagcacatgctaacctggccaaagctatgtgctcacagtaggagtggacaaccacattggagccacagaaaggtagatgactcaccatccaactcagtggagttatggctatgatagctctgatggtgatggccatactcattcccagcatcacttgaggcgtgagaattctcttgtagtgtagaggcttgcagatggctacatagcggtcaaaagccatggtcagcagcagccccgtctccacagctgtggctaagtggacaaaaaacatctgagtgaaacaagcactaaagctgattgagctgtctcctgagcagaagatgctcaccatcttgggtaccaccgaggaggccataacaatgtccacagcagccagaacacacagaaagcaatacatgggctcatgccgagtggaatccatccagattgcagtcacgatgatggtgtttcctaacagggctatgatgtacatggcactcagtgagatagccagccaaagatgtgaagattgcagtcctgggatacccacaaggaggaaggaggcaggggtttccattgtgtggttataagctggacccagcatcacaagtgagacttttttcctgttaatgcacaaatgatgtatgagaagaatgcaatcccgtaagatttgttgacacatgtggtgctgggaaaacctaaggatattctcagcttggtggtaatctcaggatcaaaaatgtggcatctgacaaaattatcctgtaccacttttatcctccttaatattcttcccttccaaatttgtattcattgttcatggatcagctcatggcttacctcctttggaaagccttttctgctttcttccttccccattccataccctttcatctgagctttcatacaatctcccatcgtgacctcagagactaaattgatcattgtaatgctctccctagactttattgtgtgcattaaggtgtatgtctcttgtttatgatcttatacaaagggtgtaatccataactgaggtcacaagtctattaaaaagaagtctattaatatatgtttattatggttaagtttccacagaatgaaggataaacagagaaatgaatctgtctttcatctctgtacgctcagttactagttgttatatgaacaaaaacttcctgaggtcaaacatatcgtattttttatccttggtacagtgcctataaaaaaatatgaaagaagtatccttgtggtaaaagaaatacatgaatgagttgggaaaaataagatcattagagaacaacataatcagcttccataggagataataaagtacctggaaatataatccttaccttctctaaactttgccctgaatatcctatttacttaggttcaattaatagattaaaatactacaaagaaaaccttgggactaccttatagatgaactttacccagtaagcttttatgatttttcaatgcagctattttttcatgataaactaccaagacattccaggcaacaaggaagctttatcctttagaaagttaggcactttattatgaacatagtatgtgctagtactatgttaaaaagtgtagtattcatagtctgagtgtattccttcatttgtaaaatagatcaaacatccattccatacaacacagtttgtataacttaaatgagattaaatattctagccaagatcatgtagtaagtgtgtggtaagttttgggtttaagctatgactcccaggtgtccatccagcccaatatggatagtcaagaagacaactgtggataaaacaagattaggggtttcacttggccaggtttgatgagacaaagatagctactgctgtgcacagccagcagctgagctctaccgcttgttgatctctgtttattgctgcattcaccatccattgcctctttcaggtgttaccatatcatataatgtgaataatctggctggagaacccaaaatagaagtagtcagcctaaactgccattacagtcctgcgtggtagccctttagttactttctccttaggatgattggtttcaatgatttcatatgatgtttggtcacggacacattttcccagccatgtgagaatactccttgcaaggggcgctgcctcttctggtggtaacattcagctttgggagacattggctgatcttcttcatggaacccctaggtttttttcttcagaatacagcctacaaatcctgcatactttcatgtaccacactcaaaatgtggtactgttcctacatcatcaagaggcaggatagcgaagagtcgaaaagtattggttctagattcatacccatagacttaaaaatccactctatcacttgctagccgctttgccttagtcaaattatgtaaacgcaccaagccccagtttcttcatccataaaaaggagataatagtacatacatcatagagatattttgagacttaagtgataagctttgtaaaaatgcttagcatgatgcatggtgcttaggtgctcaataaaatgtagctaatataaaatgaaactgttttccctgcataaatcccatacttttagattgctgcaagtagcatccttaaatgggtgtgtgtgacttgaagaccactattaaaaagtaaaaagccactcaacccacattgcctgagcttttctcctgtcgtcccataatctacca

SEQ ID NO: 915177 - DNA, 4001 bp, Homo sapiens
ctacataagacaaaatgagtataattgtaaaaaacaatgtgacaagtttgataattcaaaaggtaattaattgcttggtctttggaaatcttattaaataaattgaaaaccttcagcatcatgtgaaatgtggctatccatagctagatatgacatagtctatattaaagtctgtgggagaacaaatgacagattacaggttggaaagagaggtcttggattttgaaatagagtcttttagggtcaaatatagattgagagaatactggaaaaagtgataggcaaagacctccacatatcacagacgtaaaaatgctatacctaactggtgcttatgttatggtcatgaattccgaaaagcaatcagtgataagttatgctggtattactgataaatagttttgaaattgtgtgtttgttttggctatcattgcactgagtgtcatgtctttggcatatgattccacttgaagctacagatttggcaaagattgttttgaacccgtgaaatttgctttgtaagaggacaacagaatgcaagctccatagggccagacattgaatgaatataaattaaaggaatcataaaatgcatgatgcatgaataaacagaagtaagagaaaaagaataaaaggaaaaaagaaagaaaggaagaaaataaggaaagaaagattaaaggaataaataaagtagtttacagggtaaatttccagtgccacatatctctcatcactagtcaaaaaacactcagtaaaatatgttctttccccagaaaagcagcagcctgtgctaacaagcattcttcacaaggtcatgcagtcaaaggccccacagttctctcccaggatatcccttccaggatagttggtcagtctttgaacttcaactacaatgatgtttctgacagttttaaaatccattattagtcagcatccaggaacaaaccaacttgtattgcaagttgacagcaataagttaaggatcaggagatattccttaaggcaagaacatatcggtctttatagaaggatcaaagcccttagtaaaataacatggtaagagtcttattttttagtaaaaacatagagcactcgttctcgaatctgtttggtcctcaccccataaatgatggggttgagagagggtgggataatcaaatagagattggcaacaagaatgtgaatgtaacctggtatttggtgtccaaatcgatgagtaaggaaagagaagactgaagggatatagaaaacacagatgactccaacatgagcgccacacgtgcttagggcttttagctgagcatcatgtgatgggaggcggaagacagcacggagaatgtaaacatacgagatgccaatgagcaccaggttcagaacaaagaaagaaactacaaaaagcccatagataccattgatacgaatgtttccacaggacaattttgcaatgcccatgtgctcacagtaggaatgggctattatgtgagcctgacaaaagggtaggcggtagataagatagaccatgggaagtgtaagtaaaacgggacgaattacaatgcacatgctaatgcccaccaacacttgggatgtcaagatggttgcgtaatgtagtggagcacagacggccacataacggtcaaaagccatagccagtaagacctcagcctccatgccagtgaaggcatggatcagaaacatctgggccacacaagctccatagttaatctcgtgagcatcaaaccagaagatacccagcatgcgaggcacagaggttgtagaaagggccaaatcaatagtggaaagaatggccaggaagtagaacatgggctcccggagagtctgttctaccttgatgactagcagaatggtggcattgcccagcaaagccacaaggtaaacagagcagaaaggcccggagatccacatgtggaagtcttccagacctgggattccaatgaggaaaaatgtgactgggtgaaatatgctcttgttgtgataaaacatttttccaaatcacagtgtaggagaacttgccacatgtagaagcagcagctggggagagaagattgaataagaagtttgtgtttcattcagtatatgcagagcaaaaagaaaaggttatttggagggtcctgttactgtgttttgtaatctacagtcatttgaatagatcagtctcaaataacttaattcttatgtttacataatgattgtagtataatgtgtaaacttacacattaaaaattgaaggattctatgacatagagtctgatatttaactggaataattgaagatgccctgtaccctttattagtcccttggttgaagaggaatgcctgaaaaatcaaagatacacacaagcgaaatgccgattaattcaggaggagacagactaatgaggacatgaagttacagacacagatgtacacatatttttataattaaaaactgcaaaagttcttctaatgatttgttaatcatttattgatgtagggcacatgccaagattaagcctaatatcctatcaaaaagacagaaagataacatgagaaatgtagatataacaaacaaaagcgtaaacaccctggaatgcttgccccaggagcaaacacaggctgggtcacataccaccacacatgaaagagctcagaaagaaaataataaacctgttgaggattttcactgattaaagtactttctcaagagcaacaaatttttcggtggctcattttggatttctatagtgatggtagtttctagtggtatttgaaagcatcatttactcttcactctatattagttctctaactagtatatactgggtttatacctcctgcctgattaagtcacttttcaggtaggtagagacaacctagaagactcctttggttatgtatttggagaagatgtttttgatgacacaaaactggaataaaaaggtctatttgcagataaaattactttctgtaattttctaaaggaaatatataagggtgctctttcaatgcttttgaaattatgaagaagcaaccactcataagctgaaataatgaaatcaaacttctgtgggtctccaacttgtggcagagtggttcaggatagaagaaagtagcacagactcctgtttcaccatttatgtagctccatatttctgacaagtatgtcaaagtggaaaatacatcaagataaaaaataaaataaataatatacccattctgaggtgtggaggggggtagagatatagagagcaagaaagagagagaaaaggagagagaaagaaataagctgtatttctacagaagtccattttattccttataacccataggaaaggcagaacatatattttaccaataaactatataattgctttgaataaatacatctattccatgggtcttctagatcgtttttaaattttcaatctccatttaagagtttcaaaggatttttattccattagagtcagaaattgtactacctgatcaatatcaagcccagcaagctcagcaacccttgatcatttctcacttatttcaatgtaatacatacctaagtcaagagaaaattcacctgccttattatgtcatagaaatataagctcaaggggagtatcaagcagcatggctctatagccttgtcatttttacagtccaagaagagtcgttttatattaaggctttagttgcttagaacattaggaaaattgagttagctgggttttctactataattggcaccatgagattgaatcctctgagatggttaacaaaatttttgactctgatctagggaatagaagcccaaagaaaagtgatgagtatagaaatgttcctacaaaaagatgcagttgtgggagcaaaaacatccaaatattattatttaatatatggcatacagatagatacattttatttctaagtgaaattttaccaccaaattctgtgggatgttgctttctagataaaatagtccttgatccatattaactacctaagttaaa

SEQ ID NO: 915178 - DNA, 4001 bp, Homo sapiens
gaaaaatagctaatgaatactaggcttaatacttgggtgatgaaataatctgtacaacaaaacccccataacatggctttacctagataacaaacctgtacatgtaacttaaaagttaaaaaacatacagtaaatatacggtactataatgttatgcaatcaccatcatataggtgatccattactgaccaaaacttcattatgcagtgtgtgacagtattgtattttcttattttcagaaatctcagcttcaagagggaagggtgttatttctcttttcatggttcatagttcaaagatagtattcagctcttctatccgttcatttaataaatattactaagtattttggaggcaaaagacatgcagtgaaaagctagatacatgatataaattgataaaaaggaacatcggaggactcttttgataaatgttcactaaaggaattggccatgtctatcaggaaggaagtaaaagaggaattgacttaatggaagaaatagatctacttataaatggagctgtctaactgtagaaataaaattgggagatagtaggctataaagagtggcaaagggtggagggtacttgtcagaaaagacatgggggtaatttcagtactaaaaggaataatggttttggggtcacaaaatttgaggtacatttcctcactcatacctggataaagaagtcacctgtttgggtgactcagctgtttgggccaatctcagccaataaaggtcctactgtctttcacccagattacaataccactttgagaggtttgtcttccttagccatgtgatgagtctatgacaatgggaaggtcaaacctctactatcagaccagactataggtgcactcctggtttgacctgactcgtagatctgtgaggaatgaaacctcattttccttatcatactagagaattgtcaaagatactctgcaattttcctatttagatttttcccctcaaccccaatccagcattctcattacttggcaagtgggataaaaaaagagaactatccatctacatgttctttctctggaatagactgagcacatactcacgaatctgcttggtcttgactccatatatgataggattgaccatgggtgggaaaaggagatagaaaatagcaaggagtatgtggacacgaggggcagcatggcgggctacacggtgcatgactgaagagatgactactggagtgtaggtggacaggatggcacctatgtgagacacacatgtcccaaatgccttgtagcgggcctcctgagaggcaagctggagaactgcctgaaggatgaagacataagacaggataacaaagagcaggtccaacaccacaataaacatggccacagcaatgccatagatattgttgaagctagtgtccccacacgccagccttaccacagccatgtgttcacagtagcaatgggcaatcactgggcctcggcagtagtggaagcgtctgagcaggaaggggagtggagtcattagtgtcacagcccgggccacagcagccatgccaatcttggtgatgagggacccagtcaggaccgtcgtgtagtgcaatggcttgcagatggccacatagcggtcaaaggccatggccagcagcactgctgactccatgatggagaaggagtgaaggaagaacatctggaccagacaggcaaagaagttgatctcctgatccctgaaccagaatatggcaagcattttgggcagcgttgtagaagaaagaaccaagtcaatggttgccaacatggccagaaagaggtacatgggttcatggagggctgcatcagcctggataatgaagagaagggtacagttgcctagcagggccagagtataagcaaagcagaaggggatggagatccaggcatgcaggtgttccaaaccaggaattcctaccaacaaaaagacagctggatgtgttgaggtgatattagagggaagcatggctcctggaaatctccttgtcaatttttacagggcttcttcaccttctatatataccttctacagtatatatgattagagttcaacctgtgctatcccacctgcaaagattacctcttgtttccattgctagactttaaacaaaataacctagcagccttcatagacatggagaagtataatccatattttctaccctcaaagaaatttgaatctcattgagtagatgggatatcaattctatggatatttaatattctaagacaactttcataaaggaatggagtatatgtagtgttttctgtgttcttggtgatgtcatgaataccttgaaaaaagtgaaaatatgtttaaatcaattcatttctttagcacatacattggtaccattctacctttcagttaagctaaattcccaaatgcaagagccaattttctctcctgaaatctgagttgagtccatgtataagtcaaacccattggtttctaatgcccaaattaatcacacaatctgcatattttccctaaaactactttatctgatatggttgctactagccatgtcactatgtaaacctaaatttatacttaataaatttcacatttatacaaaatacttttcacgtgctcaatagccacatgtgactagtgactaccaagaatatttccatcattgtagaaatttctgtttaagaccactgctctacagtatatctttcacatcttctcagtattcacaggtctctgtaaatacagccatgctgcaagcatacggagaaaatgaaacgtccttttttggttctccactgaaactcatgttaaactccctgtgcatgtgactctccctccacctgtcttccagttccttctttttgtcacaggagaatttgctctcatctttagcaagactgacttatgacttccaaatatccttcttgttaacaatttttcacctttttatcttgttctggtcattgttcttttttcagatccttaaacactagagttacccagtttttaccaagactgttataaaattataaaatatatgtttgtataaaacatatatttatacaaaatataaaatataggatccacttaatgagattcttttgaggattaaatgagataatgtacttcaaacacttaatagtcacagaacaaagtaaatattgaaaacaaaaactgggtctctttttcaaaaagaaactgttgggaaatataataattgctctaagatattatagctaatagtgtcagacagccatatctgagtccttctttctaccgattcccatgtcttaagtaactaggcttattgtttccatctagatgccctatatgcaacctgcatccagcataaccaaactgaaaactaacttccttccataacatttggaaaatgtttagaatctaaagttattggctgaaatcatgactgccacatattctagtggtagaccttgcacaaatcacttatgtactagtttgtttccttctctgttaaaggtagttcagtgctatttccctttatctgaggggtatagggaggttaagtgtgattatgtataaaatcattttgtataattccttagtgtgcagagctttgtcacttatatttctcttctgtagaactgttactttttaaaaaattatttatgttgattaatctaccgtgacattaaatcctcctccctttattcaaacctctgcttttctttacagtgaaacatgtagaaaggtctacaatctcaactctctcaaggataattggttttgaaacatatcaatctggattttattcccatcacaaaccaaaaattccttttactgtgacaatcaatgacctccatgatgatggtgcccttatcacttacctggcttcatgcaactggaccgctgagcaacttttatctgaattgaccactctcctgcttaaaactcacttttctcgtgtaccaccatattcccgtttcccagctccagagtgtctcacttccttctcctgcttctgccctaact

SEQ ID NO: 915179 - DNA, 4001 bp, Homo sapiens
tacagggcttgtgtgaaaagcttagctgtgttgtcaggattaatagagaattatatagtaggtaagttcacatgagacaggaaaagagaaacataatattcttgcctcctatctgcttggtcttgctcttcttttattatgctgggccttgggatggaaatttcagagaacagaatctatcataattatcatttccttctctgtcttaggacaaatacacaagtctgacacccctaatttagtatatgtgtccccatcccctatcacagatttggtggaattagtaaataaatgagccattctcattcttgaaaacataagatacatctatgtgcaaagaaagagttgcatgaaacataaagccagaggacatgtcttattcaaagtacttaataaaaggaattggacataaggatggattggtaaatataagcaaaagaatacacatactggcttaggtgaaaaaatgattttctagcaagcataggtgtcttactcagaacctgcagccctggaatgtttcaaacttcctaacactgagtgtttcatcagaagctggacaccaccagtcagaatgaatgaaggattcctatgtcagatatactgttggccctcacccaggtcctgagtagatagttcaccaaattcccaatgactaagaaaagaaactcagattttcaaagtcttctcttcagcaaatgaagttggaagcatctttgtgtctttcggtgaagtcacctggagacccatgggtcaagtctctgtcaagttactgataggggtgagggcactgtgagaagacagcacagtcagcacattcaatccacaggctaccagaggacacagacccatgagtcctgaacagactggtggctctgagtttcaggacatcattttttttttttccaagaaaaaactaaacatgaagatcctggcagccgtgcacattctaccatagcctgtctccaactccagcagacaagccaacccattctttctccacctcaccctctacatatcctttcttgggaatactcccaagatgctctcacggatttgcttggtcttgacaccatagattatgggattgaccatgggtgggaagagcagatagaaattggcaaggaggatgtggacatgaggggcagcatggcgggctacacggtgcatgactgaagagatgaccacagttgtgtagaaggctaagatggcacctatatgagagacacatgtcccaaatgccttgtagcgggcctcctgagaggcaagcagtagaactgcctgaagaataaagatataagacaggataacaaggagcaggtccaacaccacaataaacatggccacagcgatgccatagatattgttgaagctagtgtccccacacgccagcctcaccacagccatgtgttcacagtagcagtgagcgatcactgggcctcggcagtagtggaaacatctcagcaggaaggggagtggagtcattagtgtcacagcccgggccacagcagccatgccaatcttggtgatgagggacccagtcaggaccttggtgtagtgcagtggcttgcagatagccacatagcggtcaaaggccatggccagcagcactgctgactccatgatggagaaggagtgaaggaagaacatctgggccagacaggcaaagaagtttatctcccgatccctgaaccagaatatggcaagcattttgggcagtgctgaggaggaaaggaccaggtcgatggctgccaacatggccagaaagaggtacatgggttcatggagggctgcatcagcctggatgatgagaaggagagtgcagtttccaagcagggccagtgtatatgctaagcagaaagggatggagatccagatgtgcaggtgttccaggcctggaatccccaccaacaagaaggcagttggatgtgttaaggtgatattggaggctgacatggctcctgggaattctcttcctccttatctgcttccacagggcccttccagagaatattcaatatcagcagaattacaatgctcacattcaaactctgatcattcttgtgagaagattagttcttagacccatttttagacatgaaaagaaatgagaaaataatcatatgtatcatgaaatattatgcatgatccttgcccttaagctgtttataaaaacactgggtgctcaggacatttaattccaataaagctagtattacaaagcagccttattgagaaatcaagtggaggaagagccttttgtggcctgcatgtggccaaaagcaactttgtaaataatacagattgctgcttaattcaaatcatacccacaaacatttaccgtcactgtcttcctattgccttccaattcaaactacactcccaattatgaaagagtttctgccctgaaatgtcaatcttggtcatatgaaaaataaatgtagttagcactttctaataattcacttccctacaagttctttagattttttttctagcagggtttcgtaggtccttgtttgacactcagaaatccctccaactaaagccctacctccaggtaacttgagaacatgagaagcccttttgttgttctcttttgcctaactgtagtttaaccttcatctctacgtgcttcttccttcctggacttcatgacattcagaagaagagatgccccacacttacctttttgcaagactgacctattcccttcacactatttttccatctgggatccttatcattctatctttttccaccttctgttgtcatttcccttgaaaacgtttaaacatttccttgcaatatttttgacctgtgccaccttttttttcagctcctgcctaaaaactttcttttggggattttgagatcttttaaaacacttagcacaaatcttgaaacagtgctcagtaaacgtggacacttatgaattgagaaaacaaaagactaagtcactaacaatcagaacagttggaaaacgtcaaagatgaaacttgagcttcgagaactctggtttgctgcctcccaatccaatgtcttaaatcactacactcttctgcttctacctcattgcttcctaagaagtataaatccagcatattcaagttaacagaaatataactcaaactcattatcatgatataggaaaaaaaattagaatctaaagacttgggtttaagtaatgattgagccatcagcctaccaatagaaactagtattaatcactgaaatttttaaagatttaggttcctcacctatagatgaaggcataaccatatcttccatgacaattttactgcttcatgatgaggaaagataaaatcatgagaagagtccctgtaaactgtaaagcattgtaaaactgttatttgtcattacaatattccccctcccacacaaatctgcccccttttttaaaatgtttttcttgacatcagcacaatcccgcattccttggccttatatctccctccatctaacacccgcaactgttttccttcacaacaatgtttgttgaaaaagttgagtaattcattatctaattcctcatctcttaatttttaattccttccaatctagctcccatctcctctactccccttatatgatcttatcattgcttgtgtattcccctctctctctcttcttttctctcctctttttgttgcccttttattctcatacttctctaggtgctctcttaggtggtaaaaatgccaagagaaatcaatattcagggaatgctcaactgtctagcttctactctgagttcccaactagcatatcctacttcccactggatagttccactttaaagtctcaaacaaaatagggccaaaacagaaatctgtctccacaaactctttcctctccatgacttgcccatctcagtatgtattattaccatccatcctatagctaggtcagaaacccagggtgtaatccttgattcagtccccttcctcatcctttatatccaatttcaaaaggcaagt

SEQ ID NO: 915180 - DNA, 4001 bp, Homo sapiens
atcttttaagttttcacccagttcctattaacagaaatagaagatctaattgacaccactccacatgccctatttccaaaagagaaacccatttttaagtgtccataactgctactatacttattgctttatttattatagctatgtttaccaacaccgggatctagcacattttgtagttattagatgctaataattatatggttacttttgggttttttaatgaatatttataaaacaaacatatacgcagtacttggtcttattccttctttatccaaagcatgaatataaataagttgaaaatacaaagagatatcttttaaaataaatttcctagacacatatagatttcttccttgaaaatagaaattatattttattattcctagagcctattaccataacttctccacttatgtttgttttaaataaataagtaatacccatattgcaataaatgctgttttcttacactgcgaccttctcagctgctttgaagagaccctattggtaaacaggagccaatgatctggggatcccagcactaacttagaggttttgaagaaactctaaacctaaaaccaaccaaagggtgggactttacaattccagacagtgttgcatggcctaccattgggcaaaggcgagaaagatgacacattcagagctatcatctatttctcctatccccaagtcctactgacacaaggagtagagaaatgttgaaatcaagagcaaaagaaaaaatggcaaaaatattcacaaatccagatatccaggtacatcccaataagccaagtatctgtgggtgttctttagcatggcactagtaagactagaaggaatactcactgcaaaatggtctgtattcatgtaatctacaccagtcacaggctcctggctgtggtccgcagaagaagcctccgaaggaaacaatgagaatatgttcagatcaatccttttgtgtaaacactctgagcactcgctggcggatctgctgagtcttcactccatagacaagaggattgagcgcaggtggcatgaggagataccgtgtggccagaagaacatggacatgatggggtacatgatgaccaaagcggtgagtgaggaaggagaaaattccagggacatagaagaccaggatgacacaaatatgagagccacatgtgctaaacgccttaagtcgggcctcactccctggtaccttcagcactgcctggaggatgtgggcataggaaacaccaatggccagaacatccagcccaatcacaagcaaggccatagtcagcccataagctcgattgactgtggtttctgagcaggcaagtttcacaacagccatatgttcacaataggcatggcctatgatggtggcttggcagaagataagtgttcccaacaaaatggggaaggggataaggagtagtaatcccctcaccagcaccaccattccgatgcgccctatgacccctggatgcaggattgtggaatggtgcaaggggtgacaaatggctacatagcgatccagagccatggccacaagtacccctgactccatggaggagaatgcatggatgaagaacatctggatcaggcagacgatgtacccaatctcgtgggcatgaaccaggagcactgcaagggctttgggtgcagtggaggaggccagaaccaggtcgatggcagctagcatggacaggaagaggtacatagattggtgcaaggatgggtccatccagatgatgaagagaatggtaacattgcccactaaagcaaggaggtaaaggatgcccaggggcagtgcaatccagtgctggctttcctctaaacctggaatccctaccaggagaaaagaaggctgggatagcctccagcttgaattgctaaggagcattatcaatggcttggagaggaaagagaaaaaagaaaccaaagtcatgatttctgcattcctgctacattatcacattgtccaaatggggcaaccatcatcctgagaagaataaagtgacttcaactgcaaacgaagggaataaagttagctacagggaagaaaatctcctttggtggagataattcttttacaagtgagacatccacatgtctgaattaatacaagcttagttttgtttagagataagagtaaacataagctgcttttggagagatgcttaaactctactattcagttgcttatattttggaactgtcaacttcaaagagttatttttattagcctcttggtattactgaccactgtgaatcaatctgttgtttttgaaattagtcttcctcagtttccatgacatggcactccagagttgttccccctgtagccttggtcccaccattttctctatctcattatgtcattgattccagggatccatcctctcctgtattccctattctgtgcattatctcttaattgacttcatttattcccatggttttaactgtttatatacttttatttcttccaaatttatgtctgtttacccaaatatccttctgaaatataaatccatttttccatttgctttatgaatatctatacaccacatcctcaacatattcaacattggattaattcacctatttttcccaaatttgttctacttatgttttggcaataatttttaattacatccctagctacctacacaacccaatctaaaaacttggaacctgtctttactcataatcctcatccccttttattcattcaccaattcatgttgactttatgttaacccctcttatatccactccttcttctcaacccccaatatcactaccttagtttacacccaacttctctcacctggactatttcataacatctttctgcctttgccataaacaccttcccaattcactctcaaccctgaagtcatgggttttttttctaaaatgcagatctcatcatatcactcctaagattaaaatcctttggtgaatttattgcatggaataaaatcatactttgagactggcataaaagattatcaaaagttatcttttttgcattacttttgtcttacagttgatatatttctacatatgttttactaaccatccctgcattcttggagttacatgtacacaccaagcttacctatgccttttgtgtagtctgtctccaaattcctttatctgaattggtccttcaaaattcaaagtccactgtcacccctcaaaaggactcattgcctatgtcagatgaatattgattatgttcagagcactttataatcttcctttattcatccataactttctgacttatctctagaaattctatcagtgtcttaatggtttgtttttttaaagaaacatatcttattatactttataattataacatagcatggtgaacatttcacaatgtagtgagataaataaaagcaatggaggaagacagacttagtttaaattttgtccatttcatattctaggaataaaaccttggcaggatactaaaactctctcagtcttgatttccttattttataactaacatcaatcttacaggtttattgtaaacattaattaagtaatatatgtaaagtcttgatatctagattagtctacaaattatagttataattattttaatattagcaatagaagatgactgagaattagaccacaggcttctttcttttcttctttgtctccatgactctgcttctctttttcaaacttttgatatgtttacctctcatcatgatattataacaaacaattcagtgtctttgacaaccgcatgttaacatgaagtatcaactttgtccatgggattcacccttgaaatttactaaaagaaaaaacttgaaactggatatgtgtatgtaggtatgtttgtcttaaaggacaggcgtagtctgaaataactgtatttttctctgttggagtggtggtgcacatgtgcgtgtaaagattaaaaagtcaagaatgacttagttcttgtggataatgcatccatagattac

SEQ ID NO: 915181 - DNA, 4001 bp, Homo sapiens
tcacttctgggaacctcaatttcttcatttgcaaaatagagtaattcttaccttagtgtggttgggaggactatgtcagtaatcctgtcaatagtaactaaatgctttatccatgttagctcaatgactagaacatagttaatatttaatctggaggacaaagtcagtgtctctataaactatataacttgcaacttgttgctgattcattttaaggatgtagcacactatcggcaggaatcctacagatgggattagggtttggggagtgtttctgtgggaaagggaagacttatttccacagagtcctcatatgcatcaagcctgcagagaatacaacaaaggcaatattgagacatggtaaccttgtctcattttccttcattgacctgacaattttttttcaggccacattctctttcataagtatccccaaatcttctgggcacatacaagtgagtcttctagaacacatttttacaggcagtttgaacagcatctcaattaagagaggcttaactcaggaaggtgtcaccttgcagctaaggaaacttcaattaaatgacttagttttttaaatttaccttttaaaggatatacagaaaacaaagaatagaaagtattaatacataactttacaatgtattacaaattccaaccaaatgtggagctaggcagcttaagtaactgtatgtagttcataaagcaagggtgttctgtcctatttcctcataaaatataaacaataatacctcatgtcaggatattttcaagaattacatgaacaatgctaaatattagcagcttgtcgttatcacggttggtttaccttctttgtagctcaaatatcctttagttgtaagttttgtattttccaccttttaggacttagagttgtatactttcttagaattcctttggaactacaaaagttggagagcacagtgcctaatacttcaaactgcttgtaaagttcctaatgggaagcagcctaccatatttaaacaccttctccatgagcttatttgagagagaagaaaatagtaatcatctaatcttcatttctatccttggtatttggagaaggctctctcggatctgcttggtgcgaacagcatagacaatgggattgaggattggaggaatgaggagatagaagttggccagcagagtgtggactggaggaggcacacactgaccaaatcggtgaatcagggaagaaacagcaatgggaacataaaagatcaggatggcacagaggtgagaagcgcatgtccccagggttttaagcctagcctcaggagtggctaaccccatcacggccctgaaaatcatcacataggatgcagcaatagccactgagtccaggatcaacaccagaaagccgatgctcagcccatagacattattgaccctgctgtcgccacatgtcaaggcaactacagccatgtgctcacagtaggagtgggagataacatgggttttataaaggggcagccgcaggcggatcatcagaggcagaggtccaatgtagagaacaccccggaggagagaaacaagccccaaacgacccaccactgtataagtgagcaccatgctatgacgtagtgggttgcagatggccacgtagcgatcaaaagccatggcaaggaagatgcctgactcaacagtggcaaagcagtggataaggaacatttggcccaagcaggcgtccaggccaatgtcacaagcaccgaaccagaagattcccagaagtttgggtatagtggaagtagacagaaccaggtcaatggcagccaacatgcacaagaaaaagtacatgggctggtgcaggctgcgttctatctttaccacagccaggatggtcacattccccaccacagccaccaggtacatggagccaaaggggatggagagccagacgtgtagggactccagccctgggatgccagtgagccagaaggagctgggtactgagcagacattatgaaaagtgagcatggctatttatatgtgaaccttctcacttgtaccactaaacgcagcaggatgtttttcctggaaataaaagacaatattttactctaagttcctataataatagggtcactgactagatgttagataagtcatctttagaagaaattctagaacgtcagtgtcacattatactaaaatgttcgcaaaatcttagaaagtacaagccaaaacactcatttgaatgaaatacatctttttgcagtatgaccttcgaggagtgatattcttgcatcagtgaatgaactgacctaaagcaaataactatctggtcatttaccactgcaggtaggctatgaggtggtgcttgagatcatgttggaaggttttagagtgtacagctacttgaaagaaaaggagatgcactgaagtgtcagagggtcagagacacctgggactatctaggctctatggtaaaccaaagcttaagcctgggaccagaattgactactggatgagctgaaatgtctaatttgcaggccaaaatcacaaggcagagacttggggtggtaaagatgacaccttccagagggtatagaaacaaagtgatttctgaaagatgaaagctgaccaaagctcagtttatgcgtatttgatacccaaaggcaaagcctggcaagggcctcctcccttcatgaagactgaatatgaagaaaaggctccagaaacagagggttatcagcagggaggaagaagacattcagtgcagagtagcatgaagcctaagacaaatgtttggccatgaaacacccttacttgaagtccagagcaactcactaaaaagatgtcaatttaaagcaaatacatgaaaacaatgtgttgtctgattttttttttttaaatctttgtctaaaagactataccagaatgtgttccttatatatcagaggaatacgaaaggtgaggagcgtgtaagaagtttaatgcagtacatcttaagcctagttaggttgattacagaatagtcagcaatctgggcttaggacttttctagatctgtcttcagatcttggcagtgagagcttaggtgaactgctttatcccattagtgaaatacaactaactacactttgcaacaaacttaaagccatggcctagagaagttgtcatgactaaatgaaaatgcagggcctgacagtaacactaagcattagttctttattctgttgagactaacatgcaaagccaaaaatgttcaaacttcaaaagactctggaatgtctatctccaggaagctgtggtgcttgggagggtgactgctgtaagtctgacattatcccataaaacctctccataagctgggctcaccttcagattctcaaagattatgacaagtagacataatgttggcaataactgcaaaatagggaaaataaaaaggctgagtcattggggctgggaaggaaaggagtacacaggaagtggcctgtgaagtcatcaggtagaatggagtgatggatttagttggaaggaggtggcttggcttccttaacctatattctggttgttcttcacttgcactctccatttgcatagatccctgttctatgtctcagatgctatattttactcatgggctgtatcacccagattcccttgtcctctattttccaggtgggctcagtcaatgtgaggcactaacaggagatatgagggtaaaaccagagattagagacctactctctagttcccttcctaccagctatgtttggcagtgtcttggtcttctaccaaaggccccagctcctgaagtgaccctttgtgttttctggtaaccatgccctgctttgcccggtcagttctaggctaagttgtgctgcttactgttagtcccagtgcctccccatcccttgtcaagttccttaactcttgtcaagcctctgcagatagtcccttcaactgcccctttgactatgccacttgttatttcatgaatatatcagaccagatcccaacagtatata

SEQ ID NO: 915182 - DNA, 4001 bp, Homo sapiens
tgatttgtataaatatgcacatattatttatgctaaagttaacatacttctgaaagaaaagaaagtatatatactttgtaaactatagacagttttcataggaagcaagaaagaaatgtctcacagcttagggaggtgagagtatgtgctcaagacatattattttaaataaaaatgttgaagcatagtacacaggcaaaaagagcagatattacaaataataggctcatgaaatatcactaagttgatacaccctgcaactaccatccaggtcaagaactaatcaacggtggtacctcagaagcatccccctcattacctggtttctcattctcaaagttaaacattatctcagttagtttggcctacttctgaactgtacatcaatgacaatatataatatgtgtttttatctctttcacctaatactatatttgaatagaccacaattatttatttatgttgtctaatgttgatggacattggtgtgattgccagcttctgggtattacaggcatgcttcaatttacaactttagaagttttctggttaacatatgtatgggttgctactggatagatatacagctggcaaacttgggatagaagcagaataaactctaagtgattttggcaggaaaatgatgagctaagtaagttaggacagacataaatgaacacggctcatgttttgccagagatttaaattttttaaaaagtttcactccagtgttagtgatccaaccactgtgctgcaaatttgtgtagactgtcatttaggagagaagatgatgtctgtgaagattaaatgcagtgaacttcgaagtcctctatagtaaaaaggctttaaagaacatggaataacataagagagggtatttacctatttgaacatgatggtaccctttccaaagatgtagagtaatccgagtatcataaaaatattcctgtggccagatttctggtgtcatttaaagagctccctattgacttggtgatctcaacctggctaagaaaattctaacatctcagaagactttaaaagttatgagaattgtcctttcccttaagaaagaacctaatgacactttctcgtacctgcctggttttcaccccatacacaatagggttcattgtgggaggcattagtaggtagagattagccataataatatgtatgtgtagaggaatggtgtgtcccccaaaatggtgtgtaaagaaggtaaagaaggctggaacataggtgaggactatggcacagaagtgggcagtgcaggtgctgaaggccttctgtcgagcatctgctgatgatagactcacaactgcttgaagaatcatagtgtaggagattgtaatgcacaggatatcaaagcccccaatcagcagggcaactatcaaaccatagatggcgttaaccctgacattaccacaagatatcttggccacagacatgtggtcacagtaggtgtggggtatgacgttgcccttgcagtatggaaggcgcttggtgaggaaagtggaagggataacaagcatcacacccctaagaaaagtgaggaacccagctttagcaatgactgaattagtgaggatggtggcataacgcagagggaagcagatggccacacagtggtccagggccatgagcatgagcaccccagactccatccctgtgaaggtgtgcacaaagaacatctgggcgaggcaggctttaaaatcaatctccttgagattaaaccacaatatgaagagagtgttgggaagggtgctggtgcacatgagcacatctgtgaaggaaagaagggcaaggaagacatacataggtctgtgtaaggcctcatcacagtagatgaggtacataaggccgaagttccctgtaatagcaatgctgtacatggtacacagtgggaaggagatccacaaatgcacatcttccaaaccagggatgccatttaggatgaatgaagctggagttaggctggtgccatttagaaatgacataatgactgttggaagttcattgtatagcagttatagcattgcctctgtgagcaggaaataaaaaaaagagtaatttcaaggagtgactgaccatcagtcttctttcccataatggctattttgttttccttgtagatcaatgactatatttgttctattatgtttaatatgtgatatatacactgtctgggtgtgtgccttaagcattaggtgttgacaggaaaaactgagtctagtcagtacatttggacctgaatatctggggtctttgttatcatgtagtccattctccaggccaacgttggccatgaactgaacaactctgtggtcaagaattgattaaatatttgctctattctaggtgctcaccatcttagagatctccgttgtattctgaaatgttaacagacttcattagttcctgtgggcttacctttcaaattaaatctgtcctaatggacatactgacaatattttcaatctagttttagcccaaactccacccttttggtttgcagaaaacctaaatacagaaaaatatgaatcatccccttgtagctgtagttttcttgaagcgaaatcatagaatgatcttagaggcaaataaataataataataataatccactttctaatatcagcaaaagaccacttgttttataagtaccatgatatatagaggatgaaggatcattaaaaatgcaagaacttatgagaatccaatgttttcctaagattacagtctagtctaattgactctagagtcaattcagtgaaaataaagatgcttatcatcttaaacaaaataaattgacattccctttagaacatagtgctttatattctacccatatcaaaacttcagccatagaatcaaatatttttgaggcttaaaataaagaatatttttatcaaatatttttgaggctatgtaatctccaaaactaagtttcttttgtatacagaagatgttcaatacgtttttcaaggcccacagaagaacaggcagtggtagaacaaggaccaacaaaacacttctgaatagtaagggagagaatatttggtgtgatagtgtgctgtgagaaaataagaacaaactcaaagttatgaccacagaatagatgaaaataggcttcacgggtctgaagaagtgggctatatcagccggaatgtgttgattaaaattttttaaaaggagcaagttgtgtgatgggggcatatcccatatagaaggatattggaggaaaactaagtaggctttctaatttaaaaatatcaatattgatatttatagttcctccttgacatattggaggtgacccacctgtcacttcagggatgtcactattgaaaatttaaggttgtataaaactggctatcctattttcatatgtgtcttttataaaatttttatgtccttattttatgaaatattagggctgtataaatgaactcttgtcacttttctaattgagatataattcaaataacattactatcatgtgaaatagaggcaactcactgaaaagaagacaaaacacagaaaagtatggaatgaggctgtcatctctctttttttcagatcacagaaaaaattcttttctctcagaaatgctgcttttagctttcacagccagagggaataaatagaatacttcctgcaaagattgtttcagtaattgaaatgtgaatattttatccaaagtgaaaatggaacatacaagccagtttgtctgctgcaccattttaaaagctaggagaataactcttctgacaactctcttactcatcctcatttctcagctactgtaatctgcacccatccctttaataagaataaagaaatctcagttcagaaatctgctcaccctaatgatcagtgatgttgagctttttctcatatgattgttggccacatacgtgttttcttctgagatgtgtctgttcatatccctttcctactttttaataggttgtttttttcttctaaatttaagttcc

SEQ ID NO: 915183 - DNA, 4001 bp, Homo sapiens
attctgagtatcttgaaaccaggaaccgtatcatctgcctccctctcaataaatctaagatatgactaataatattgcttaaattagtgtttcaaaaaatgaattgatgagtgaatgaataaataaattataatatatactaatagcttaatggtttgcctgcttggtcaataacatgacaattatattttcagatccattttataatttatttatttattttatttttactttagattcagagtgtacatgtgtaggtttgttacaaggttatattacatgatgctgaagtttgggcttctgtagattttttcacccagatagtgaatgtagtatccaacagaaagcttttcagtgtttattcttcccgctcctttcgaagaacctggagtctattgttcccatttagatccattttaaatggagaccctaaactgatgacttgggaaaaacagaacccttggacattcttctgtgaattatagggtattttaacacatattttgctgacaattaaaatggggagatttcatagaacatataaatctagcttgtctttaaaaaatactgaaaaatagtgaacactggacccacgtttctctatgtctctacagcctccccacttacacgcaacgcagggattgtcagcaggtctgctgtccttattttactacctttctggtctcacaaacatgtgagtctataaacgcttaggaaaagcatcaactctttaagtaatgggtatattacttctttattttgcattctctgctttggcagatccttgcccccactcccaacacacacaaattcaagaacttgcagagacttcagaaaattgacatattatggtgacttacaaatttatgtctttattttgattttttatttctatttttattttaggtacacgtgcaagtttgttacatgggtaaattacatgtcatgattttaataccattttattcacatcttttatgaaattttgtctccattattttctcaccacctgaaacaatatgtctattctatgtttcatttgtcataggtaaaactaaccttgtctccaagtaaaaatttaattacaccttcctgaatctgcttggtcttgactccataaacaattgggttcatggtaggaggcagtagcagataaaggttggccacgatgatgtgtatgtggtttgggatattgtgtcctacaaaacgatgagtgaaaaaagtgaaaaaagcagcaacataggtgatcacaatggaacacatgtgagatgtgcaggtgctgaaggctttgtgacgagcatctgctgatgacaggctcataacagcctgcaaaatcatagtgtaagatacagagatacagcagatatcaaacacaccaatcaggagagcaaccatcagaccataaatagcattgaccttgaaattgccacaggataccttggccacagacatatggtcacagtaggtgtgggggatgaagttcccccggcaatagggcaggcgcttggtgaggagagtgaatgggatgatgagcatcacattcctcaagaaggtggcaagaccagccttggcgatgacagggttggtaaggatggtggcatagcgtaaggggtagcagatggccacatagcggtccagggccatgagcatgagcaccccagactccatccctgtcagcatatggacaaaaaacatctgggccaggcaggcgttaaagtcaatctccttgaggttgaaccagaatatgcacagcatattaggtaccatggtggtgcacaaggtgacatcagtgaaggagagcagggccaggaagtagtacatgggccggtgcagggcctcctcatggctgatgaggcagatgagcccacagttccccacgacagcaatgatgtacataaagcagaatggcagggagatccagatgtgtgtggcttccagcccaggaacgccattcaagataaagaatcctggggtcaggctggagctgttgtccccagacatgatggctgacaggaggagagcattttatactctttagcagccattgctttctgcctaggagagggagagggagagttagagacgagataagaggtactggtttggacaaagtgaacctcaagtgccatgtacattcaccttacattgataaccagaaattctttcttccaactatagcaagaaagactttgaactacagtgtccaaagtcactaagcagtacagtcttaccactactcaatgtgccattgcaaactttgattaactatcctcacttaccacacctctccccagcacaactcttatactgtactacattctgataacaaattgtgagttaggctgtaactgtcttcctccttcaataagtccatttctattctgtgctctcagaatcttcccattctaattgtacctgagtcttgtcactgaaatcacatgggtataattacagcatcaccctaatatgaccagttcttatcagtagcttaactttccgtttttaacaatatctcaaatattagcacttttcccctgccttgataacaaaaaatgcttgtattctatatataagatgtcagtaatgtcccacataacttactcaagataatacatagtagataataaaatatatgtgaatgagtgaatacatgagttaagaatttggtatgtctgatactcaaactctatctgatgtcaaaatcatgtttttctataccatggaatttgaaaggaagttcttgacaagaaacaggaagatatttacaattctaaatcattaacaagttttacgtaagtttagtagtgattttgctaaagatctaaattcaattaggtataaaatttggcttctctatcttttcacaagttccctatccattctcaatactaaatttacactcaaaaagcccttgaagttctgggattattgactgtttgtactgctttaatttagtattatttttgttataactgaaaggaagtcaattaaaaaatagcaccacatctttggattgctatttcttgatggagcagtagaaagaattgaatagtatttgaaggaatttatagcttcaggggtgtttgaagaaagttgaagtgtcctaattattcaattttttttttattcggaataaaaccctaatccttaagttctgtagtagaccccatggagcaaagccaatgccaaacattcctcactatctagcagaaatagatatacatttgcagtgtgatggcatggattacatggttgtgaatccacaaggcttagagttctgtgaccgaaacattctagaaatcactgcagttgtcatgtccactggctagagtacatggaaatttccaatgatggagggaaatgtaaagcaaccacatgtttcagaagctcgtgatctctgaatactacctgactggatctcatataaataatcccttcttataaggaagttctcacagtacctctccagaatgtcactgtttcaagaaaccatcattttatgttcttagacaagacaaacttaaagattaaaatttctagtgtctaccatcttttatgtgtacaccacattgaaatgaatggaatgaaaagaaaataagattaagtccagtggaagccacccagaaagaaaaagagccattacctcttaagaagtgaaagagaaagtaaaaaacattgccccttactgctattactttttaaaactgtttcagtgtatcaggctgttgcattctttgccaaaaatgtctttaccctttcctaaaatagggatttatgaaaattgaccaatctcacctcagtgctaggcacaatcaaatctctgtgcatggctgagaatctttaggagttgtttgaaatctaggatgacatcttcttacataaaattttttgtttccctggggaatttccaacaagatgccccaggctgatttagtctccacaattaggtgtctccgtgggttctgtttaaaagagagtgaactttgggcctgctggtaata

SEQ ID NO: 915184 - DNA, 4001 bp, Homo sapiens
cttgtaaaatgcaacatagtcaagaaggattcactaagtgaataaatgcaatttgacgactatagttaactaaatttcagggaagtacatgttttcttgtcagttggacacagaaaaataacagtaaaagttgagtttatattccttatataattggcttagtttatgagacattaatatgaaaatactatgttctatagtttctcacttgttttttaatttagataaatcttaaatattagaaatatatacctaattttccttattagattcacaattagagataaaatgaaacaagtagattttgatcccctttcatacaggtcttagaaaaaaattatactgttttttatttttggttaagatctctacctctctttccaggctctgtgctttttaaaaagcccctttaaagaaaacgaaatatccaattattctgttgtgaaataattatgtgacctattcagcctaataatattttagctagatgcttagagacttaaaactcattttagactttatggcatgcactctagattctccttcaggaaaatgtcattgaagaaacaggtttttggtagttatgagaaatatatagcacatgttttctagacaaaagtaataactggctattaatctgaaatattaatctgaaaattgtgatcattgaaaagaagactcacatcatctccttctacttagatttgtcttttcataaaaaatggactcattaggttttgtcgaataaaatatggtttaattattagactggtccttcacatgagtgagaaggtaaaaaatttatagaaatgttggtgggccttccaatgatgttgagattcccaaggtacttattgagaatgcaccagttaacaaactccattttgtgatcaatacagtgcttccagaaagattttatgaactcctgcataagaggcaaatagaagtaattctttccttctcttctcactcctggcaagtgttcattcacatgctgtaggatttggtatccttagaacctgaaaggatccttatgacacagtctcgtatctgtttggttttcaccccatagacaatagggttcatagtgggtggtaggagcagataaatattggctacaatgatgtggcaagaaggggggattatgtgttccccaaagcggtgggaaaagaaggagaagaaagctggagtataggagaaaacaatggcacaaatgtgggcagtgcaggtattaaaggccttctgccgagcatctgctgaggagaggctgaccactgcccggagaatcatggtataggagttggtgatacacagtatgtcaaagccccaaatcaggagggcaaccatcagaccatagatggcattgaccttgacattaccacaggacaatttggctacagacatgtggtcacagtaggtatggggaagtatattgcctctgcagtagggcaggagcttggtgaggaaagtaaagggaataatgagtaatacccctctcaggaaggtggcagtcccaacctttgcaattacaggattggtgaggatagttgaatagcgtaaggggtagcagatggccacatagcgatccagggccataagcataagcaccccagactccatccctgtgaaggtgtgggtgaagaacatctggacaaggcattcatcaaatccaatgtccttgagatgaaaccagaagatgcagagggctttagggattgtactagagcacataacaaggtcagtaaaggaaagcatggccaagaagtagtacatgggtttgtgcagggcatcctcatagtgaatgaggtagaggagtccacaattccctaccatagccacaacatacatagagcagaatgggaaggaaatccagagttgtgtgtcttccagtcctgggactccattcagaataaatgaagctggtattaggtctgttttattcagtgttagcatgataagtctggtaggttatgaaatagctcaaaatttgtctgggctttcctagagttaaaaaaaaaaacaagagaaaatataggttatttttactgtctccctctcccccaacttttaaaaattccataatgcattttaatggtccaacaaccaaatttctgagtgccaagaaataattttgtttgtctgtttagttttattgattgattaattaattgattcagtaaaaaattcttattgagcagtctaagttttcaacacagatgccaatcaaacatcaattattttataaaaagacatattcccaatctcatagatttataatcaagtataattctgacttttcaaatggtatttttattagaatatcttacttaactataactatactcatctcaatatagatataattttaaagaagagtcatttgattacctcactgatgatctgagagatgagatgttgactttttaatttttattcttaatgactgactgatatttattcttgggtactcaggcactgttcaaagaattttgaaattttaattaaattattactcaatgaagcttggggtctcaaaaattagtaaatttattgggtgtctatactcaataataatttaattgtatattttaaaataactaaaataatataattgggttgtctgtaacacaaaggataaatgtttgagatgatggatacccctatttactttactgggatttttttttttttttttttttttttttgaggcagagtcttgctttgttgcccaggctggagtgcagtggcgcaatcttggctgcaacctccacctcccggattcaagcaattctcctgtcttagcctcccgagtagctgcgactacaggcacatgccaccacgcccagctaatttttgtatttttagcagagatggggtttcactatattggtcaggttggtctccaactcctgacctcaggtaatccacccacatcaggctcccaaagtgctgggattacaggcatgagccactgtgcccggccctttaaaagggattattacacattgtatgcttctatcaaaatatctcatacacccataaatatatacacctactatgtgcccacaaaaatttaaaattaaaaaagtcaatgaagttttgattcaattttttcacttttcaagatatctttcttgttctttatgtatctagtcaacgcaaactagaagatatccaaatgcatacatacagaaaatatataaagtacttcaacaacatcagtaagaaaaagttgcaggaagaaacatacacttcaaaagagaaataaaattgccaatgaacaggtaaataggcacaaacttttatattaatcagaaaaataagtaaaaattgtatctctcatgacaaagcacctttttttggtatgtagtgacataccaaacaggacagctaaaatgaaaagaactaaaaataccaagcattggcaaagatgtagaacaactggaactctcatttactgctggtagacatgtaaattagaacaactctttattagatatctcataatgataaacatacacatgaccaccattgccatttccaacaaaactatgtatatatatttactagaatacatcaattagaatgcttattgaaacatgatttgtagtatagcctaaaactggaaaaaacctaaatgttcatcaacatcaaatgggtaaataaattttggtacattcccacaatgaaataccacgtaacaataagaataaacaatctatgactatatgcataatatagacgaatctcacaatatgtgttaattttttttagaaagacttaaaatagatgtaacatcttgtgatctttaaatgaaatacaaaaacggatcaaattattctgtgctattagaaatagaaaaatctttttaaaaagtgagagagagtgataactgaaaggcagtatgtggtagaagggtcctgttagttgctggtcatattcccttacttgatttggttgtgagatatacaagattcaggttgtaaaaatcaatcaacatg

SEQ ID NO: 915185 - DNA, 4001 bp, Homo sapiens
tggctggcttatttcatttaacatgctaatttccagcttcatccatgatgctgcaaattacagaatttcatcattttttatgatgccacattttctttatccacttctctgttgatggacacaggttgatttcatgtcttggctattgtgaacaatgttgcaacaaacatgggagtgcaggtatctggtatctcttcaacatattgtttttctttttttggatatatattgttgttctcatttatatgtgggagctaaaaaggtggatctcaaggagatagagagtagactggtggttaccagatgctgggaatggtgggaggaagagaggatgaaaagaggttaattaataggtactaaaatacagttaaaaagaataagacatagtgttcaatagtacagtggataactgtagttaacaataatttattacgtgtttcaacatggctcaaagagaatttgaatgtttccaataaaaagaaaagataaatgtttgaggtgatggatattctaattaccttgattgaattattacacattttatgcatgtatcaaaatatcatttgcacctcccaaatgtgtaaaactattatgtatcaatttaaaaaatttagaaaaataacacgtgatttttaaaaaaacaccattctactttttacttctatgaattgaactagttttagccattctgtaaggtttatatatatttaaaacattatgttatatatgacatatttaactttatgtgtcaatttaaataaattgagttaaactcattttttaaaaactggcaatagacaaaaattaagggaaaggcactgagatatacatccagaatgggctataaatttccccaaaacagtttcagaaaacatagactgagagagaaaatgtatgatactacacatgaataaatgtaaaatatcacacgtaagtttattctttgttatttttcatttatctttcttccatctgaattaagttgccttgaatcaacctgcacccttatcaccctggaagaactttatgacactcttgcgtatctgttttgtctttactccataaacaatagggtttagagttgggggaagaagaagataaagattagccacaatgatgtgaagagaagggggaattgtgtgtcccccaaaacggtgggcaaagaaagtgaagaatgctggaacataggtgatgatgatggcagatatatgggcagtgcaggtgctgaaagccttctgccgagcatctgatgaagagaggctgatcgctgccttgaggatcaaagtgtaagacaaagatatacaacaaatgtcaaacactccaatcaggagagcaaccattagaccatagattacattgaccttgatgctggcacaagatagctttactacagacatgtggtcgcagtacgtatgggagataatattgctttggcagaaaggcaaacgcttaaccaagaatgggaaaggaatcatcagcaatacacccctcaggaaggtggcaagctcagccttggcaatgatagggttggtgagtgtggtagcataacgcaaagggtagcaaatggctacatagcggtctagagccatgagcatgagcaccccagactccacacctgtgaacccatgaacaaagaacatctgggccaagcaagcattgaagttaatttctttgagactgaaccagaagatgcagagtgcattgggtagagtggtggtgcaggtaaggaggtcaatgagggagagagcatggccaaaaaaaaaatacatcggatgatgtaaggactcctcataataaatgaggtacacaagaccaagattccccacaaggaagatgatgtacattgtgcagagtgggagggagatccatacatgtactctttccagaccaggtattccattaagaataaaagatggaggagtcacatgaattgttggaaaccagcataatgaattaaatagaggcattctatttttccagaagtttcatcctgaagagaaggaattatgaaacaaatttcattcaaattttccttgcaaatacaaattcaaatttagaataaaattaagtttataatggcaccaacaattatacataagtgactatgaaaatatacaatgtattgaataatactgtattccagataacattttaaaagtttcataaacagtctaaatgtaattccatagccataagtaaaaagttgtattttttttaccacaaaataaaagtagaaactggggcgcagaaagattgaataatattaaatgtcacacaactagattcaggaacagaaacagtattcatatatgacttcaacattcatgcagtctttttactgtgcatcccggcttcacagaggacatatcctatgacagcatgtgaagcacggtccaaaatttcttcagtaaattaatgttgtgtgccaatacacaataggaagattatggttatttctaccaaatagcacattattcatatttcagttttttctatactaactgtgtgacttgataagctttatgtcactctccaagcctcagttgctcatcttaaatgggaagcaggtgatacctacctcaaagagttctgaaaaataatcagaaatttatttactcttaggttaatattctgatggattagatatgctgattattcaaaatgcaggtatagattcaaaatggatataaaatacaggactaatgaccataaatgtcaatctgatttgatggttacaagaaggaagaagaaagaaacctctttttctcaagtaccctataatccttcaatgtcattgagattatctattttctttccatatcttctctttttatataattctcaagaagcatattatctagactctcactttattctctttttgggaaatgtttttactcttatgacctcaagtataaccaacatgaagataattttcagataattacttgtataaataagttatgccacagctgttgagtccttctaaatgcatgacgactattttcatcagaaatatccataaaattttacatttattatgtctaagactacacttattgctttaatctctacctgtgcccaaaatagactttacctctaagttctgtcttttggataatggtgtcattatctactacaatacctaaactagtgtatttatgatcttccctggtatttctccacctcatcttggatataattcatttacagctcaaagggtccaaattgttactccacccaggtcacatcaacatatctattttctgtagtctatcttcagaaaaaaaacttttaaatcagaaaatttcttatatcagctctttctttctaacaccactttcagcgtaaagaccacctagccacatccatttatttcttggcattgcctctttagtatttcataagtgaaatttttcctgtagtacaattttgaagatgttttaatccactgcttaataatcttcaatgtcttcccattactttgagaacagggctcaaattccttggtatgacatttaataaaaggaaatttaggtcttatcttttctttcctgttttatttctttccattttctaaccacttataagtatcctggcttaaacaatgcattatatagtcaatgtagtttagcatttcgggtttaaatacttgctaatcccccccagatacatatacttaaagtctatgttgacttttctcaatttctttcatttatttgcaaatatctctgcaaagtaaagaatattatagctgaagtaaattagagactagaaaaataatagaaaagattgacaaaaataagagtaactttcctgaaaacacaaaatgaaaattaacaaacatttagctagattaactgaggggggaaaaaagagaaaactcaaataaataaaatgaaaatgaaaaaggagacattacaactgatacaacagacatacaaaggttcataagagactactatgaacaattatacaccaataaattgaataatgtagaa

SEQ ID NO: 915186 - DNA, 4001 bp, Homo sapiens
aaaaagtgactggaggacaatttgctatctgtataacaaatttatcttatctgacaatatcctttacaattttaattatgtagggtgataaaagaagtccttgggactgagaggtatggtattgtattcaattttggagaaatgagataaaaatggacctggacctgcaaaagccatcttgtgataagtactaggtgaacatcacactgtatcacataaatatgtaaaatcatttttatcaataaaaacataattaaattaaatttaaaaatacactaaagtataaaaatataatgaaaatgccataagcatcactactccaagcagctattttttatcatttggatatatttcctgaattcctttctttacgtacgtattccagtatagaattggtaccaagccttatgggcgatagtttttcttttcaatttaagattatatcttgcttatttgtcaaattttcagatagtcctttcaaataaaatagttaaatggcacctgatattcaacagagtattgcttcatctgtaatcttataggacaatatttgaatcattttatattttgtttttataaggcatgattttatgcatgtctttgtacatatgcactttatttttataaacatattctcagatgaagaaatatatgtacttttaaattatttgatgtaaatttctaaatttcttttaagcaaagtgtacctacttctactgacagtgtaaaaacaacttttttaccttaatcatctgtgggagatgacattcttttaaaatattcactgatttaataggtaaaactacttttattgtttccatgtgatgatgaatatgtagtcaacaaagttgttcttatccatcacatctctcaggtatctcttttctaggtaccctgaaaattgtttctcttgcctctagagggttgcttacctctgagccagttatttacagagctgacttagtgataataagtaatagcctgtcaaatgttcattaatgtccccacattagtggggcaatgtaagtgatggggatacactgaccctttgctcaggggatgtttccacaacatccttggataaccctgtccccgatctgtttggttctaactccataaatgatggggttgagcatgggaggtatcagtagatagagattagcaaacaggatgtgtacaactcggggcacatcatggccaaagcggtaggtgaggaaagaaaaaagggctgggatataaagagccaagatgacacagatatgggaggaacgtgtgctaaaagctttgaggcgggcttcacctgagggcaactgaagcacagctctcaaaatcatcacgtatgacataccaatgacaatcatatcaaagccagccacagagaaggccacaaagagcccattcccacgacttatgcttgtatcagcacacaccaacttcagcacagccatgtgctcacagtatgactggggaatggcttggtgttggcagaagggcatcctagacaccatgaagcagaaggggctcacccacagcagccctctcagcatcacgatggtccccagtttgatcacgaccgatggggtcaggatgctagagtgtcggagtgggaagcagatagccacgtagcagtccagggccatagccatgagcaccccagactccacagaagaaaaggcatggatgaagaacacctggatgaggcaggcatggtactgaatctcatgagcatgaaaccagaatatggccaacatcttaggttgagtggaggaggagaggaccaggtcagtgatggccagcatggccagaaagaggtacatgggctcatgcagggtgtggtcaattctgattacatggaggagagtgatatttccaacaacagccacagcatacgtggcacagaacggaaaggcaatccacaactggaaactctccaggcctgggattccaagcaggatgaaggacacaggatgagaagagctgttccctgaagccagcaccatggactggttaatatggtctctgctgggaacgcaatctactctctgcagatgataacaatcaaaacaagtgttattattatatacaaggcttttggatgggactattggataccagggtgattgggtttgattataaactagaataatttcaactgttttaataaataatatgttacaacatgacatgatgttactgttgtttttcgtacttatgtcattcaaaatggggtagaacatactagttgcatgtgtaactgttttttaagaatcaatatttttcttgaccaggtgtggtggcttacacctataatcctagcactttgggaggctgaggcaggcagattgcttgaggtcaggagttcaagaccagcctggctgacatagtggaaccccttttctattaaaaatacaaaaacaaaacaaaacaaaaaaaaaccccattagccaggcatggtagagcacgcctatagtcccagctactcaggaggctgaggaaggaaaatcacttgaacccaggagttggacgttgcagtgagctgagctcacaccactgcactccagcctgggtgtcagagcgaaaccgcctcaaaaaaaaaaaaaaaaaatgaatcaatatttttcttgaaagtagcatctgctaagggaaaatcatcatgacaagtaatattatagtaattcttgctcttcagttctatagaactaacagctgattagcttaaacttttccacaggtcctttttaaacctctggttagccacttggccaatttctcagagtaggaagtcagtagagtttgcaagcctatagcaatttatgtattgctttgaagttagctttgaatctaggtcagttaccacaagggcttgggtgggaagttaatctactgaccaattgtacatttataatttaatttattatctttagtgtaggtttctcctagacaagaagttagcaaactttttttctttaaaaagtgagatcacaaaattttgagaaattgtggcctatactgtctgttgcagcagatcaattcagccattgtagtgtgaaagtaaccatagtcaacacataaatgtgtgagtgtggtgtgttccaataaacctttgtttacaaaaatgggttgcaagcaggtgttggtttccaggctatagtttgccaacctctgtcctagaagaggaatttttcatgaagtcagctgtgaaccccacactatctctagcatctctgtgcttggtgcagagtaggaatttaataaaatattcctgaggaaagtagcaaataaatgtcattattcaaaggcagcagactcattaactgattaacaatattctaaatacccagacagagccctattgactaccttgaggccatagaggttgccctgctacagtagatactgtgtgagccccactgtctgtctctattcatcttacctgagtttattccactctttgagttttttggtgatcactatcaatctcagaatcgatggcacaaagctcattttgttcttacccaacactttttcactaaactcagttgcctgtgctttgtttgaaagcctcagttcttaccaccttcaaaagagaaacacctgggcaagaaaagtatgcatttaaatacccatcacctcttggaactaatacatgtctcattcactagaaaaaaaaaaatcctgaaaagaatttcttcaagatcccccaaaggccttatcttttcctaaatttctcttacatttgctgaggagtgctttaattccaactatgtggtcgattttggaataagtgcgatgtggtgctgagaagagtgtatattctgttgatttgcggtggagagttctgtagatgtctgttaggtccgcttggtgcagagctgagttcaattcctgggtatccttgttaactttctgtctcgttggtctgtctaatgttgacagtggggtgttaaagtctcccgttattattgtgtgggagtctaagtctctttgtaggtctctacgga

SEQ ID NO: 915187 - DNA, 4001 bp, Homo sapiens
tagtattaaagacctttgttatgtaatgtcccttccagtgtggtgtcttagctgaaaatgaatcccctgttgggcaacaccaccgcacttcctgttcttgctgccctgacagttacagaagtgtgaaatgtttcatttcatcatattgcactaacatcatgtgcttctaatgatgttggccaagacaaatgggggtgcctatggggattttatctggggattataccttcttgttgagggtgcacagaagggcagattgacaagaaaccatagtaattcagcctcaggcaatcagatgatgtggctgcagtgattttctgggatatcaacatttctttcagtggacccctgacctctgcagctgcagtcacaggggaagaagttacagctgttaattttgggggctttggtgggagttgggggaaggaagaatagtaattacacatgagaccaaaagaggattctttgaatttgaagtggccaaattggtaccacagggcacattatttagtttatcggaaggcaggagatgagcctgtagaactcgtttcctgagggcagtctgaaaacagaatctggctccaggagtagagagggctgtgatttcagacgggtgcccaagcacttgactccagggacagcgccaccctctgcggcagtgccaagcacttccctcaagtttgggatctatagaggagcttttgtgtggaaacgtgggcagacttaggttgaaataatggaggtggggagcaggaaagggagttgttagatcttgtttattatggtccttcactaatttttcctgcatggtagtgtagccccctgacctctacctcctgcctcctcccaagcagaatacatgtttaagtcaaagtctacagatgccagtgttgcacatagggactccacagcaagtacctgttaaatgatgataacagtcatatgcagtgggatgaaaataacatgatccacacccccagactcccctccgattgtcccctcacctccactcttaggctccattgttaccactggacattacaacgggctttttctgaatgtgaaggtttccaggagtcggtctctgatctgcttggtgcgggccccatagatgagggggttgagggcaggtggcagcagcaagtagatgttggagagaaggatgtgcacaggctttgggacagtgtgatgaccaaagcggtgtgtgaggtaggagaagagaccaggtatgtagaaggccagaatgacacagatgtgagaactacatgtaccaaaggccttggcatgggcctcccgggtaggtagctgcagcacagcatgggcaatgagtccataggagccagtgatacccagaatatccatacctgagatggccagtgaaagtgccagaccatataagttggtggcctgtgtgttacccaccaccagttctaccactgccatgtgtgcacaataggtatggcctatggtcttggcttggaagtgctcaaactttgccaccagcagtgggaaaggtacaacaatagccacagctttcagtgccagggccaaggctgcataacccacacaggctttggtgaccaggacagggtagtgcagtggacgccctattgccgcagcacgatcacaggccatggccaaaagcacacctgattccatggcagtcagtgcatgtacaaagaacatctggaccaggcacacagcatatggcacagatcggggcccaagccacagcacagccagcaaccctggggctatagatgtggctaagcccaggtctgtggctgccaggatggccaacagtagaaacatgggctggtgcagtgtggagtctatccacaccactgccggcagtgctccattgcccagcagggccagcagataaatgggcccaaagaccagtgtcagccaagtctgggcacttcctagccctggaaagccagtcagtatgaagaagtttgggtgtaggaaggtggaattgagttgtagagtttctgccattctgtggtgggcacaacttgagggctcatgggggcatgactcctgacagggaagataaggggagagattttgggggtctcacagtggcacaaacccatccatggcatacgtgtaggagtagtgcagggctgggaggatcacaggtttataacttttggttaggggggtttggatggataattaaggtcgcaattctagctaagataggagaatcctttgctcctaaaagtctatatgtattgtagtgggaggaaggggtagtgaggaagaggctgcctgctgcagtggttggtatagatagcctgagagagccttctaattggatgtcagcagagggtggagtggagatgaatacttttcttcctcagggtccaaatagagtcagtctcagtctctatatgaggagaaagccagtgctgggggcagggtggggaatcaggcttccggctgtcctgtccctgcctgtgtatccttgggcaagatctctggacctcagcttcttcagctgtataggcctggtgggtacagtgatattaaggtttgcccagctctgagcaattgcccattctcagcaccaaccatccaggaagagaggaggcagagtataaagaaagggagaaaccgtagtgggaggcagatggaatctggagtgaatctgggagcttggtgtggcaagggaaaacttgctgggtttttggggtgcagggtgcttacgttctgaacttgatgctgaacaccagctggagagttgaagttggggctgggaagcaacagagagagagatggcagtacgaaacgggacttttcttctccgtttcctttccttcttcacggtacaaaagtgggtcccactagagtctcattcctggcatgccagagcgagtggaggtgacatagagggagaaaatggcactcaactcagagtagcagccatctgaggaagaagcatctctgacattggaggaggcaggacaagtagattgacttaggtgggatccagcccacctaagaagcttaatacatgttgaatggataaatgaatgaggaagaaatcaccagcagaaggcttgactgggaaagatctcgagcactgtgtgttggcagcttctcttcgctttaatcagtgcctgtggggctctttatgtggctgttctacctgcttccctcagggcctttctccctcccacctgtgccacattaactctgttttgtatctctttgctcagtgctgatgggctggtgactcaggaagtagagtaaggaggcagagatgggggcaagccaggaaagagactatcaggtggaaagatctgggcaaggaacactttctcagggaggtctttgctggctcactgaagtccgggagaaaattccttggtttattctttaatagcatctagcccactctgttgtaatttcttgtctctcaattccccacgagacaaaaagagttgcagatattgctttttattagctacagtgtctctactgcttaccacaatgtctggcatgtagttagctatgaataaatatatattgcttttaagtgtgggacagactgctagtccaaacagcttttgctgactaataggggctcctacagtttcaggagctttagatatccatgaagaaaaagaattattcaccatcaaccacaagtctactgaatacagttctttctattataaggagacttaaactcaccacactatgtaaagtcatacaataaagaccacagggcctattggaaaaatgaagttaggggcacaacactcaaaaacttcatcagtgacacatttgaaaaaaagatgggctgggcacagtgtctcacacctgtaatcccagcactttgggaggccaagacaggaagatcacttgagcccaggagttggagaccagtccgtgcaacacagtgagagcccatctctacaaaaaaattaaaaaaattagccagccacagtggtgtgcactggtacttctacctactcgagaggccgagg

SEQ ID NO: 915188 - DNA, 4001 bp, Homo sapiens
acctctttccaagtggaggtttcttcccatagatactgtttatctgttacttgaacctcctttttttcatcattgtctccaatacccacttaaacaattgtttacattaaattatctgtaaataaccagtgtaaggttttttttcacctaactggaaccattattatccagaaacctgacactatgacatatctttccacattcaactacagcacttgggcagtcaacagatcaagtaagacttgatattcagttcactgaatgtgtagcttaaacatatagggaaagtggccaacacaatgtcctagtcagctttcctgtttcctactctcttagggtcccctctacctgtctgcatccatcctcactttcaagactctctctaaggtgatgaggctgtataggatagaatagaaagctgacattgctttatattgttataaagttcttttcttcttgcccagcagaagttttgtcaagcaagactctgccttctctgagaagtccctttggtctcaaagaagtaagaataggcagaaaatacctgtcgacatccagaaagacaaaatacaggtcaaaggaaagcaaaggctggtcttgagcttcaattgcaattgatgaggcatttcaactatgtagaaagagcctaggttttattgtttttgcttcccacatatgtgatctttggtcatttcccttcctaaaagcatctctttttctactatgtgaaatgaaagtaacaatgcctgcagagatgtgttgaagattaaattacttaaatgtaactgccaaggttcaaagcagccactcaataaatacgagtttcttccccttgcctacctccacctgaactaggcaaggaaagtaaaggaaggaatctggttcagtaatgaagggagcctcagtgcatgcaataaacactcactaactgacatttctctacttcgctgcctaggtaaaatcactgaagaggaagaacaggaggtattagaaatgctttacatattcacctccctctctgcagtaacttctgaattccctgttttatctctttggtccgaaccccatacacaatagggttcaatgcaggaggaataaggtgatgaaggacgttcagcaggatcaggatgtccatggggaccttctttctggccacgtttgtcaacaccacaaccagcagtatggtgctgaagaaaagaatgaggatgaagtgggagccacatgtgctcagggccttcactgccgccccctctgctttgaatctaagcacagctcttagaatgaaggtgtaagagaggaagatgaggaataaatctgagcccagcaaggtccaaccagccacaaattggtagattctgttaagggtgaaattatcacaggagagcctggacacagacaagttggcacagatgcagttctcaatgacattttccccacagtaatggagcagggaagtgaggataggaatgggtgcagtaagaagcgcattccgcaccacaatgaagacactagctttggccacaaattgattagtgatgatggatgggtaccgcagtgggtggcagatggccacataacggtcataggccatgaccataaacgtgcaggactccatggggaggaaactgttcatgatgaacatctggaggaagcaggcagggaagctgatcgacctaagatcataccagaagatggccaggaccttggggatgacggtgaggcagagcacgatgtccagcagggagaggaggctgagcaggtagtacaggggctggtgcagagaggcctccagctggatggtgatcaggagggtggtgttagctcccatggccaggaggaagagaaggctgaggggcagggagagccagtgctgccaactctggaagttggggaagcagatgaggaggaattcagagactgggacagtggagctgttgctgggtgacgccataggctgaatcatgagctgagtaggcttctgatgactatgtttatgggcagatacaagaggttatttttacaaattgctttgaaaagtatccctttcacttactctttaggaagccaatgataggtagttcacttttgccaagtaaggcaaatttcagccaatattctaaaggtagaattgtgagacttgataaataatggtgtggtctatgaagaaaaatgaatgaatgaaaaacctatgaagtttaaaaaaaaaaagggtagtgacaggcagtaacctcactatatgttaaaacatattacaaacacgcaacaaattaggccagtatgttaccagtgtaagaaaagcaatggtagatgataagttttttaataaatcattttggagaaaaatagctttaattaggtctttgctttctactatacaccaatataatttgagatggatatttttgttacatctcttacccaaactcatggtatactagaagaaaatagaatataaatttgattaagtcatccctttgctaaaacttcaatctatatgaatataactattcatttcccacaacctgagcctgaacatcctagtgctcctggaataaaactgaaaaaaaaaaaaggaaagaagaggctagttttactataaatttgtgatcattaaccttaaatgtgccttcaataaatattgcaccctacaaatcttccctaatcaactttctcctctagaaaaaattatttcccaaatgtcttcatttttttcaaacctgaaactctacttctttcagaaggtgacatcaaataccacgtcatggagaaagtagaaagtaatcagtaaaattttcctcaacttttcaaaataaaatctacaaatctaaaatcatagtgagatacatattaccctagtcagaatggctattatcaaaaatacaaaaaataacagatatttgcaaggatgccaacatgtataagggaacttttatatgcaattggtgggaatgtaaattagtacagcctcaaaggaaaacagtatggaaattcctgaaagagataaaaatagaactacccttacatccaaaagtcctactactaggtatctacctaaaagaaaagaaaacgatatatcaaaaagataattgtactggtatgtttatcacagcactatacacaatagcaaagatatggaatcaacccaagagttcaacaacagatgataggataaagaaaatatggcatacacacaatggaatactactcagctattaagaagaatgaaatcatgtcttttgcagcaacgtagatagaactggaggccattatcttaaatgaaacaagccagacacaaaaagacaaatattgcatgttctcactcataagtatgtgttcaaaatgtgtacatatagatgtagagagtgaaatgattgacaatggagactcagaagggtgaggcgggtgagagggggtggataatgagaaattacttaatgagaataatgtacatcattcaggtgatggataccctaaaagccctgacttaactactatacaatctatgcatggaacaaaattgcactttgatcctataaatttatataaaattttgtaagacttataaataatgtgtatatactctcatccttttcttgtttcctttcattaaaataaataatctgtccatcttcaagaattgatcccatctctcccagctttgaattctggctctttctctaactctccccttcccttcatgcacaaacctctcacaagcatttacactcactgtctccattccctcaccttacatccattccacaactcacttcaatttggcttccatctccattagttccacaaaatagctctcagaaatcacctacagcttccctattgttaaatcttgttgaaacagttgatcaaatcctcttccttgaaacactctctttggcctaattcatatatcacagacttctagtttaccttgtacctcctggtcactccctctcattttctcgaacacatccatcatccactaccttgacgtcagtttaaag

SEQ ID NO: 915189 - DNA, 4001 bp, Homo sapiens
tactgcccatacatatcttttatcccattcctcactgctctacagtttagaagaatgtgttctggagtgcatatttgtatttttcctacccaaactttgaggtcctcaaatcaacaacaatattctttttatttttgtttcttaatagctaacataattcacaggacaccatgtgtgcttagaagctgtccaattaatgagaaaataatgttcaggaaaagtattttaggtgtcaatattattgctagattgtatgctctaataccagcaatcttttgactcattaataaagatttgtttgcatatcaaaacctgtgatatattggatctgaaagataaatgttctaagcacagacacattggggaagaggattcaagaatctcatatatccagtaaaactcattgataattgttactcatgaggaatcaaggcaaaacccttgccctcttgcaatgcacattacaaaaatttacttgtcttccagagaaagagaaggagagggagagagaggaggtgaggggagaaagagaactagagaaaggcaatgatgtggttgaagggtgagagaaaaagacctacttacagaccagtagcaactttccaccactgaggactgaaatttcaactactgtgtttttttctccaatgtattcccttttctgaaaataagaataaaaggacattacacataacagacacaacaaaataaccgcagttgtatttttaatgatacaaaattcatgacatattgagttgtgtgttcagaaacatacatttttcactttaaaatctgctttaaggaatgtcagtgttttggacaaaatatgattataagcatggaataaaacgagagagggccaagaatatttctgagaaaagggtgaaaaggaagatagacttaaattaaaaccgatgtttttgaaaagcacacacaatatctagtgtacccagtttgaggttataagtcacagatatgaatttcagcccactcactcattaagtgattaataaattatcttattttagatattcagagatccagtggtccttgttagcaccctttcttcaacaacctctgcattccctgcttaatttcttgggttctcaccccgtaaatgatggggttaagggctgcaggaatgacatggtggagaacattgagcaagactggcacatcaggggagactttcttcttagccacatgtgtgaggacaaaaaccagaaggatggtgctgaagaagaggatgagcatgaagtgggagccacatgtgcttagggcctttgccacggcaccctctgccttgagtctcagcacagctcgcagaatgaaggtgtaggagaggaagataaggatgaggtcagatcctagcagagtccagcctccagcaaattggtaaaggtgattgatggtgacatcatcgcaggagagtctggaaacagacatattggcacagatgcagttctcaatgacatttcttccacaataacggagttgtgctgaaaggatggggatgggcagagtcataagcacatttctggtcaaaataaacatggcagccttgactacaaagtgatcagtgatgattgatggatatctcagtgggtggcagatggctacataacgatcataggccatgaccatgaatgtgcaagactccatggctaggaaacaattcatgatgtacatctggaggaagcaggcagggaagctgatgggcctgaggtcaaaccagaagatggtcaggaccttggggatgacagtgaggcagagcacgatgtccagcagggagaggaggctgagcaggtagtacaggggctggtgcagagaggcctccagccagatggtcatcaggagggtggtgttggcccctacggccaagaggaaaaggaggctgaggggcagggacagccagtgctgccagctgggggatctgacaaaacaattcaagaggaagtctgaagcttcagtggagagggtgtcatttcggtgtgttgtcatattttcccatatattttactgctttctttcagtgatctggaaaattatgattacaaactagctgtggattcttgatacacaaagatagcacaatttgtttgtcataggtacaacttgtggtttctagcaggttatgtagagccaagcgaattcatctgtttttcctcagtgtcatgtcactggggtattcctatcactttaaacagtacagctgtctgaggtgacatgattcctctatacatgtttactttattcaatgtccattttcaatagaattgttttttttagagaaactaaaaaggagaaaacacttaggaaacaactttagtgtgacaggtgagactctaaatttctacccataggtttcttcttcacaattttctttttaatgtacacatagcctaccatatctacaagttgactattgcaataagctcaaataaatagcagagcctggcacaaggaagggactcagataaatgtccctagtccccatgtccccatgacatccttattctaacctttctgctgcacttattttgcttagagattttttaaatcatacatctaaaataaatttagttaacttgtattttgtctaaaagttcatttttatttagtaggcataggttccaccaaataattgccttaatatctctctattttttagatgttcatatttttaggcttcctaacttttgggagaaacagctttaaaaggagagtgggcacttccacatagctaacagggagaaatgcttgtcattagacatgatgaaaaattggttcttcttattgtaattgtgtgagggtgacgaagttcacctttaaagtccttccgtctccttccagtttccttttccatcttgactgtaatgatatagccacacatttccctctctcctgacagtagttcagtgttgccattattcccttatcatttaaccctcttccctggcattctgttaggtaccagcatcacaaaatttaataagaaactgtccttattttcactaaaacaaacctataactactctgggagatgatgggtgtaacgagaatgaatgatatgagcaatgtcagagatatgcacaaattattaggagactgcagaggagagttgagtgtgacataggggataggctggaaaaatatcattataaatagggtgatgtggtacccacatttacattaaaggtaaaggattctaagattcccctcccctgcattgtgaaagacagcccatagaaagaacactgtagcttggcaagggtgtaggtcaggtcttcagggggccctccaaatcatgcagttttattgtgcatatttctgtctactgggacagaggtttctgttcagatgttattttgtaggtttaaaaattcctttctatcgcttctcagccttttggctaagatcaagtgtgtgaaattccttttcatcaaatgtttaagaaatgccctgtttctcacactttggctcactaatataacaaaattatatggttatttttgtaattctttctacttgctgggaactgtgctctgttttagcacttcatcccatttagttattcaacattctgtgaaatatgtttcattatcaccacttacaaacaagggaagtgatatttcaaaatccaggttcttaactgcccatatgttattattctaatcctaatcttacctaatatagaggttgggttggattaatttctagggttccttcagacccaagaaataattttttttttttttttttttttttatatggggtctagctctgttgccagactggagtgcaatggcgtgatctctgctcactgcaacctccgcctcccaggttcaagcgattctcccgcctcagcctccagagtagctgggattacaggcacacgccaccacacccagttaattttgtttgtttttgtggttgtagtagagatggggtttcaccatgttggccaggatggtctcgatctcctgacctcgagatccacc

SEQ ID NO: 915190 - DNA, 4001 bp, Homo sapiens
aaactgttggcagctttgccagccacagctcaggagggaggatgcagcaaacagcatcagagggaatgaacaggatggctcatttgtgcctaggatggggacttcaaggtgagataggaactaggattataacgacatgaagatgaagatgatgaagaaaagaacatacagcacttcaaacagtacaactcctccccaacctaaaaatcctaaaactttatcaacctcatttacaaaccaaaaactgaagaaagaaaatctaagtagagagaaagaatagaaaacgctgccctcagagaggtggtacagactgaatatcttaattgggtctaggagaattttaggagccagtgaatagcacatctgcctcaggtgccatggaagagagtcggggtattcagggcaaggcactcaaccccaagttgttccagggtggacatctggacttaacccaagccatgccttcatcgcacacaagccaggtagccgtctaccaggctgaatcagagacagggaaggaatcagtgtcatttgcaaatcaaaaaacaggctgatctttttaagggcattatataaagtttgtttctttagtggtcaaacacttccattctaatacagctccatttgtcaaagtcttggcaagattctttgttgcagattagatcaggaaaaattccaaagtaaccatagaatccagaaaagggaggtttcctttcaagcaacagaaaacaaagattcacaaataaatgtgttcattgttgcctgagatattgagaacagaagaatccgaactcaggcaggatttaaagtgaaatttcctttccaacataaaattaattccctatttcccaattttcactaacaattaacaactctaaaggtggatctaatcctttttattcttacaacctcttcagcaggttttggattccctgcttgatctccttggttctcacaccataaacaatggggttcagagctgggggaatgaggtggtgcaggatgttgagcaggatggggacatctggaggaattctcttcctggccaggttagtgatgaccagaaccagcaggactgtgctgaagaagaggatgaggatgaagtgggaaccacacgtgctcaaggccttggccacagcaccctcggccttgatcctaagcacaactttcaatataaaagaataggagataacaataaggataagatcagagcccaacagagtccagcctgccacaaactggtagagctgattgaaagtgatgtcatcacaagagagtttggacacagacaggttactgcagatgcagttcttgattatgtttcctgcacagtatctgagcctggcagaaagcatgggaacaggaagagaaacaaaggcattccgggctataacaaagaccacggccctagccacaaactggtcagtgatgatagacgggtatctcaatggatggcagatggccacataacggtcataggccatgaccatgaacgtgcaggactccatggtcaaaaaactgttcatgatgaacatctggaggaagcaggctgggaagctgatcgacctgaggtcaaaccagaagatggccaggaccttggggatgacggtgaggcagagcacgatgtccagcagggagaggaggctgagcaggtagtacaggggctggtgcagagaggcctccagctggatggtgatcaggagggtggtgttagctcccatggccaggaggaagagaaggctgaggggcagagacaaccagtgctgccagctctggaagttggggaagcagatgaggaggaattcagagactggggcagtggagtcattgctgggagatgccatgtaaagtttcctgatcaatctggagacccagtgtaccttaaaacgtagtagagaagtacagaaacataaaaagtacattctagacgtagtagagtgtgggtttccactgaggccctgtatctgtcccaataaagtttttaaaatcactgtcatcatcctcccttatatttaaccaagtatgtatcatatgccagccacaatgttttatattcattatctcatttcatccttttaaaaaatactaaggagtaattaatattgttatcctaatgttacaggtaataaaatagagataagggaaaattgtaagaagaatcttctaccaccacgcagtttaaaaaccagcaatcacaagtatcatttattgttgtgcgtttatatgatttcagtacactttactaatatttactttacaatgattttcattcattcattcatttctcaacccacttattccagttcaagtttacaggtgggccaagcttatcccagcagctttgggttggttcccagaagctcagggaaccaggacgccattgcattacagggagcactcacacacacaaccactcagtcacactgggacaatttagacttaaacagtacatcgttgggatgtagaaggaaactagagtacctagaaaaaactcagggagacatggagagaacatgcaaacaccacacagacagtggcccccacctgaaatccattttttttccttgtcagtgttataatgacacaacgttgtgtgaaatgatgttacatgaggacctgctgtaatcaaatgagctgaagttcaccaaagatggaatagaagtcagagagtgagttttaggcaagtaaatatatgcaagaacccacttacctggtaagtaaaattacctattcttccttgtgaccaggatccaattatccttagcatatgtaatctacattctgtaaactcatctgctttgattacagctgtttcttttgtggggtatcatttgttttccctgactactaaacaaagagaaagaggccaaatactaagaagggtaacagcaatgactgtcacagtcaaagaggcagaatgtagccagggagtcattgcaggataagagagggagactagctttgggaggccaagggaggcagatcatgaggtcaggagttcaagaccagcctggccaacataatgaaacctcgtctctattaaaaatacaaaaattagctgggtgtggtggtgcatgcctgtaatcccagctacttgggaggctgagacagaattgcttgaaccagacctggggggcggaggttgcagtgagccgagatcacgccactgcactccggcctggcaacaaaatgagactccatctcagaaaaaaaagaaaaaagagagggagattaggaagtgtgtaatcagcatagctacaatgactgatctttcacccctgtcccatctgacaggtcttctgtaagaggattgaggtgtgcatgagaagatattagaagactttagctgccagagaagataatgtaagtatttatttaatccaagaattttcaccttgaatattccagactttctaaacataaattatacaatatacattatttaaaaaaatttacccattgtagggccttaaaacaaaccaagaattcaggagttaaaactggaataggcacaattatgcatcagttctgccctgcatttcaatatctgattaggaaaatgaccctcagtgtgaatttgagaaatcagattgaactaattcaccttatctgtaaagccttctcctttccaataatctcaagtatagctactctgaatggcttaatctatttgaacaagtgagaaaatagtgttttcttagttcctcgtcagaatgctaaagacagcagtacgttgcataattaagcaaaaaccattatcttttgagagcttacctaattagtagagaaaattgacttgcaaacatttatagtgcaatacagttgtggctctaataatgacaatcataaaataaggagacaatatttcacataatgaagcagtgtaatgtggtttaaaagttagcctcaagcagaaacaaatgacaattctggctcttatactgatcatgtaaacctaaaagctatttcaattccatattgcccagttttctcacaaatga

SEQ ID NO: 915191 - DNA, 4001 bp, Homo sapiens
gtgctctattactaaccaaaaaggggcctagctactaaatgttacttaatcccaggaaatattggtcagtatataggtcctacctatatactgatcagagcatgatcaggataaaaattgcaaagtgtaaaacatacttatccttgttctaaaaactcactaattcagatgtctggatcctatgggaagctatgctggccagggacaggacatgaagattgagacaagaggactgaaagtaggatgagaaagacggtttaactgtatatctaagacaaataggaaagagtaggaataagatggtgtcagaaatctgatggaaaagtcaggtaggatagtatgaagtcagaagttggtaaaatatatcttaaaaaaggacacacagattcacttaaagcaacacacacacacacacacacacacacacataaatatgagtcattttaagatgtaaaaatcactaggaaaaaaaactataagaaattcacactccaaataagtagcattagataaaaatattaacaagatctgtcaaggacagaggaggcagtgaatgtcacatgttattcactctacataagaatcaaagttcttgagtcaacatctatatgtccacaagagatccattcatggcaaaaaaaaaaaaaattattcacgttgagctgagtcagggaaaaccaagacatctaacacatatgtatgtattaaacaatacaggaattgagaaacatttaaaataattggaattatatttatcctttgtttgaaaaccatacaattctaagctccagtgattatggcttgtcaattcgtactcacatagatgaagtcaagaaaaacttccaaacaattctagaatgccaaaacactaagattccagtcagtgaaacagaaagcaggatccaacgagtagatatccctataatcaattgaaacactgaagaaagccaagtctaaacttattctcgcagtaacaatttaaattttctatgcatcataacaattattctccaatatcaatttctgttttcaaggtcaggttgcattcattttattttttacaacctcctcagcaggttctggattccctgcttgatctccttggttctcacaccataaacaatggggttcagagctgggggaataaggtggtgcaggatgttgagcaggatggggacatccggaggaattctcttcctggccaggttagtgatgaccagaaccagcaggactgtggtgaagaagaggatgaggatgaagtgggaaccacaagtacctagagctttggccatatctccctcacccttaatccttagcacagttttcaagataaaaaagtaagagagaacaataaggatgaggtcagagcccagcagggtccaacctataacaaactggtagctctgattcaaggtgatgtcatcacaagagagtttagacacagacacgttagtacagatgcagttcttgatgatgtgtcctgcacagtatctgagtcgagaagaaagtatggggataggcatagtaagaaggccattcctggccacaacaaagatggcagccctagcgacaaattgatcagtgatgatggatgagtactgtaggggcttgcagatggccacatagcggtcataggccatgatcatgaatgtgcaggactccatagtcagaaaactgttcatgatgaacacctgaaggaagcaggcagggaagctgattgatctgaggtcaaaccagaagatggccaggaccttggggatgacggtgaggcagagtacgatgtccagcagggagaggaggctgagcaggtagtacaggggctggtgcagagaggcttccagatagatggtgatcagaagggtggcattggcccccatggccaggaggaagaggaggctgaggggcagagacagccagtgctgccagctctggaaactggggaaacaaatgaggaagaattcaaagactggggaagtggagttgttgctgggtaatgtcatgaaataaatcctcagctgagaaaatttcacctgaaattgtgtttgataagacacaggaattagaaatagaaaacaaagctgttaaaatatttgctaacattttctaatttataaaatgtatgagatacagatgaccaatcccaaatgaaggcaaagtttagtaaatattaacataaatagtgaaaggtttagtaaattatttctgaagttaatttagaaaagcaaatagactagacaaaggtttagaaggaaaatgatttaaaaaaacctcattaaaacatactgtaaaatacaaaaaaaattccaaattatactgacaaagcaaattgaataattatagatccacaggctagaaacactcataagtttacagagtaatctagaattaataaatatgtcataaaataatttaattgcagggtcctttcagtaagtagtgcataatttgttagatgggggaaaataattattcctctctttttattacacaccaaagtacatttgagatggaaaaaatatataatatactcccaaccctattacaaacctgaggaaaataaaagcaaatattgattaaatatatagaggaactcccaaactccctatcactctgacatatggtactgtgtcacaacccatcctagacatatttaatccaagcctgcacaagtgcaattcaatgttcctatagaaagataggctcaaaggttatgctgttttcattaacatttataaccactaacctaaaatgagaacttaacacacatattcatgacaataaccttctctggttaattcattcctctatctgcttcaagcaattttccatattttctattattttcaaatactaaatctcctcttctctcagataacctctctaactgcttcataaagacagtagaaacatcagatgcaagtcctctacttcccatgatagactcataaactcatcagcatctacatccttgctctccttattgcaccagcagaatcgaggctctatcccttctctgaatggcaatccttgacctcacaatttgattccattcaccttgacctttttaggaaccctgacttatggattatccagcccattgcctatgtattcaacccttcctaaatccttcccatggatattcaaaatgttcaagtctctcatatcttaattattttcttcatctatcccacatcctcatttggataaagaccatggtttcattttttggagaaaaatactaatctatttattcttcctatttcacacccaaacttaaaggaccagaggaggcaaaggacatctaaaaggggacaagtgactgttggcttcagtagtccaattgagaagtgatcactgtgtgaataaatagctctgaggatgagaaaaatgggcatattttagaggtataaatataatgatagtgatataaagacagtgagactagttgcgtagaagaagagagggtagaattctaagactgcactatctgttctgactcaaatgactaagaaagtttcacgaaacaaaaaatagcctttgaaaagatttgatatatgttgtggaggcagagattatggatccagttttgacgtgttgagtttattggatctgtaaactatcaaaatacatgtgaaataaaatgttagagaaagcaatttaaattcatttgaaagttaaagaattggaaatcatcaacacataacatatagttcaaaccataggactttaaatagatatacttatggagaatatataaattaaagacaaaaagagcaaaagaggtaaagagattgcaaggagacctaaaaggaatgaacagagacataattgaaaatcaaatggagtggacagatatgctcacatgaagagtttcagtaatgtgagaaagagattatccattgcatttggcaattaggtaatcattggtggtcctagcaaacagtttcatgtgaagagagaaatagaatgcgggaggacagggagccagcaggactggaatg

SEQ ID NO: 915192 - DNA, 4001 bp, Homo sapiens
aatggatgctgggcactcagagactactatcaggaagcctttatcagccccttggcctgaagaaagaaggcaagacaagcctgttactatatttccataaaagctgtagctgtagcaggtgggtggccagagaagggacatatccagtgaaaaccctcatgtcaaagcaggctgggagtagaataataaatagcccaaatgctgtctcctcttgaactataatctgtcacgcatcacattggctcaattcaactgaacaccgaaagacaaaggagtttgggcttacaatatgtgaaagtcagccctccagtttacagagcagtgcacaaagggcagacagcaaatctggggaggcaaacggcgtaagcaccagatccttctagctagatgaatcttttgggttctgtctgtccaagctgagtcatctcatattccacataaatcctcatcattgactgatttggctttatctgaattattttcttttccgacctctgtatttcatattactggagtaatgcttgtttaggcagactgactttgctcccaagttacagctcccaagttacagctaacaatgcgcaagcatgacctgtgattcatgtcccaatcactcatttgtctgattgaatgtatgtgtgtctgtgtgtgtatttgtgggtgtgtgattatattcatttttattttaagagatagatatcaatcattaagttctttaaatccaatttgatttggcagaaatttcttccatattctcaaatatatttaaatatttagcttttgtcaatattttaggctactgtgattttttgtatcttttctgaagctttcacaattatttacatacaaatataaaaagggaatcccaaaggtattcacttactcatttatcctctttgaaattttactatccagtttaggagaagctgaggttcatgtacatcatggagaaggtctctaagatcttatttcttttgtaagggcaaacagcaccttttggaaggctgccctaagttctttggtctgaagtgcataaactgtagggttgagggaaggggggatgatgttgtgcaacacattaagtagaactggaatcaaagtagccttcatctctgtcagatgagtcactgaaatcactacaacaatagtgtaaaagaaaaggatgagggtgagatgtgaactacaagtgctcagggccttggctgcagcttcagctgagttcagtctaagtacagagtacagaatcaaaatatatgacagtataataagacttagatcactccccattccaagccatgccagaaccaactggcaaatgctgtttggcctcctgtcatcacaagccaggcttgtgaccccaaggttagagcacaggcagtgttcaatttcattcttggagcaataatcacgctgtgctgcaagcacaggcactggagtgacaaataagccatttctcagcaccatgaacagggtagcttttaagattaaggaactggtgacaattgatggatagcgaagagggtgacaaatagccacatatctatcaaaagccatgcagagtaggataccagactccatgcccacaaagaagtgaatggcataaatctgagcaaagcactcagggaggctaataaccttggcatcaaaccagaagatggccaggatcttagggatgatagtagtggccagacccatgtctaccatacagaggatgccaaggaaaatatacatgggctgctgtaaagaagggttctgccagatgatgatgaggatgagggtgtttgcagcaagtgctgagagatacagtagtgccaggggcagagatagccagtgttgccagctgtgaatgcccgggaatcccagcaggatgaactcagagacctggaatttggagctattggagattttgagagatgcagacatatgattcatgattcaacatgaatttcaaatctctatttgtattgttctcagttatcacaggttggaaccaccacagaaataaaattgtagtatttttctaagcctttcttcatctctttagaaattatatagattaaatggatgtgcttgttttcttcatatttatctcagtgttacttgacttgatgcagaggtttattaactaataataactagattttttaaatgaagaattatgggagatgaaatttatagctacatcatttcaagttgatatagatgtccattaacgtcttacatagcctttcaaaattttgatatcatggacttgtaaaggtttccagaaataaattatattgaggatttggggatagttttctttcatgttctattttgtatgcacttctgaggaggttgcaaaagagtagcttaaaaggaagttagtgattatggctgaatttctccatatgagaagtcatataatgaagacataccttagtaagtttttttatagttgaatcttagagaacctataaagacataaatacaggatttaggtaaaactaataagaagcttttaaagattcctgtgataacaacacaatattagatcaactctattcattttttagtgaatacaggcacaatgttgtacagctggtctctagaacttattcatcttgtacaactaaaaccttctaaccattgaacagtaattttaacttatttaacaaacaagaattatttgtccataatgttgaaggaattgccattcaatgctcaaaaatcatggttaaaattagactcattatcttttctacaactttgttgttatccatttactttttattctgcatggtggctcgaccagacaagcttgaatctagaaaactaaccttcccttactgcaaataattgcttatcatattgttgatttcttttctttacttcattcatatgcactcttttttttcagtatgctttctgcaacctgcctggagcaaatgtttctgattttccataattctttctttctgctagcaatctgatctttcagacactggtattcctttgcttaaaataattcatggtttcacattttctttcaaatacaatactttattattacaatcctttatttatttaccatttattatttatttactattacaatcctttattttgcataaaacactctcagatatgactcaaaccgaagtgaatataatctcttgctttgaacttctttgtattttacactgcagatacatataatacttactctatgctaaaattagtaatttttcaaggcattttatttccaatatttttgccatggtggaagctattgcaggtttatgagcaagaaacaaaaactggaaagctatgttcaaaggttaaaatgttatttttaatatattagttatgggttgatttttgatataattattgttaaataccaaaaaaatctggaagaaaataaaattcttttgttgtatcaattcttattaaaaactaaatgtatttcctttcagaggtttcttactgcctgtatgtttgaataaacatatactcccaaatgatggagtaaatcatccttctttaatggtgaatgtaatttgataaagagtaaaattatctaaatgtatctacagaaaatttcaatgactaaagagcacaagcaataatggaggtaaagctagtttgactttgagcttttagaggagaattctgaaggggttcaacacaatagttttatcctggatgcgtggaagtatgtaacccatttgatgtacaaggcctggcatttttacttaatactcatttattactttacatcctaatatcacataacattttatctttgatgttttctctattaaaatttttttctgatttgtatatgtgtgatacaattaagagaagtagtatgtttgagctcacagaaaaagaattgtttttaattttttttacaattatattctagcatgacatagaatacgattctgctatataaaacagttaatatattaaccctgaagataatctggcagtgttgttttttgattacagacaag

SEQ ID NO: 915193 - DNA, 4001 bp, Homo sapiens
ttagatttatatttccatgtgtatatcttatttcaaagcatgtattctttatctcttttgattgtcacagcatgtttgcgatttggctcagcaaaatgttatgatttttgtcacttttaatcagaagaattgaaacatagggaggtttcataagttgttcaagttcacacagaaattttggaacagagcaagactgagagtaagaatagtgctatggtttttcaatcagacttcccaggacttgaatcccagctctcccacttagaaactgtgctgtcagggggcaagttctataatttccagtgcctgagttttcttagctggaaattgggaataatattgtacctgcccaaagggttattgtgagaattgagtcagataatctacatacatattttatcaaagtttctggcctacaagaagtatttaacacttgttaaccattaattcattaattattgagatttttttgggtacgaaaattaaactttactcctttttaataaacatttattgtttactttttattataaaaattacatatgaaaagcacataaatatgtaagagttaaatatgtgtaaatattaaaggctttgttttctattattagtcatattataatgatttttatgaataactttttgactgcatttagactatttcttttggatatttttctaaaatagaattactggttaagaacatttaaacatttataaacattttgataaattttaccaaattgctttttggtgtgtttatagtcctaccagttgtgtaggaaagtgttaatctcggggtaggctagcagtaatagttagaaacatttcacttttttgttcttacttattttccaggtaataggaaattttcttgtaattttaatatacatattttgattagtgaggctgacagttttcatgattttattggccatttttttcctagggagtgtggtaagtgcagattataaccctgatctattgagaactaaaacctctgtcatttcctaacatcttactggattcctaaagctggagttacttggacacgtcctgacccagtccaagcagtctctgaaagcccagtctgagtttgtgcatcctgagtgcacaggccagggggttgagtgcaggggggatgacattgtgcagcacattaaggaacacaggaataaggggaatctttttctctgcaaggtgtgtgacagacagcacaatgatacctgtgtggaagaggatgaggatgaggtgggagctacaagtgctcagagccttggacattgcttctgctgagttcagcctcagcacagagtgaaggattacagcataggaagaaaataccagagccatatcactcccaaccaagacccatgctagcatcagttggtaaaatttgttcacagtgatgtcatcacaagccaggctgataacccccaagttagagcagaggcagtgctcgatttcattcctggaacagtagtgtctctgggcagccagtataggcactgggatggtcaacaggccattcctgagcatgatgaaccctgtggctttgaagacaaaagctttagtgactatggaggggtactgaagagggcgacagatggctatgtatctgtctactgccatgcagagaaagatgcctgactctatgcagaagaagcagtggatggcatagatctgagcaaaacacatggggaggctaatggccttggcatcaaaccagaagatggccaggatcttgggcatgatggtggtggccaggccaatgtccaccactgctaatatgcccagcaaatggtacatgggttcatgtagcacggtctcatgttgaatggtgattatgatgaggagattggcaccaagagctaagaggtagagcagagtcaggggcagggagagccagtgctgccactcatgaatgcctggtaatcccatcaggatgaactgggaaatctggaggctggagtcataggtaacactggtggaggtatccatggaatgggtgcctcagtctcagtgtctgtctgaaatagaagaaatctctgtttaaaagttcagctaaggggctgagcatcgtggttcatgcctgtaatcccagcactttgggaggctgagacaggcagataatttgaggtcaggagctcgagactgacctggctaacatggcaaaatctcatctctgcggagaatacaaaaattagctgggtgtggtggtgcctgtctgtaatcccagctacttgggaggctgaggcatgagaatcattgaacctgggaggcggaggttgccgtgagccgagattgtgccactgcaccccagcctggacaacagagtgagaccctgtcttaaaaaacaaaacaaaacaaaaagttaagtgtcttggtaagagctcctcaataatgaaccagctccttttattcatgaatgaccctcaactttatttgacttctggaaatattccacagaggaataacaaaaaaagcaaaaaaattctaaacagaagagttggaataactatttttcatcaccacttgtatgtctaataagcatgtccacatatattaacaacagtcttatcactaacagataacaaatgttagtatttgatttatttccaattttctattttatttttaaacagtctacatcattatctagagatgattttgtatcttgtttttgtcttttagcagtatgtgttaagatgtaatataagcactcaaaaattttatttcatggatgaatacattaaccaaagacttcacaatattatttaaaaagtgtgatgttaattttaattgctgctttaaatttttgcatttggctattctataatttactgacaggtattttgcttttaatattgttttccttgagtagagtttcaaaagtgatgcaaaaattatatatacaaaggatataatagtcttaaaattttaaatataattttgattttattttaagatatattatctatacatggtaaaaatcaaaataaaatgaaaaatataaacaatgaaaagtaagactctcatgcttggggctttgaaatctttttccttttcactagaggcagccagtaatatgtttcttgggaatccttccattaatagtttatgcatggataaaaacatatatatatatatatatatatatatataattttcataaaagacataatcaattgttagcacacctttctccttttttctttccttttcttttttaacttaatattttgaagactgctccatatttccatactgcagttaagttgcattattttctaccacctagatgccctatagtttaatgatttttttttgtatttttagaattgatatatcatatttgtagatattttggaggtacatgtgatattttgatacatgtatacaatgtgtaatgatcgaatcagtgtaattaggatatccatcacctcaagcatttatcttttctttgtgttaggaacattgcaattctcttttagcgattttgaaacatacagtaaattattaactataattttcctactgtgctattgaatactagaacttatttcttccacctaactgtatttttgtccccatcagccaccctctattcttcccctacccccaccctttccggcctctggtaaccaccattctattcattacttctgtgagatccactttttttctttttccggctcactgcaaactccacctcccaggttcaagcgattctcctgcctcagcctcccgagtagctgggattacaggtgtgtgccaccacacccggctaatttttgtatttttagtagagatggggtttcaccatgttggcgaggctggtctcaaactcctgacctcaggtgatctgcctgccttggcctcccaaagtgctgggattacaggcgtgagccaccgtgcccagctgagatccactttttaagctcccaaacatgtgtaggaacatgtaatatttgtctttctctacttgatttatttcactt

SEQ ID NO: 915194 - DNA, 4001 bp, Homo sapiens
gcagggaggagggagagcatcgggataaatagctaacggatgtggggcttaatacctaggtgatgggtggataggtgcagcaaatcaccatgacatatgtttacctatgtaacaaacctgcacatcctgcatatgtatcccggaacttaaaataaaataaaattaaattaaattaaaagaaaaaaaatacaacatttagtgaaatattaaagaaaaatcaaggaggtactgactgataggcagtttaggggactgagactgagaaaagaagagtattggtatgacaccattggactcaaatttcccagcccttacatagctgagaaagagagaaatggcagccaaggggaatgtccttcagcatttgcttagcaaattactcagtagccataattggaattcaacagggagatcctagagagggcatttgatgaggtaggcatcttgtttttctaatttaccttaactacacatagtgtatcttttcagattctgccatatgccagtaacaagagttatatactcgtactacttttgggctatttttttgttgaatgtggagtgcagcgtttgggcagaacgtgggctctggagtcaggaagaccttggtgtgaatgagagttctgcctcttccttggtgaccctgagcaagttaattttccttgctgacacactgtttccttattttgtaacatacagatagttcattgtgtattttagtactgcaatgagtatttaattaaataacttttgtgcctggtacatactaagggcccaataaaggctagttattgtgattattgtgaaaataggttatcctggggaggttcttttttttttttttttttttctgaagaaattccttccctttttggctatctatggcacagtcagtagacaagtgaccatgaggaagggtgagaggaatctggagggaagagtctccacaaatgagagcaccaaatatctcccttgcctgaggcagaggtggaggtgaaggcttggattgtttaattctccagcagtttggataaataagtttctacgcatgacctaagaaaacactttcttcctttccaacaccttccacagggcatccttgatctctttgttcctcaaactgtaaatgagagggttcagcatggggatcaccaatgaatagaaaacagacaccaccttgtccctgcctagcaagtagctggagctgggtcgcaagtacacgaaaagggctgtcccaaacagcagagtcaccaccatcagatgcgaggcacacgtgttgcaggctttccatcggccctctgctgaagggatcttcaggaccgcagacactatgtaaccataggagataaggagttggaggaacgatgttcctccgacagtgaccaccacgaggaaattcaccacttgactgaggaaggtgtcagagcaagacagagccaggactggtgggaggtcgcagaagaagtggttgatgatgttgggtccgcaaaagtgaagcctaaatatggagctggcctggatcagggagctcaggaagccaccaacatatgccccaaccaccatgcgtgtacagaggccctgggtcatgatagtggggtagagaagggggctggagatggctgcatatcggtcgtatgccatagcagtcaggaggaggcactcagacagacccatgccgacaaagaaaaaaaactgagcagcacagcccacaaatgatatggtcttctgctcccagaagaagtcagtgagcatattgggagccacagcagaagagtagcagatgtcaatgaaagataagttgcttaggaagaagtacatgggtgtgtgcagatgggtgtcacctctgatcagaaaaatgagggccaggttccaggccagggtggtaagatagatgcccaggaaggtcacaaagaggagggcctggagttctggatggtctgtgaatcccaggaggatgaacatggtcactgatgagctgttccaggctttggttatggacatgcttcccgtggaccacaaggacaagatgcagacctgggatagtaatgacagtccacattataggtggtattagcaaataactacaaaatgcctgagagggagggcagaggattacaggttacagctttatgcaaagactctctttctctttctcagtctcagtctcagtctctctctctcaaagaagggagttgcagtcatcatcttaaatatttaggtagtatagtgtagttgataatgaatctaacttttgaacccaaaatccctgggatcaactcctgcctccaccattttgggtgagatagctaacatctctggcttcaatttatttatccttaaaactggatgatagcaattaattcacagatttgttttaagtgcctggcacataacaagtgaccagtgagtaattattaggacagttctgtgtgcctcaggtaagtcaggtcatgtcttggaataactattcatctactttacctaagtttcaatattaggaaggaaagatcaacggaactaggttcagctatgtagttgtgaaacgattaatcagatagaatgtttttaatgcaaaggattagcccacatatatgtaaaaatgctcttaattgtcgaatattgggtccaaatatactaatgtaggttgaatttcaaatttatcttagtctgagcattctgagttattattttatttatttatttatttcttattttttatttttttttgagatggagtttcgctcttgttgcccaggctagagtgcaatggcagtatctcaggtcaccgcaacctccgcctcctgggttcaagcgattctcccgcttcagcctcctgagtagctgggattacaggcatacgccaccgcgactggctaattttgtattttaagtagagacggagtttctccatgttggtcaggctggtctcgaacgaccttgggcgatccgcccgcctcagcctcccaaagtgctgggattacaggcttgagccactgcccctggcctgagttgtttagttgttgagtgtgggctctggatctagactgcctggatttaattctcagcttcacttagtagatgtgcgatgttgaccaggtcacttgaactctctctctctgtaaaattagagataataatagtatttactttgttataggatctgtctaattatcatctatcatctatctatctatctatctatctatctatctatctatctatctatctatcatctctctatccatctttatctatctgtctatcatctatctaccatctatcatcatcatcatgtatcatctaatcttcttagatcatgcctggcccatagtaactgttctataagtatttgttgttgttgctgttgttattttaaacctaagttacaaagtatcctcaatcaaattatttgaatttttagtgcatgaagcatctttcaagatcagggacttgattttattaaatccacaccagtaaggactcccattgccccctcacacagccacactgagtctcaatgcacattaatcagaagagaactgtagtcatcaggtctctgaaactggtaggtttccctaatcctatagaaagtaccaggaaaaatgtggtcagagggccatgtggcttatggtgaatgacccttaaaggtttggaatatatcttgatccttcttcagttcttaacccaaataatttggaaatcaatgaaattattttaactggcttttaaattaaagaactgtgagatattttgattaatatgatcaatatacaaatgtgaactattgaaacaaaaaatcatgttcctgattaataaaaaaaaggaaactgaacattattatctatctcctgaaataataactcttaatattttggtgtatactttttatgtacaagtatatgtttatgtgcataggtgtttgtatcatagtacacaaacctttgtaacttgtatatattatagaagtcattgcaagtcaataacttcacaatttgggaagt

SEQ ID NO: 915195 - DNA, 4001 bp, Homo sapiens
ttgattgaattggccgagaggttttttgttcagtcattaaggcctactgttcttgcactgctataaaaatattccttaggctaggtaattcataaagagatttaattggctcacagttcttcaggctttacaggaagcatggtgctggcatcagcttagcttctagggaggcctcaggaaacttacaatcatggcagaaggcaaagggggagcaggtacatcacatgacaaaagcaggagcaagagagagaggcagagtgagaggagagagaaagtggcaggggattggtgggagtgctacacacttttaaatgaccagatctcacaagaactcactatcatgaatacaacaccaacccatgagagatccacccccatagattcaaacacctcccaccaggccccacctccagcactggagattgcaattaaacatgagatgtgaatggggacaaatatccaaattctatcaaggcccaaatcagaattattgccttaatgcctctaaagagtatgaaaactctcccatcagtcacaggggctcctatggccatgattctgaaacatgggaaggtatctgccctgtggttttcatgagctctaaggaaaccatttgagaatctcagaagagggaaaggcaactgtgtttagaaaaaacatcatcctcttcaggtcattataccatgttgtaccttaaatatcaccacactaaatgctggactaacattttttcgatgactttcctcctatacatacaaactctgttttaacattccaggatgttttttgtcatgatgaagttttctgctaggcagagcatttaaaatctcaaactatacaatgctattcattttacaagcaacaatggccaaaatgttttctaatagccaacaggcaaactattagtgaaatcttaagcaggagggaaaaaagcctgattcccacaattcattctatagatcaactagtttaaaattatgtaaatgtctgcacaattcacctagctcacagcttcattgtaaacattagcccaaggtcataaaaatgaatggtccaccgtgagaaatcccggggtccctttccatggctttcctcatggcatttttaatctccttattcctaaaactgtagatgatgggattcaccacggggatcaccaaggcatagaatatggacaccaccttgtccctgtttagggagtagctggaactgggtcgcatgtacatgaagaatccagaaccatagaagagggtcacagcagtcaggtgagaggcacaagtgctgaaggcctttgtcctacctgtagctgagctgatcttcacaacagcagcaacaatgtaaccataagagatgaggaccactagcacagacactattccaacgacaacactgactatgaaggtcaccacctcgctggtgaaggtatcagagcaggacagagccaggactggagggaggtcacagaaaaagtggttgatcatatagggcccacagaaatcatgctgatagacagagtatgtttcaatgaaagaactaaggaatccacccacataggcgccaaccaccatctttaaacaaagtgtatgggatatgaggactgtgtaaagcaaggggttgcagattgcagcataccggtcataggccatagctgccaggagaaagcattcagtcagccccatcccacagaagacaaagtactgagtggcacagccaacaaaggaaatggttttctgctctgtgatgatgtcagacagcatcttaggggcggtggaggacacatagcagatgtccaggaaggacaggttactgaggaagaagtacatgggcatgtgcaggtgagagtccatcttaatgagggcaatgaggcttaagttccaggccaacgtcaggaggtagagccccagaaataacatgaaaaggaaaatcttcatttgaggatggtctgaaagtcccaggagaatgaattttgtcacaattgtgttgttccttcctacagccataggcctgcttcctgcataaagtctttactttcttctttaagaatcctgtggtcagctagattttgtttgttattgtaagagtgggtatttcctagaagatcatacaaacagtcagcaacaagttaaactacacccagttaaagcccagccacctgctaggcaaagacttttcagaggaagtcagcctaggataatccatatgctctatgcttgttgaccaaaagagaatccatctaataataaagtagaaactgattgggagtcagaagcctgagttttgtcttcagctccattcataacttgctgaggactttggaaaagtcatttctccagattctcattttcccaaatgggaaaggagagggttgaatcagatgagtttgaagtgtccctttggatttgggttccctatggcttttttagactttctgacttgaaaataaagtgtaaataaataaagtataataaagttaggcatttttaagcattatagatctttagtatgagaactcaaaagaagggaactgaatttagtgggctacaatttttgacatattccattttggtggaggaaatccaggcaatggtctaacaatctattcttctaggtagtaaaactaagtgggaaaaaaatttgtgtgtgtgtgtgtgtatacatatttgtgtgtatatgtatatttgtatatatatatatgttatatgtgtgtgtgcagggataattgtatatatgtgtatgtttgtgcatatatatgcacacacacacttagcatgcttaagaccagaacatttattctaattatataatgctcttaagaaaagtcattgcacaaaattcatagaatgacaaaaatttggactagcacggtcagcacaattataggaaagaagggatatgaacaggtttccataaaggggaaaggggagccgtacctaagctgactgagatgggctgagccattgtggtcaagaacaaacagcaatcaatatttcctgggcaagaaaagcagcagggagaagagggttcattcaatatttaaagacagtgataagcaagggacaactttgatgtcatcaggccagaacagacgatgactatgaagacaagaggtaagcccatacatatctggcagttaagaaagacagactggcactgatgtaagatcaaaatgaggaaacaggccaggaacagtggctcactcccagcactttgggaggtggaggcagcccaattgcttgagctcaagaatttgagaacagcctggaaaatatggcaaaaccctgtctctactaaaaatacaaaaattagctgggcatggtggcatgtgcctgtagttccagttactggggaggctgaggcaggagaatcgcttgaacccatgaggcggaggttgcagtgagctgagatcgcatgccactgcactccaacctggtgaccgagcgagactccgtctcaaaaaataataacaataataataatacaaaacttagcagggtgtggtggcacatgcctgtagttccagctacttggaaggctgaggtgagggggatcacttgagcccaggaggtctaggctgcagtgagccatgaccatgactgtgccactgcactcaagcctggatgacagagtgagaccctgtctcaaaaaaaaaaggaaattttttttaaaaattaggaaatacaaatgcgtataaagaggcagaaatgccctgagaaagactcagtggtgaaattaaggttgctgtattttattatttgtatggaatttgtttgcccatgcatgtttgcacccaatggtaactgtggttctgtgtcacttatcatattaaaaactgctcctagctttgtgttttttacaaatttctaatctcccctcaaatcactggtcaagcagtcaaaaccaagacgagcctagattgatcttcactaaaacatcaatctatttaatcctatcaaaaaggaagtaagaggaatttggtatctcttatcttggtgaaatcttcc

SEQ ID NO: 915196 - DNA, 4001 bp, Homo sapiens
gtgaattttgcatagctggcatttattttgaggtatgttgctttgatccctattttgttgagaatttttattataaaagaaggtaacattttattgaaggctttttctgcatctactgagatcatatggtttttgttttaaatgctgtttaggtagtgaataacattttgtgatttgcacattttcaaccaatcttgcatccaagaatgaagcctacttgatcatggtgaattaacttttgatgtgctgttgaatttggtttgctagtatttcattgatggttttgcatctatgtttatcaggaatactggcttgcagttttcttttttcattgtgtctttgtcaggtttttgtatcaggctgatactagtttcatagaatgagttacagaagagtccctgttcctcaatttttccaaatagtttcactagaattggccccagctcttctttttacatctgatagaatttgacagcaaattcttttggtctgggatttttttttttggttggtaggttttttttagtagagattcaatttcaaaacttggtattgattggctcagggtttcagtgtctttctgataaaatcctgagaggctgtatgttcccaggaattcatccatttttctctatattttctagcttatttgcatggaagtgttcataatagtctctgagtatttttttgtatttctgtgggattggttgtaatgtcacctttgttctttctggttgtgcttatttagatattccctcttttctctttgtgaatctggctagcagcctaccaatcttatttattcttccaagaaaccaaattttggtttcattaaatttttgcataaattttgggtctcaattttgttcagttctgttctgattttagttatttttttcttctgctaggtttgggatttgttggcttttgtattttaaattcctctagaggtgatgttagattattaatttgacatctttctacatattccttattgtggaaaaattaaattttagcagaacagctatgttggatgatttgttgagttgaatgttaacaactggggctgatttaaaataactttttccctatcacttttaaagcttcttttacttccttatttctcaagctatagattaaaggatttaacatgggaataactgtgccataaaatataaaggccactttcatattttcctgggaattattagaatgagactgcaaatacatgtaagagagtgtcccatagaaaatggtgactgcggtcaggtgggaagcacatgttgagaaggattttttccttcctgcactagaagacattttcaggatggtggccatgatgtagatgtaggaaaagatgacgaccaacccagtgaatatcaagttagatcccacaaagacaacaagtagcatgatgttgatgtcaacattggagcatgaaagagcaagaatagggggaacatcacagaaaaagtgattgatgctattggacttgcagaaggacagtgaacatgtaaaacctgtttgtacagaggcatttattgagcccatgatgtatgaaccagctaccaaacggatgcagactgttcgggacatgattacagtatagtgaaggggcttacagatggcaacataaggatccactgccatcatagccaggagataacagtcactggttgcaaatgttgcataaactaagaattgtatcacacagccctgaaataacatcaaattcttttcttctgtgaagctttggagcatcttgggagtgatagcagaagtgtaacagatatcaacaaaagccaaatgttgtagaaaaaagtacgtgagtgtttgaaatctggaatctgtgttgatgagtaagattattccactattacccattatggaggtcacatagatgagaaggaatacaatgaagaggatacaccaaaactcatgctgggcaccaaatcccagaagatagaattcagtgacttcagtgctgtttcctagtgtcatggctagtaaaagtctagaaatgaccaagagaaggacccagaaaagaagggaaatctttgagatttcttgcaatgaaatggctctatatttcaagtcacttttttctatttgtatttttatgacaaatacaatagtgttattcattttcaaatttaagaaatgtatttataatcatcaagtaaagagtgatttacttgatgtaagatgaaatggattcatcttcaaaatcgaaggagattgtcttagaagtatcctaactcctaatgtgtatagttcttagaaacatagattgacaattttcctctgtattaaacagctatccatatttttaaagtaatgctaaaatgtaattttttacttttttagaaacttataattgttcacagccacttaccattttaattttggttccagctttggaaattaatagaattagagagaatttttttgaaatgtgttcatggttcacatatgtttgaaggcttcaacgtgtctttgtattagtatccctagactgcatctctcatctatgtgatattctttacaagcaaaataacctcattatgtaatggatgcctgagaaatagccttacattttctattacttttttttttcaattctgtagttgaggaacaagaaacaattctcttcattttaacatctaacaaggactgaagtatagtaagttcgtataagtttcttcctagggtaaatttactgtaaaatgaaagaaatacagttctttcaaggagtgttccttttattgggataaacctttattagaagaaggtagaataggccagaggtctacttaagctagaattttgatagagtaatgacattcatcatatcaatttgacttcaatcatttggattgaaataaaataatatgaaattatggggatgcttttcaggagctaacaaaagtagtacaagccccacccccaatttcatgcagaatttatacatttctatgtttatatcgagttagcggttggttgattcagtatgaaatattttatttcatctatgctgaaggtgttttctaatcaaatgagtgctacgaagaaaatggccaactgcccaaacatttttttaaacttttattttatgttcaggggtacgtgtgaaggtttgttacataggtaaactcacatcatgggagttttcccaagcattttaaacatgcttaatatatgaatagtgctggatttctcaggcttcattcatagtcaatattgtgcagtggaaaggaaataagcagccctggttttgaatttttgtctcatccattagtagaaaaaagcctataactccctttggctctagttacttcctctgtacaatggggatcacagaactcatctagaagtttatattcattcgcttgtttatagtatcagtaatatgcatattatctataatattatgtaacttgcattgaaaataagttaatgaaaaccttctaatagcaaaattaggaaatagaattgtataaattttagtagactcatattatttattaatatctagtctaaagcagtgagataaatatatactcttatggagtcaaaagagaaaagcatgttgtagaaaaatatgtaaattgtggactccttgaaaaaactaaactctctgtcactcctactgtctctagctttcattcttttttatttttggagatggaatcttgccctgttgcccaggctggagtgcagtggtgccatctcagcacactgcaacctctgcctcccaggttcaagcaattttcctgccccagcctcccgagctgggattacaggtgcatgctgcatgcctagctaattttttgtatctttagtagagacggggcttcaccatgttggccaggctggtctcgaactcctgaccttaggtgatccgcccaccttggcctcccaaagtgctgggattacaggcatgagccactgcacctggctgctttcattctttttatttatttctggataaatgccagaaa

SEQ ID NO: 915197 - DNA, 4001 bp, Homo sapiens
ttattatcactcacatatcctcagatcatctggagatcagctgggactggctgatgtagagtaggcttaaatgcatgacttctctgaacatgactgcaggttagcttgtctaggttgagcttgactgaaatatatttgacccatgtttctttcatcctctcctggattcaatagttacccagtcaaacaagagtaaattttctaaatttaatgggggagaaaaagaaagtttgagtcccacagtatcagatgttgctattggctgtgaactttgaatatcatctccattataatttcccactagactctagatacaagaaatcaaatcatcagactcataagtaaatatgattgcaggaaccatatccttgtttctatcccacttcatgattaaaatcacctccttctttcttatgctacagctggtgtaggcaaggaaattgccaaaaatgtattagatgattagctgagagaggtcttaggcaaactgcagctatctcatgttgctctttcttaaagacacaaccaggccaatatattgcttttttttccctttccaatggcagaacccctctgtctgtttattctttcccatccagaaacacagaataaacaatggttaccaccatgtctttattatgctgtatcagcatatatgggagatgatgtttctgaactcctgggggtctgtgccaggcctcatttctgtagtggcaaagtcctaacattgagccatctttgatctgagaagccacaggaaacaaaagatttctaaatcttgttgtttcacaaataattttggacaaattcataaatgatgaggccacattatttatcctgatgtaggataaaaataatgaacctccaggacctaaagatcctgatgtctgtggcattgagtcatctgttggtccatattggcatattttgtgcatcaaatcaagccttctttgtccaaaggcagtaggcagcatgaattttgttatagtccattcattatcatattttgtgggttagggagattctgatgggccatatctggcagaaatctcagaatctgtaaactcagcagcactttctcttttgcaacctctttaaggcatctttaatttctttgttcctcaaactgtaaatcaagggatttaacatgggaatgaccacagtgtagaaaacagatgcaaatctgtcaaagcttgaagaacctccagagctggaactcaaatagacaaagattcctgatgtatagaagagggaaacagctgttagatgagaagcacaggtgttgaatgccttggacctgcctttagctgaagtgatcttcatgatggagatgccaatatagccataggatatcatgataactagggcacttgctatcccaaagaacatggttaatatagcagtcatgacctgtacaaagaaagtgtcagtacaggacaagattaacagttggggcatgtcacagaagaaatgtctgatgacattagacccacagaagtggagttgaagcaaagcaccaatttggaataaagaagcagtgaggccagtcatgtaggctcccagtaccatccaaacacagagggtgggtgacatgatggatgaatagagcagggggttacaaatggcagcataacgatcataagccatggctgtcatgagacaagactcactcagtcccatcgttgaaaagataaagtactgaataatacaaccaacaaaagtgatagtttgctgttcctgtaagaggttggagagcatcttggggactgtggagctgatatagcagacatctatgaaggacaggttactgaggaagaaatacatgggtgtatggaggtgggaatccatccttattaaaacaatgagggagaggttccaggccagagatgtaatgtagatcaccaggaatatagtgaagagcacttttatgatcctgggaaaatctgagaatcccagcaggatgaaataggtgatttctgtaatatttcctcccccagtcattggctcagtgctcctaatatcagaaaggagacaagagaatggattgctaactcagttgaagtgataacattaccgtcttcatatgtgtacatcttttcttccaacaagcactggaaatggacaaatgtttcactcttctgatggaaagaccccagcctttcttgaattgtcagcatgtacctgcacaatgcttcaggttcttgattaattcatggagtatcatgagaattaaaaatatattttaaaagttgactggtaatttttaaaaaatatgctatagaaatgctgagagtattacgtataaggtaaagatcactaattaagataatagtttttcttcaaaaagacctctggtgattcattatataactgttgctttaaaattatgaaagcttaggctgggcgtagtggctcatgcctgtaatcctagcacctggggaggctgaggtgggtggatcacctgagatcaggagtttgagaccagcctggccaaaatggcaaaaccccatctctactaaaaatacaaaaattagctgggcgtggttgcacagacctgtaatcccagttactcctgaggctgaggcaggagaatcacttgaacccaggaggcagaggttgcagtgaggtgagatcatgctgctgctctccagcctaggcaacagagtgagactctgtttcaacaacaacaacaaaaattatgaaagtttaaatggcatccttccaaaatatatttgatggacaacagtcctgccctggattgttatctaagtagatttaaaatactttttattttaccctttagaaaaattgctttccctgtttataataacttctcctattttaataaaaatgtatttaatataacatatccaaactggccttaacaataatatcataaattctgataatattttgaggcagacagagcgtgggtgtccaataaagttttggaataagttttctcagggaagccttaatacaaagcattccagaaggaggctagtgcagctcactcttggccccaactattgtctcaattttagagtatctgggaaacagcatagtaatgtggctaagggttcagactttggagtttatttccaataccttcttcttctattaacttgtaccagtgacataaaaacattaagcttaatttactactaataatgtaaggacaataaaagcttctaacttcccaggttactgggaaggctgtaagtgaaaattcatgcaaaaacttagcacacatttacgtatacagcaattgttcaacagagaatggctattgttatcatggactgcttacagataatcatgagtgacaggtatacctgtgggtaggaatgtgaaaagtaatattttcatgggttaatttgaggaaattcatgagacaacatcagccctatagacagccaggcctcattgcctccaggcaggtgtagattgagacctagtgtccatgccagtcaagccacctagagccataatgatataagccattttttcttcagtttgcttgactttgggtacactaggtcagtggaaaaccagcatcaaattatgatggatcttgaactaggaaaaaggtcaaagtaaatatttcaattctctaataatacagaggtatatctttttattttttggtagattcaatcagcaagtcagagcttaccaacagacttatagtattaggttggtgtaaaagtaattgcagcaaccaaaggtatgcatagatagtgtacattcactctgctccatactcagactgtcctttcttgagatcaaagagcaaaccaatgatagataatagccaagacaattttgaaaaagatgaataattagaaaggattttaactttcagatattaaaaagtattttgaacattgataattcattattcttataataatagacatgccaaaagaacaaataaaaatttcataaataaatgtgtgttggtaagaattttatatatgaaaaagtatttttggttgaca

SEQ ID NO: 915198 - DNA, 4001 bp, Homo sapiens
ttattatttattatgaatgctgtggcacactacccagatttttttttttttttttttttttgagacggagtctcgctctgtcgcccaggctggagtgcagtggcgggatctcggctcactgcaagctccgcctcccgggttcacgccattctcctgcctcagcctcccaagtagctgggactacaggcgcccgccactacgcccggctaattttttgtatttttagtagagacggggtttcaccgttttagccgggatggtctcgatctcctgacctcgtgatccgcccgcctcggcctcccaaagtgctgggattacaggcgtgagccaccgcgcccggcccacactacccagatttgcctctcaggttgaagtattcatttccccagcttccaggcatataggccactgacagctgatagctgacctacactccaggaatttcccctgctgaagggaattgccttgtccaagataatattaccccctctcagtgggtgatcatgtccaaaaattggctattgtggaggtacaaatacttgttccttttttcttaatttgggacatctctgaaggacatctctgcagaacgccatgtaacagtggctcagtcttcgtcacaattcaactccttctgtccaatcctgctcccctcactatatattgtttgtgagaacactctgataaactttctgcctaaaaatatctctctgtctcagtttgtttgcccagaacccaaagacaccaatgtttgtataataaaactcagactgagataagcttaatatttaaattaaaacttaagtccagattagccaattccaagtgttttgatactttttccagtcccaaccttcatctagtgtattggtgcatcaaagggacccgtgtgtgtgtgtgtatatatatatgagatactaggatattaaaaagtatacttcattttaaattatctactttaacacagagaaacagcttaaacaatcagagaatacagttaacatgaaaatgtattttcttctacgtaacaaatgatgggtaacatggctctacaagatgtgtttccataagatcttctttagggccttttttacatccttattttttaaactatagatgaggggatttagcacagggattattactgtataaaagacagagacaaccttgtcttgctccattgagtagctagatgtagggcgcaagtacatgaagaggattgttccaaagaatatggtgacagccatgaggtaagaggcacaggtggagaaggctttgtgcctgccctctaacgaaggcatcttcaagacggcaatgaagatacacaggtaggaaatgaggacaatcataacacagctgatgacaataaaacttgagaatgccatgatcacaatgccattgaagtgggtatcagagcaagagagtttgagcagtggcggggtgtcacagtagaaatggttgatcctattagaaccacaaaaggacaacctaaaagtcatccctgtatgtatggctgcatttccacaacctgctaagaaggaggtagctattagcaaaaagcaaattctcccagacacgagaactgggtagagcagggggttccaaatggctgcatagcggtcatatgccatcatggccaacaggaagcactcagtccccaggaaggagccaaagaagtagaactgggcagcacatccatgaaaagaaatggccttattctcagccatgaggttcaccagcatcttgggagtgacggaagaagagtaagaggcatctacaaaagagaggctactgagaaagaaatacatgggggtgtggagacagagatcaatcttaatcaatacaatcatccccaaattgcccaccatgtttgccatatagatcaacagaaacaatgcaaagaggactccttgtagatctggattgtcggaaagtcctaagaggagaaattctgttacttctgtttgatttctgcctcgaacctctttcataagtctcatcatttgagctgcaataagaaagaagatgcacagtggaatttagtcagatgaatacatgatggagctataatatatttttagtgaaacaacttctaacagaagagcaaaaagtgaaaagcataataaaaggtatgttggatttgatgccaaatcaaaagacttgtagtactagatgtgctgtctactaatgactgaagcaagtgatttagtgtgtattaactatggtcattcctacagttaactctttattgaataattaaaataacttattcttaagatgtgactgtcataattacttgtgataaataaattaatttatatatactgacataccctccagacacaacttctggagaaggatgatagaatgaattcaggacacttacaattcctcctcagtactaatagaatgaataaaaatattgaaagttaataaaattaatctatagtgccagacaagaaaaatagttgggctgggcctggtggcttacaactgtaatcccagtactttgagagaccaaggcaaggcagatcacttgagctcaagagttaaagaccagcctgggcaatgtggcaaaatctcctctctgcaatatttaaaaaaaaaaaaaaaaaaagctatgtgtggtggctcatccctgtggtctcagctactcaggaggctgaggtgggaggattgcttgaccccaggagtttgaggctgcactgagctgggtttgcaccactgcaccactccagcctgtgcagtagagtgagacggtgccaaaaaaaaaaaaaaaagagaaagaaagaaagaaggaaacaaagaaagaaagaaagaaggaaggaaggagagagagaaggaaggaaggaaggaaggaaggaaggaaggaaggaaggaaggaaggaaggaaaaaagaaagaaaggaaagaaagaaagagagaaggaaagaaagagaaaagaaagaaagaaagaaaaacagcagaatctcttggggtagaggaagagcttaaaaatgcctggccaaagaagaaaatagagaatattcccacacagccagtacagttcgaaccccactctgattttccataataaacatctacagagaacagaatagggtcagttaaatagtaattttccacaattcattccaatatttagagaatcagattgtaagaatgagtaggcatccccgataaaaatggcagaagtagccaagccagtgaaaatctctaatactcacattcacaagttctcaagagaaccagaaaacatcagaagtagcacatgcaatttttcagccaccatacttaatcaagggaataatttaataccaagtaatcaaaatggaaataagagtcaccctttgcaaggtgtaatgaagacaaacataggataagaaaagtaaaagaaataaaaaagaaaattcagaatagatgcccaaactagatcttccaaatcaaaatgtaaacaccaccagcggaattctcctccaatttaacgcaaatcctccaccccttccatgatctcagattattaaacaaaagtttaaacttactaggctaactgtcaaaatatagctcagaaggtaagacagagttatatcctttgctactcacagaaaaaagttatttgatactgtttaaattaaaacatggggtcggccgggcacggtggctcacacctgtaatcccagcactttgggaggccgaggcgggcggatcacgaggtcaggaaatcgaaaccatcctggctaacacggtgaaaccctgtctctactaaaaatacaaaaaattagccaggcgtggtggcaggcgcctgtagtcccagctactcaggaggctgaggcaggagaatggcgtgaatccaggaggcggagcttgcagtgagccgagattgcgccactgcactccagcctgggtgacagagcaagactctgtctcaaaaaaaaaaaaaagaaaaaacacacacacaaacggggtcaaagtgacccagtacccttgccagcattgaagataaag

SEQ ID NO: 915199 - DNA, 4001 bp, Homo sapiens
atcaggattaatgagactgttctttgaaaagggcctgctgatgctggtgaagggcatggagacccatggcatcccagggaaagctagggtctaattaagatacaagacagtactaattttagatgggagcaggtaagctaaccttgtagacataacaatcttgctaaaatcagccttagagattgcatccagctttatctttcttagagccccagaattattggatttcctctgagggccaagaagatgtcaatatatacagttgacaaaactatgatgcctactcctttttaacattaggtagagaaggtcaaagaaatcctgtggttattagttgaacccacccacttgacccactaaagggaaagctgaggacagaaaaagaagacgattttattccctgattatagctagtcaccagcagaacttaaatatctggctcttatccttggacttcgcatagtcactgatttgttaccagtgacagcagattcagagagacaatacagtcactggaagcacagcaaactccttgttggcaaaaagccttgtgtttatatcctctagaacctggcacatacataacacttaaaattttttgctaaatatatgaatggatagaactcagactgagttacattgtccctcacaccagcctcattctccatgtttttaactacattttctctgacttcttttgagagtaaaaaaaatttcaacatttggacctggcattcctcatgaccccaggggaaaaaaaattgttcagagttattgactatttctttctcttactgagtcctgtcccagtttctaattaatatgtgaaccaactttaaataagaaatgaatgtattttgcccagtatgtctttcaaatatactaatttagtttatatttctttcagattgcagagttaaggattagagcccacccttcagaatttaatattcacttagcaaggagatggtaacttgggtagtgtttatcgaaaagttatttgcattttctatgcccttctactactgtcatttacctatgacagaaacagattttcattttgtgttattattgagatttttttccaattagctttttgaaagcagctttcacatccttgttccgcaaactgtagatcaagggatttaacatggggatgataaccgtgtagaacacagaggcccacttgtcttggtccagggagtagctggatgttggcctcaggtacataaacatgactgtgccatagaagagggtgatgccagtaaggtgagacccgcaggtggagaaagccttaaggcggccttcagctgaacgcattctgatgattgcaacaaggataaaggtataggagatgaagatgatgaggatggtgctgaattcaatgaagccacacagactgaagagcaagatctcactgatgtaggtgtctgagcaagagagggccaagagtggtgggatttcgcagaagaaatgattgatgatattggaaccacagtaactcaggctgaaggtgagggtagtgtgggctactaaactcactagaccagccaggtaagagcccagcatgagagccaagcagacctgcttggacatgaaggtgctatagtggaggggtcgacaaatggccacaaaacgaccataggccatggctgccaggacatagcactcagcatccacaaaacctacaaaaaaagcaaactgggtggcacagctggagaaggagataactttgtgatttgttaggaagtcagccagcatcctgggggcaatggctgaggagtagcccaggtcaacaaaggagaggttgcagaggaaaaaatacatgggtgtgtgaagctgagtgtctgttgtaatcaggataatcataccaatattccccactacattaaccaggtaaactatgaggaagaccacgaagaagatgatctccatctgagggtcctgggtgatgcccatgaagataaactcagtcaccattgagctgttttctttatccattgcttcaagtgtatgtgtgcctggatttagttttttgatggatgtagtaaattccctgtcactgaaaatattcaaactaaagacgagcaatcatatgccagagatattgcaatatacatatatatatatatatttatctattgtgtatatgtgtatacatatagttctacagtaaatgaaggctttgtttaggatgattcataaaaatctttccagtaattagattctatgaccaatagaataactcaaatgctttgttaaaatggtgatgtgtcctctccatgtgcccactgacagcatgaggaggtgttaacttcttgggaatggcaagttctgcttcttcaatgaccttggtgctccggggtcatttatcacatgatactagatgtttgactcagtctgcacaattgtgtgtcttattaatgagtaaagaagaacagtgtggatatttcttctttctaaaagaaagcaaatataaattcagataatgaataaactttaattttcattacaggtagacatagataggaaaataagtgacacgaggacctcaaagtataacacatcacacatatacagaaagtgaaatacttggaacagaagatcagacatataagaaaacacagtaaatgataatttttaaaaagccagagttactgagtggcacaagagaaattaaaaaagacatatttctgatttaaaaaacttgtatccataacatacaaagacattttaatacctaataataagaaatcagacaatccaataagaattggtcaaaaatttcaatagatactcaccaaaggagatcactgaatcacaaataattgcgtaaaaatgctcaaatattcattaggggaatacaagttaaaaacacaataaaataatgttacacactaatgattaaaattttaaaagactgactataccaagtgttgacaaggaaatgtagtaattggaaattttatcgttattggtagaaatgtaaagtagtacaaccactttagaaaactgtttcatagtttcttataaactcaaaaatatgcataccaactctatgattcagtcattaaataaccctgcaaacagcctaactgtacataagtgacagggtaagtaaattggggtatgtccataaaatgaaatgctaattaatgattaaaagaatcagattattgacacatgcaatgtgttagatgaatctcaaaataattagactgagagaaaacagccagataaaaaagataacttttatgatttcatttgtaaaaatctagaaagtgtaagataattaatattgacaggaggcagatcaatagtcacctggatagagatatgtgtgaggtggagcagaggggagggagtatcaagaggcatgaggaaacttttgggggtaatggatttatttactattttgcaggtgataacggttttgtgagtgtatacatatattaagacatatcacattttatatttcaaacatatttaatttgttgcatgtcagttatacctgaataaagctgctacaaaaaaagaagagaatatttgtccctactgcagttcagctatttctcactacatgtgaatgcagacatctcttcataggttaaattgatgaggaaataaaaacctaggctgaggggactgacaaagtcacttgctgattctgtgagttgcaggatcagccattgaatttgggactaccagttccctatgtagtgctgtattcattgtattcattttccccttgtttcttcatgcaggaattttaaaataacctaccaggaaaaacgaaaaaaacaaacaacaaccacaaaaaaaacgaaaaatgatctgatatttttcagcatgttcttcaacttttagcaagagaaaaaataatcctattgttgaaaaaggacctatctagccaaccttatacttatactttatgtatgtatgtatgcatgtatttatgtattgttaagacggagtttcgctgtgtctcccaggctgaagtg

SEQ ID NO: 915200 - DNA, 4001 bp, Homo sapiens
atctgataatttaattatcaaaatcgattacagagtaaaaattgtttatactttaattgccttgcattgtaaatttacagaataaaagatcagtgtaattttcacctcttcttgaagatagagcctcaaagactatgttagcaacatgaatataaataattaggaaattctacagtttataatcttgatagtattcacaaacttgtttttcacaattacccactctgaatgaaaaagtagggaatttcttgcagtaatcaacttagcccaaagacaatgtgatgtatcttcattctgacttaataataatgagactattgctacatgtcttctaatttcttgagaaccagtgaaaccaccatcagtatccctaacagattattggtattataaaatatctctattgacaaatgctttgtgagtacaaatatagactcactgtccaaataaaataaggctgtattttcccagtcattcatctatctatccatctatccatccctccatccatacttaaatttatgtctgaggttacaatattttgaatttttgaaatcagaccttggcgatgaccttgagcagtaggatgcttagtgttccaataatggaactctatgcataaatggcctaaacacacagataaggaagacatgcagtataccaggtgccaaacaggtggtggaaaaaacaagccaatatacacatgctctgctgccaagtagcttctaataccgattgattgactgaaaagtcaatatttaccttcaatacaacatcgtaaagaacagaatcaatgtacaaagcattttagaaacactaattggatataaataatgactatgtttaattaggtaatgttttatagagtagaattgtggagagaacatttttggaagagaggatgaagcattttaatgcactgagtataacaagttatctttatttctgaaaatgtgataaatttaaaatagttaacacataagatgttcatggcataattgctgtttatgagattggaagggtaagttagatattgactattcttaaacgatttaaataccattcatttgaatatccaattctttctaatagctttttgagagcatttttcacatccttgtttctgaaactataaattattggattaaacatgggaaatacaacagtataaaacactgccaccaccttatcagtgtctagggaatagctagtggtgggctgtaagtacataaacaggagcgctccatagaataaggtgactgctatgaggtgggaagcacaagtggagaatgttttgcttctgccacctgaggacttgatgctcaacacagtgatgaggatgcagaagtaagaaataaatattaccacaaaagtgctggtctggatgaagctgcacaaagcaaagagcagaagctggttgatctgagtgtctgtacatgataaagccagaagaggtgggatatcacagaaaaaatgattgacgatattggagccacaaaatgacagcctgaatgtgaggcacacatggaccagtgatgttgtacttccactgaaatatgccaacacaatgaagcagacacagactctcctagacatcagtgtagtatagagcagtgggttgcagatggctgcatagcggtcataagccattgctgccaggataaggcactcagcatcagcaaaagaagcgaagaaaaacatttgtagtgcacacccataaggagagatgcttttcctggatgccaagaagtttgccagcattttaggagtgattgctgtagaacagctgatgtctaagaaagataagttgctaagaaaataatacatgggaatttgaaggcttgaattaatattaactagaattattaagagtatatttccgaccatagttaatgtatataccagaaggaataccaagaacagtgtgactctgagaggtagataatctgtgaatccaacaaataggaactcagttggcatggtgtaattactctccaacatcttagttttcttgtttttcccactggacctaggtagtatcagcagatgtgagttaacttgagttatggatgaaccaaaagtatctttattctctcttctaaggaatcaaatagaaggtcagtaaaatcacagagatgtcattttttgtaaattttgattttgattttgtcatttgattaaaggaagtataataattaaagatcaccattgatagcagaaaatgttatttagatggtggtgttttataatatagtacctctttaaacgcgctgcactttatgtgatgataatagtttttacaagctgaaagggataaatgtagctcatgtaatgagacctagtagaataatgagagttggcaaaatctttagaggcaaagctctctttttgcaaccctaaaatcacattcttctacataaaggagagttgagataaaatatgaaagaatgtccatatttaaaactgtgtaatcacacagaagaatatctgtgatgttgggaggttacttaacgtggtagttaagagcatggtaattatggaagagatggctggatttacaacttggctttgctatttactgtttgtgtgactttggtatagttatttgactttctgtgatagttaagatgaataaataaatattcctagtaagtagacatccctacatcacttatgtgactacacatacaagtcactgtgtgagcgctgattaaataaaatttattaaaaataaataaattgactccattttgattgttttggggttttttttgtctgaacaccatgaaatatccagatcattctcaatattcatcttgtctttgacatcatagatgcattatttgttttctgttgtaaaaataagtcgtgtgtgtgtgtgtgtgtgtgctatatacaaatgtattgtttggcatactaaatcttttactcatgccctatcattgttgctttctttttcaagatttagtttactttctaatctctgaagtaagcactgtttggtgtgaggttccagaaacattagtatgttttgaagggctgcatatgcgattggacttctaaactggttctgtaaggacaaacattgtatggaaaaatgaaaaaataatcaagaacaagaaaagctgagatgattttaaataaaatacaatgcgaatggaatattaagcaggaagctagatcatttggaagtgagaagtgtctatggtgagtaacgtagtgagtaactaagggaaattatgagatctattgtctctatcatgcctgataacctcagaacctcctttctccagccaaatggcaaggaatcttctaaatgtaccgaaaagagaagccagccttctttgtgaactcagattttttagaagagcaaataacttgacagggtaagaatgcaatgtgtgtacctaaaactatagtgaagaaatcccaactctgaaaaaatactagaaaaatgtacacatttgcaagctttatataatattcaaatcctcacaactggatgtatattttctctattattcctggccaaccctagcaaatttccacactaacatttccgatgggatggctaaatcgaatacacaggctcatccaaacaagtgacatttccattaatgattttaatgagtttatatattatatccaaaaacaagttatgggatcaaagtcttatttttctttcttgagtcccatgacaactacaaaacgatttaaaggggttttgtagtcaattgtccagtgagagactgagcatctcaagacaactttccttttcctacaggatttatctcacgctgctctgaactgaaatcagaaaaatctcccaaaatgagttggaccccactggatcttagggaaatctcatttgacaaacctcctatttctaaaagatgtctattaataaactttatttgctattctctttgaaggagatacgcagatagcagaaatattagtactgatttcactcaatcttttctttacaaatggcattgtgc

SEQ ID NO: 915201 - DNA, 4001 bp, Homo sapiens
tatcaacggtgagttttgtggcatgttagcttgctttatccatcagctctgtggtaaccttgaaaaccagcacacatggaactatggtagctgaaaaaaacattggcctaacaaccactgaagtgaacaaaatgtgttggagattgctaatgggcctgcttcccagggaattgtcactgtttcacctatttggcagcttcctaggaaaactccattcacaattttgtccctatttcaccagactcagttcactcagtgaaaaagttttattcctagagtgtttgtcaaagcgttgaacagcaattgtttaacattgcaattgcctgaaaatgtaaatatcagttggagcatacaataatctaaccaaactcttaaaaaaaattgatgacggctttagaaatccatagagggctttgaaaagctcccatacattcctggggattacaaaaatcatgcatatgggcaaggccttatgtatgcacaggaaagacctgagaggacctaatgtttcatttgtggctgaacttgaggctctgcacagaggacgtgaagattaaaggcagaatttaaactgctggagcgctgaaaacgtgctccaacacacacatgcaaagcccatgcataaggcttcagagaattagcaatttaaagcacttaaaaaactttacccaattgttagttgaccactaacctaactgagtagaaatttcagtggccacacacaacaagaaatgcagaattaacataagtaactcaggaaaatcactaaacaaacaaaagtaccaccaacaaaaacaaagcctagatgggaggagagatctgatttttagaatatgctattttttattatttaaaatgtccagattttaacaacaaaaaaagtgtcacttaaagaatgaagaaagtatggccaattcatatgtttaagaaaacagtcaatagaaactgtccatgaggaagcccaaatattgggcttggtagacaaagattaatatgaggtggaaaaaattatcttattgtgaattctttataattaaaatatgaatcctatagaggcctttgccttccctacagtctttttaaaggcactcttaacctctttgttcctcaggctgtagaccagtggattcaacatgggaatgactatggcatagaacacagatgccattttgtctgtgcccatgaaatggctggagttaggtcgtaagtacataaagattcctgtcccataaaagatggaaactgcagtaaggtgggaagcacaagtagaaaaggccttctggcgtccttcaggtgagcgcatcttcatgatggtgataaatataaataagtaggagatcaagattaccaggatagaaaagaggtcattgaatcccaccacaaaaaaaataaccatctcactgatgtagttgtctgaacatgagagagtcaagagaggaggagcatcacagaaaaagtgttcaactacattggatctacagaaggagagcctgaaagtgttcccagtatgaatggatgcattcaggaaaccacagatgtaggagcctatggccaggcaagcacatacatttgttgtcatggtggtggtgtaatgcaggggtttacacaatgctgcatagcggtcataggccattgatgccaggaggaaactttctgcagtgataaaggctacaaagaagaagaattgtgtggcacaagcattatataatatgaatttgtctcctgtgagaaaccccaccatcaccttgggagtgacagctgaggaataaccaaagtccaccagggagaggttactgaggaagaagtacatgggggtgtggagacaggagtccagtagaatcaattcaatcatccccaggttcccaaccagagtgatgaggtagatgaaaaggaagactatgaagagtgggatctgcagttctgggtcatcagttaaccccacaaggatgaattcagtcacctctgtgttgttctccattgggaattatgtagctgccctgtagaaatgaaaaggcagaatcagaatgataaatggagggaggactactgagatcaatcagcatgccatttttttgctttattccagtattgtaattacttgtttccaggagtcccggatctaaaacatgcccatgaccgcaaaatgcaactttaaattacaataattcatagagcattcttaataaaatgattttggagataattcatcccgaactcctaatttcatagattaccgaactaaggtacagaaaaggaagattcatacaagatcatcagactaattaattggaacaggtgaaatataaaaccaagtcactttgaattaaagccttaactctttatcacaaagaaaaattcctttaaatcttttacattcagtctaaactgggcacaagacagtaatttatttaattgactgactgcctgatggagtaattaaatctatcattgtaagtcaatgtgaagaatggaatagcatgaaattaggaatcaaatatacttaccagttttcttggcttcatgcaaataacctacatttctggatctcagttaaatgataataactggatccacaaatgtttataactacttccaacccttaaaaaaatcttcaaaaagttaaaaaggaacatgactcttcagtaataccaaccaattgaccaatcaacataaatctctggatgtgttcatttctttattctctctacaagctctaatttcgaatggagcaccatgtttcatgctaattgccaggtttacattaatgcaagagatacatttcctgaccagatagatatctaaactgataaatattatgtttaagttcagaatattcttattctccattcccaaggagacagaagtgttttcttatttgctcagaactgtgtgatagatgttaatcacatctacactgtagaccatcagtcggtccacaatatagtttataaattgtgtgtccaatgaccagatgtttttagtgacagaattagcacatgagattaggtctcctcattccaatagttagttgtgccttatgtaattttgcacatctctatttcagtgcattttataactggcttgtaagcctgatttcttcctcatttattaatcaccattccttctgtctctctttttaaaaaaatattagtatgggcttccagattatggtaaaattttatgttgatattccatttgactatctcaacaattgtagaattaggagaactaatattatcatatttcctgaaaaagaaaactgagaaataaatagtttaacttgctcaaagtaatgcaatcttattctttgtaaagcagggactcgaggccttcttgtgctttttctttatgtcacatgataagtaaacacattctacacaagttgggaatccctaatccaaaaatccaaagtctaaaatgcttccaaatccaaaactatttgagaaccaacatgatgctacaaatggaaaattccacacataagtatgtagcacatactttgtttcatgtgcaaaaattatttaaaatattatgtaaaattacttaggctatggatataacgtgtatataaaacataaatgaattttgtgtttaaatttgggtttcatccccaatatatctcataaacatgcaaatattcaaaaattctaaaaaatccaaaatccaaaacacttctgttcccaaatattttagatgaggaatactcaacatatatagcctctggatgtgtgaaacagataaaagaaatagtcaaaatattagagccaaatccctgattaaaccaaaggagaaaggggtacctcgatgcatttttctagttacctctgcccctgtaactttgtgcagacaatagatttgatccagagacttacctttctccctgagaaatacaaaattcaggtccagcactttcatatataagtgaatgtcacatcagaaattaagtcctttaaagaaggaaaacaactttttggagactgttctttagcgtttggccaaaa

SEQ ID NO: 915202 - DNA, 4001 bp, Homo sapiens
ggttcataatcaagtaatgttttcctttatttagattttattgaacatctttcaactaggttttatagttttaagaatataagcattgcagttctttttgtaatcgtttttactgtgcatcttatttttgatggttctgtaaatggaattttcttcattttatttttagattacctattgctagtatatagaaataccacttattctggtatgttgttattgtatccctgacactttactgaattgatttattagttctaataatttttaggggattacttatgatcttctgttttttgagacggagtctcgctctgtcacccaggctggagtccaacggcacgatctcagctcactgcaacctccgcctcctgggttcaagcgattctcctgcctcagcctcccaagtagctggaactacaggcatccaccaccatgtctggctaatttttttgtatttttcgttgagacagggtttcatcacgttgtctcgcctggttttgaactcctgacctcaagtgatccacctgccttggcctctcaaagtgctgggattacaggcatgagccactgggccaggtcatgattttatattttaaatagcaaacagagattcttttatttctttctctcagttcaagatgtctttgatagtcataggctaagtttaaaaaaaaaagaattatctctgccttttaattctaatatattattattctaatatagttatttaccatttataaattgtcatatgaacaagctgtaccaaatacctaaaattattaatgcctgaaatattagtttattaagaaacagtaatgactcatagttggctaaaatatgacaagagacaacacatatttcattaaactccatgagaaattgtcatcgtatttttctaactcgtggatacttagaactgtttctcaactaaagacaaaaataatattagatgaaattttacattctatataccatatagcattttaacatttgagttattgtataaagtagatctaagtgagataaaataacattgtgatgattttgcatcattaaaagactgaatctagagaatattttgccttctcaacaaccttcatgaatgcattcttcacgtctttgttcctcagggtatagactataggactgagcatggggatgatcatagtgtagaacacagatgcaattttgtctgtgtccatggaatgactggaacttggtcgtatgtacatgatgatgacagttatataaaataagaaaatggcaatgaggtgagaaccacaggtagataaaggcttctggtatcccttacctgtgtgcctcttaagaatggtgatcaatatgaacagataggaaatcaaggtaacaagaagtgcaaaaaagacattaaaacttgatataagaacaagaatcaactcactaatgtgtttctcagagcaggtcagagtaatgactgctggtttgtcacagaaaaagtgatgaatcacattggacatgcagaaagagaggcgaaatgtatctccaatttggatagaagcattcagaaaaccaatgacataacagcctatagccagacaagcacacacacgtgttgtcatggtggtggtataatgtagggggttacacactgctgcgtagcggtcataggccattgaggacaagaggtaattttccacagtggcaaagactgcacaaaagaacatctgagcagcacaggcactgtaggagatggctttgtcttctataagcaacccagttaaaacctttggagtgacagctgaggagtaaccaatgcctgcaagagacaggttactgagaaaaaagtacatgggagtgtggagatgagagtccagcaggattaatatgatcatccccaggttcccagtcagagtgatgaggtagatgagggtaaacatgataaagaggggaacctgtagttctggggcattggttagaccaagcaggatgaattcactcacctctgtattattctccatggatgttattttagaatcacaagatactctgtagcaaggagagataaaaaagaaaaaccctgtgatgaacaaaacagagttgcacaaaactgaaatgtatgtgttattttattatagcaatgatttgttttctatatttcctagatcaaaattatggatatgaaaacacaatttagtggataacttatctatacagtaatagacttttgaagaaaaagggtcttcgtggatcatctttccagcttcttaattttgtgtctgagtaaatggagtcataggaagggaataatgagttgtccaatgtcacatgcctgaagtgaatctatctcccaaataatatgttttttgaatctaacatcttaaacacacttatagttgtctcatgccagatgctttatatgtacatcctcatagaattctctcattaatcctattatttaattagttattattgccaatttatacatgaagtatcttggtagaaaaaaagagtttgaataatttattcaagattacacaagcaccagtagatagaaccaagctttagacacaatcagggtggttcccaacctaaattaaaagaattaaaattcttttaatgaatttgaattattttaaatgttaatctatttatatgtactcattctatctattataccaagcataacatatgaagttgcatagtagagcaatgcacaaataaatgcatactagatgaagtggaataaatgcagcattaatgtcatgtgcaaccaacaaagccaattctgcagagaagatatagcattgggtataaaatctaggactctaagaagaggtagatttgtattaactcataagccctaacatttactacttgggagacactggtcttaatctaacttccttgaatctcattttatccattagtcaaatgaagatgatattaggacttatgtcaagagattattttgagagttaaatgagataatgctcagctgttggcaaaatgtgggcactcagcacagtcctgatgagtgctagctataatattattattaggatggaatggtggtgcatatgttggtgtagaacacatagaggtgacacacagggctgaaggtgtgggtgggttttcaagttggcagttttactctgtctgatctgtattttcttacacactatgtccagtcttttgtttccttcagcatttctcactctatccattctttgccaggtgaatgactgtgtcagccatctagcatgagaacccagggatcttcaagtcctgttgtgtttaatttctccctttcaaactacattttaccttgtgttgaaacaatccccttttatcttagacacattcttcctgtcattactctcaacacttagcaggatatcagatattgagggttggaggttcgtagtcttgggggctgactgtaggctgcagatgtgtttatgcacaatctttttatttgaatttgaatctgtcagaaggacattcatttcctcataaccactattgattgtctatcatttttctcctgcccccagtacacatcagttgacacttctagaattcaaattatttgtttgccaaaaaactacccacataataatataagctacaatttttattgtttttctttaaaaatttactatgttctatgacaactgaaaggttctcactgtacctacctggataatctaggataatcctaccatctcaacatgttaatttaatcactgtgaagtttgtaaaaaaatcacataaggccacatgtttatgggtttcagaagttaagatatgaccacctttggggaacattattaaggctgccataatgagtatgaatattatatatcataggtaaattatctctagaatcagaaatggttgagacatcttcacagatcacatagccaacttcctaattgtatatatgaatcactagaggagcagagaaagtattaaattctcaagttcacatatctggaatacattgattttataaatca

SEQ ID NO: 915203 - DNA, 4001 bp, Homo sapiens
agtgtgataccacttgacaatagacaatattcagtgctaaaatgaaatgagctatcaagccacgaaaagttatggagaaaacagatgcatattactatgtgaaataagccaatatggaaaggttacataccatatgattttaactatatgacattctggagaaagcaaaactgtggagacagaaaaagatcagtagttgtcaggggttagggaagaaggaagaatgagtaagtagagcatagaagagctttagagcagtgaaactactcaatatgatactataatgataaatagatgtcattatacatttattcaaatccatagaagggacaacagcaagagtgaatcctaatgtaaattatggtcttgagatgataatgatgtgtcaatgtaggttcatcaattgtaaaaaatgtagcactctgttggaggatattgacaatgagggagggtatatgtatgtgggggcagaaggtatatgggaaatctctgtacttacctctccattttgctgtgaacataaaactgttcttaaagtctattcaaaaataaatttatactataatactaaattaattacttacatcctttatataaaaactagccacactccatttacttctgagtaaatttctccttctaatgcctatgtgcccacaagaggcataaacatgtacttttttgtgggcttgttggtgtccctgtttaacaagtatgtttgcactggaatgtggtagaaaaaatgcaaggggaacaagtgagtaaaccgaatgtcattagtaagttttgaccagcaagttccaaaaattctaacatttccatttagccttcctcattcaggtattacatttctgataatattttatttttattaaaaaattgacttctaaagaggtaagaatatcacctcatgaacttaaatgtattgtggggtttcaaatgtaactcattgcatgaggaaagtctgagatgagggaaacaacatttttgtgtatacaacaatgttaaaattccaaacttatagaaatttttgccttctcaacactttcttgaatgcattctggacttctctgttcctcaggctgtagaccacagggttcagcatggggatgatcatagcatagaacacagatgccattttgtctgtgtccatggagtggctggagctgggctgcaagtagatgaagattactgtcccatagaagacggagactgcagtgaagtgagaggcacaggtggacaatgctttttggtgtcccttagctgaatgcatcttcaagatggtgatgaatatgaacaagtaggagataaagataactagaagaacaaaaaagatattaaagcttgacataaaaaccagaatcacctcactagtgtgtttatcagagcaagacagagccatgactgctggaacatcacagaaaaagtgatgtaccagattggatttacagaaagagagactgaatatgcccccaatgtggaatgaggcatttaggaagccacagacatatgagcctagggccagacaggcacctacactggccgtcatggtggtggtgtagtgtaggggtttgcacactgctgcatagcggtcataggccattgaggccaacaagtaattttccaccgtggccaaggctacaaagaagaacatctgaacagcacatgcattgtaggagatgaccttgtctcctctaaggaacccagccatgaccttgggagtgacagctgaggagtatccaaagtccaccagagacaggttactgaggaaaaagtacatgggggtgtggagacaagagtccatcaggatcagcaacatcatccccaggttcccacacagagtgaggaggtagatgaaggtgaacaagataaagagggggatctgtagttctgggacactggttagtcctagaagaatgaactttgtcacttccgtacaattctccatcagtattatctgagaaacttaagatgacctgtagcaatgagaaataaagcaatagagtgataaacaaaaaaagagatttagaaatatataaatactatatgcattatgtaattatagcaacaatttgtacttcaaaattctatagatctaaagcataggcttggtaacaatctttaatgcattatctacagagttgtaatctgctgaatccaggggatctttataaataatatcccaatgtttccattttataaatttataaactgctatgtagtatatttaatgatgtgtccaagatgactcatctggaactaatttttctgccaattcagttttccctaatctggtaaaacttatacatttatgttgctcacatactgggaaccgctctaggcaatttgtatgtatattgattcctctcaacaatataatgaggttgattcgttattacatttatttaatttgtgaggctcacaagattaagtcatttattcatatgtacacaagtgttaatagtcaagcctatcttctggctcaggagagtcgttctcaagctcaatggtctaaattgaatctaaatcagattgaatttgaagcaatttacaattactcattgtctttgttggtgcaaacttaggcaggtttcacagtgaggtaactgagaggaaaatgcacattaagggtctcaggatagctggagaagtagggaaatgtgcaactagcaaaggcaattctgaggggaaggcagcatcagatatagagtttgggattgggaagaggtgcttatcagccctaccatttactgcctaggcagcattggtcccacactaacttccctgaaccttatttattttatctgcagaatgaaaatattaatgagatcaacctcaaggcattattttgaaaattcaatgttatacatttttacaacaataaacaaaatgttaaatgtttagcacagtctgatgagagctagctataatattatcgttagaatggaatgatgatctgttagtttcataaaggaggatggcagggctttgtgtgttggtaaattttgaagtcttatagccccttcttcaatttgtctttcctcacataccagggctactgagattttctgtgcctcccaataattctcattctgtcttttttttcacccaaatgatagactgttccagaattctatgtgaaccattcttctgtttaatttcttccttgaaatttacattttagcttggtttcgcagcatctcctttacttaaactcatgcttttctttcatttatgtcatctcttagttgacccttatagtttaaaatgcatcgttcgtgggtttcctttagtctgcagatctgttttggtggcaggttgtaagctataaaattattatttagatcagttcttgcatatgaatagtgttttaaattagaaagggcattcatcctctaactactattcatctgctaactactactgcctactgtctttccacactgcataagtttagcccatgaaagcattatgtttgccaaacttaaatcacataatcacttttagaatatactatgttctacaacagatgttaagaactttttatataaacgtttacatgtgtgtgtttgtgtgtgataagtattattgttattactattttaccattataagaatttgatatttgaaaagttttgtgatattctacaattatacaactagtatggagaacagtcaagattcacaattgaaaccaagttccaacctaatcaaaatttgtgcttttagctacttcacaatgagcattagattgctagtcataataaggatgagattatgggggaaaggttacaattctgtatgcatcttgctaacttacttagatccttttgtagtttgaagagctgtcaattcacacttctgttatttttgtttgttttacttcaagtagaagcctaaccaatagtgaataagatgaaattaccacctacttaatcagagcatcatctatctcatttttttcatcttctttagggaagcagtatcactgaacaccctac

SEQ ID NO: 915204 - DNA, 4001 bp, Homo sapiens
cctgaaggtgtactagcactgtgcgtcaccgtgctgttcctaagaagtaaatttccaggcaggcttttttattcttgtagcatctaattacagaacaccggaatgcaatggagacccagaggtgagctgaattattgaaaaagtaaaagcaaagacagtccagaaagctattatatatcttcataatagattcaccaaacttaagggtgctaagaaatgcaagcatttaattcagaaaacaaatatattttttcatagctctagggaaaactgctttttttctctaaaccttctggaagttttggtaattatgttagacagagacaagaaacataaaagatagtgtaggctctccgaaggaagttgtatttagtcaggttaaagttgaagtaattcatctattaaagcattcccatatttctgtatataacaaggtgtaatgtttccccaatgatttagcaaaagggaatggaaattacaaaggcacatgactagtgagtaggataggaatgtgggtagagaagggagagtaaggggttggaaagatttaatcgtcagctacctgactcgatctagtgccttgtcctttaaattacaactttctctcaaatatcatttaaaatattgaaacatcctttgtctacctcagaaagtccaactttcaaactcgcagaacaaaagaataaaaaagatactgtgtgttcagttgataaaaatgaaggtgaaatctttacaccaagtttaatagtgaatgaaaaattcttacaattaaaaacaggatgaggaaaatttggtacattcatttgtatgcttcaatcttctgctttaaaccacgtcaagaaactaaagcaagaaaagcttaactgtcccatgttgttgttcactaaatataagattatctttctaagtaagactttcaacgtgctgctttttacatcttctaatagcagaagtaaccgctgttcttggggaagaaagaactgaaaccagtcaaacgttaaaagtcatgatggcatttaggtgtgagagaaagtttatcccttaattgcttgcctacttcccattcacatttaatattgggggtaaagtttgttgagtattttccagagagcacttttcacttctttgttcctaaggctgtatatcaagggattcagcatgggaatcaccactgtgtaaaacacagaggctattttgtctgtgtccacggactggctggagttgggctgtaagtacatgaagatgattgtgccatagaagatggacaaagcagtgagatgggaagcacaggtggagaagactttcttctgcccttcagcagaatgcatcctctgaatggtgatgcatatgaagaagtaagaaataaggatgaccaggagggtgaaaaagacgttgaagcctgccacaaagaccaccaacttgctgatgcgtgtgtcagagcatgagagagccaggagtgggggaatgtcacagaagaaatgattaatctcattagaaccacagaaggagagtctgaaggtgcctgctgcatggatagaggcattgaggaagccagagacataggaaccagtagcaaggagggcacacacacctgctgtcatggtggtggtgtaatgaagaggcctacataccgctgcatggcgatcataggccatggaggccaggaggtagcactcaacagtggcaaaccccacaaagaagaagaactgagctgcacatccatcgtaggagatggccttgtcccctgaccgcaatgcagccaccgttttgggggctacagctgatgagtaacccaagtctacaagggagaggttactgaggaaaaagtacattggagtgtggagatgggagtctgagtggatgatcaccatcattcccccattcccaagcagggtgatgaggtagatgaataaaaatgccaggaggaggggtatctgaagattggggtcatctgttaatcccaagaggataaactctgtcacttctgtgctattctccattgtggccagcttgaattagcctggtgattaaagaagaggcgtcaacaaaattccaatgaaagtatgagaagggaggatggaatgataaaaaaggagaaaactaatgtatagagagaatgtactgtgtgtaacactcatcctagaaccctctgttatattatagcttttaattcatatgagataggtgctattatgcccatcttacagataaggaagttaaggctcagggagctgaatattgagcaagatagcctatctaggggtcagaatcaaagttcacccctttatatttctgaatctaaagttcatacattcatcttgaattctttaacacatttacatcatataaatacaaattatgatgtggatataagattgtatgtatttaattattaaaaataaaaacatccatcacttattgtcttccacattctacttccaataatatagcctcactaaagattttctaaatttatttttccttaaaacaacacaagtttattctctcaaaattctggaggccagaagcctcaaatcagtttcactgggccaaaatcaaggtgttggcaggacaaggtggtgccctcaaggtctgtttgatactaaatccaaagatcttaaccacaacttttgaagcctttataaattaatccctcaacagtagttcaactgaaagggagtatggtatatgtaaatatgagtatgtatttatatatatttaatataaaactataaatttgatatatacaaatggctttgtgtatctgtgtatatgcatatgtcttttttcaccccttatcagaagtctttgctgtagaccctaattccagttaagtcctcctttctctccctcctcaaagcacttgagtcttggctgattattgcacaattagctgggcaaccactcactcttcacctagctctaagccccttgggacagtaactatcttcatcccctctggtccactctccttaccatggcccctcacacatgtatgtaaatatttggtgaatcaaacagaacatcaataggaaagtatggaaatatttttcatgctctttaatcccacaacaaacatcctatcatcctcttgtctaccaggtttgtgctttgggccaaaatattagcttagacttgtcatatgaaaaatattcaggagtaacagtgagtttgcagatggtcaggcctggagacaggtttctgtcctcattttagagcattctttctctcctatttttgttcctcaacctgaggtgttcacaggctttccccactcctagtagcagagtgagtgggagcagactcagaagaagtgagggagaaaatgtgagaagagaggaggaaaaaggagaaaacaggaattaaaggagaaaaatgcttcagctctgctggactttagcttaccttgaagagtaacagcagcaatttgattggtgacacaaaaagaaggggatagtgtagcttgtcctttttggatgaccatcacacacacacgatgtggctagtttcataagaactggctcagtcagcttggtacattactatccagtaatgtactaattgactttctgaccagcatcactttctattatatttatccagccttttttaacttgtttttcttttgacttttgacatgtgtgtatactctcaaatttagcaaacacaatatcctgtaatctatgacaggcagtgttctgatcttacatatttggaaacagaaggatgtggtgcccctcaaggtcacataactgcttaactgtaaaatctgtacaattccagagcctggtttttcagcctcagcactactgacattatgagctggacagttctttggtgcagggtgtggtgggggagagggagtgctgtcctgtgcattgtaagatattcagcagtttccctggcctctctctaatcactagattccagtaacaccaccacctcccatttgtaacagtcaaaaatgtctccagacgtggccaaatgtcccctgaagggta

SEQ ID NO: 915205 - DNA, 4001 bp, Homo sapiens
ttcagctaaataaatttaaaagcattaggcttaactttatattccactacccaaattaagtatttaaattatttttatcaaatattagtgtattagcgttctacagagaaacagaacagagagatggatagatgatagatagatagatagatagatagatagatagatagatagatagatagatgatacatagataaaaggagatttgttatgcgaactggctcatgtgaatatggaggctgagaagtctcacaatatactatctgcaaactggagaaccaggaaagccagtagagtaatttggagtttgaaggactgagaaaggtcaggacagcgttgtggaactggtataaggcctggaggccaaagacccgagaaaccaggaactcaaatgtctaagaacaagagaagatgaatgacccagctcaagaagagagagaattcatccttcctccacctttttgttcttttcaggtgagccctcagtagattgaatgatggccacccatactggtgatggcagatcttcctcagtctcctgattcaaatattaatctcttctggaaacatcttcacagacatattcagaataatgtctaagcagctatctgggcatcccttaatccagcgaaactgacacataaaattaaccatcagaacttgccacattacattgaatccaggcacactttccacacctatggaaaattccccacttcatgggaaaccttcatgtacttctattaatggacttgtttttgctctggttttatgcatatttgcattgacatgtggtagaaaaaaaatggatgtagaataaatgaatacattaatatctttaaggtttttggcaaggaagtcccaagatgtcttagccattcttgttcagatgttatgtttctggacataatgtttccttttatttagacaatagacttttaaacaggcatggcaatcacttcaggaatttaactttattgtggaccttaaatgtgattcagaacatggagaagatccgagagaaataaaactaggttatggtgcatcccacaatgttaaactgaccatcctacagacaattttgccttctcaacaactttcttgaatgcactcttcacttccttgttcctcagactatagaccagagggttcagcatggggatgaccattgtatagaacacaggtgccattttgtctgtgtccatggagtgactggagctgggttgtaagtacatgaagataatagtcccatagaagatgccgactgcaatgaaatgagaggcacaggtggacaaaggcttctggtatactgaagctgagtgcatctttaggatggtgataaaaatgaatgtgtaggatatcaagataaccaggagagctataaagatattgaagctcacaacataaataagaacaagctcgctaatatgtctatcagagcaagagagaaccatgactgctggaatatcacagaaaaagtgatggacttcattggacttacagaaagagagactaaatgtgtccccagtgtggatggaggcattcaggaaaccacagaggtaggagcctatggccagacgagcacacacagttgttgtcatggttgtggtgtaatgtaggggtttgcacactgctgcatagcggtcataggccattgaggccaagaggtaattttccacagtggcaaaagctacaaagatatacatttgagcagcacatgcattgtaagagatgaccttgtcttctataaggaatccagccatgacgatgggagtgacagctgaagagtagcaaaagtccactagagacaagttactgagaaaaaagtacatgggattgtggagacaggaatcccagaatatcaatacaataattcccaggtttccaaccagagtgataatatagatgaaggggaacgttataaagaggggaacctgcagttctgagtcattggttagtcctagaagaatgaattgtgttacttctgtcttattttccatcactgctctgggggactcacaggatgcttgtagcaatacaaaaaagaacagtgtgataaataaattgaattaaaattgaaaagtataagtacaatatgtattccttcattgtagcaataacttgtacttcaagattccctagaaaaagcgcggccttgacaaccaaatgcagtgcattaattatacagagttacatactgttgaaactgaagaatcttagtagattatctacacaacttttagatattataaatgtgtaaactcatatttataaaatttactaacctgatcaagatgactcatctagatgcatctatctgtcaatttacttttcctgagcacagtaaaagctgacacatgttgctaatttaccaagaacttctctagacatttaagatatatattcattatttcctttctacaatattatgtatttgattagttgttgcattcatttaaattatgaagcacaggaggttgagtaacatattcatatttatacaagtattaaatggcaagccatgctttggacccataccaacttttgaacccatgctgaatggttcctaaatctaatggtctaaactgaatttaaatcaaattgaatacaactgtatttacaatcactcattgtctcctttggtacaaactcagtgttttgagtttcacaatgaagtaagcaagtaatatatgcttagtaaatgggctggggtaacagggttgtttggggcatgttcaactaccagaaacaattctgagagaagcctatcaccaaacagagcagatacagagcttgagttcttgaaagagttgcgtatcagtccacgacttaccacctgggaatcactggttctaatctaattcccttaaacatcacattttcttctgtaacactaaaacagtaatgtgacctactttgaggtattattgtgagaattaaataagataatccattaaaaatgctagatgttaagcacagcctaatgagtgctagttataatattaaatattattattagataggtgataatctttttgttggtttgataaaggtggatggtgacaagcagggctgcaggcatgggtgagctttgaaatcttgaagctcccacctccaattttcttttcctccatgctaggaccactgagattttctgtgttcttcagtgattttcaggttgttcttcctccaagcaaatgattgtctgctccggaagattcacatgagcctttctttttcttaatttctcccttgaaatccacattttagtgtgggtaaaaaagtttctttttcctaaagccattctttctcttattactgttattccatagttaaatcaaagattaagggttaaaatttcctactttatgggctatctttatttagctcacagatctgatttggtggcaagttccatgtgataaaatattttatttgaatctattcttgttttggaacaatattttagtatttatttattttaatgttttaaaatttcaactttcattttagatacaagggttacacgtgcagatttcttacgtgggaatatgcatgatgctgaggtttggagtatggatcctgtcaccctggtagtgagcataccatctgataggtagtttttaagcccaccctctctttctccatcctctagtagtccacagtgtctattgttcccatatttatgtccatgtgttctcataatttagctctcacttattagtgagaacatgagttatttggttttctgttcttgtgttactttgcttaagattatggcctccagattcatccacgttgctgcaaaggacatgatttcattttttagggctatgtagtattccataaatctagtgtacagattactatttgacccagtatatactcaaaaggtaataagtcattttactaaaaagacaaatacatatggtcaacctaaatgcccatcaatgatagactggataaagaaaatgtggtacatatacaccatggaatactat

SEQ ID NO: 915206 - DNA, 4001 bp, Homo sapiens
atggtttgtcttcttgttttgagtacaatagttctttatatgttccacaaacaaatcatttgtcagacctaaatattacaaatatttatttacaatctgcagcttacattttcactttcttaatgtgtcttttgccataaaaaaaacttttaacataaggttttattgttaataaaattcattttatccattttctgatgatccattcttttaacattctatccaaaaaagttccacccaaactttgaaaagattctccctatgttttatgctaaaaggtacttataacatttacatttagatttatgatatatttcatttaattcaagttagtagctttgtatgatgggaaataaaacttatggctcttttgttccacacgaatatccagttttcccattattatttttctccattgaattataatggcctgtttgttggaatataagttaccagatatgtgtgacttcattttaggactctgttaccttaatatcccattgcctgaatactcagataattttttagaataaaatagggcatgcattaagaaaggtagagtaatacttaattccatttcatttgctaatcagcaggctataattttcatgaataaaaatcaacttcttccattcaaaacaagaaaaagtaaagggttggttgttccacaagacacagtaagcagaagttttgttaaagtcactcaggaatatggttttcctgattacaattttagggaaccatcctgaatctgcacacatttaatcagtttgaatcagttttgctttgaaaatacacataaaattacagaatacctagaaaagtattttaaaataatttacaaatactgcaacagatgatataaaagctttaggttttagaatttttagttacatgtcatttagatctatttcaaaaggttgtgctggtgtgaatgtgtcaactgatagtctattgattaaataatttgaataatcaattgcactgtaagagatgggtaatctgtaagatagtaaatcacttttttcagaaataacgtatctaagaacatcatattcagtggtaaatcaatttggtgacaactaatttttcaaacatgttattgatatctttgttcctaaggctgtagatcaatgggttcagcattggaatcgccactgtgtaaaacacagaagccactgtaactatgaggctagaagttttaggattaggaacacagtaaaggaaaaggatagttccatggaagatagtgatggctgtcaggtgggaggcacaggtggagaaagttttctggcgcccacttgcagatcgcatcttcataatggtagtgaaaataagcatatatgatgtcagaatgataattaggctgctcacctcattgaatatggcaataataaagcatagcctctggctgatataggggtctgagtaggaggcagaaacaattacagagtggtcacagataaaattatttatgaaggtagattcacaaaacgataagtcaagaagaaaatatgtgagtatcagggagcacactatcccccatgtataggacccagccaccagaagagcacagagcttctgagacataatagtggtatacagcaagggtttacaaactgccacaaaacggtcataagccatcgctgctaacatgaaagtttctgtcactccaaaaatgcaagcaaaacaaaattgcatgatgcaaccagagaaagagatggttctgtattccacaaccaagttctccaacagtttaggtgtaactacagtggaaaaacagaagtctgtcaaggacaagtgactaaggaaaaagcacatgattgtatggagttttgaattgagtctgatgattattatcatgcccaagttccccactacagtgactgtgtagacgaacaagaaaaccagaaagagtggaacctggatttctgggtattctgaaaaacccaagagaataaaagtgggtgtgctgctttgatttctttcagatgccatcatgatacttgttggattaaaaggaaaaaagttattcttgaaaagcagaactggataggaaaaaagagataggaaagaggcttcatgtgtttctaggacaagtgatatagaacagtgattctcaaaatgtggtcatcaaaccagcagtagcatcacctcctgggaacttcctactattgccaattctccagctccatcaaccttctgaacagaagctctgggatgaggcccactatttgtggtttagtcaagtctccaggtgattttgatgcctgctaaagggcaaaaaccaccacttacatggaaaatatacagtaatcattctattattgaaaagtcagccatttttagtatgattgacatagaactgaaatatatattatgacataaaatcaatttttaaaaactgagaagcacaaaggaaaccttctcatggatctaaaaattacactgaggatcaagtaggtgatttagcaccgccaatggtggcacataaatgttactattttctacctttgctgggcataacacagaattaaatgattgtagaatttaagaatttaaataaaccataaaatgtatatagcctatgccttgcacctaatcctcaagagtttgctgtggaagcccatttctaagatgtttatgtagcttccattaaaactttcatcaatgtacattgcctcctggagtgtttttatgggcattttgacaatttgctgaacttttattattttattaaataaagtcaattaattaaatttccattacctgttccttgatgtgctttaggtcacatcttctgagatatacatatatatgtatacatgtatgcacataatatgtattctatatgtgctaatacagaatatgttagaaaaatagaaacatctgtagttgtcaaaaatattttcatacaaaatatattctctgataccctgaaagttgtataatgaaaattacacatgttcttaaccaataagaaataaataatctctctttctttttttttttttttgagcttgaggcaattttattgaaattagtggtaagaatgaaagattacagccaatctaaaatcagtgggctacatcaaattataaacaaaggttgtaatctagtcattcaacatgcactgtttatatggagttatttctatttatttatttttgtttgcttgtttttgagacagggtctcactctgtcacccaggctagagtgcagtggcaagatcaatgctcactgcagcctcgaactcccaggctcaagtgatcctcctcagtagatgggactacaggcatgcaccaccacactaggataatttcttatttttctctagagacagggtctcactatgttgcccagggtgttctcaaacttctgagctcaagcggttatctctctttcatgataagacaaactttaagaagacaggggagtgaaaataataaaacctaaagtaaatggacttgttatgagtgaaaaagcatgaataaaaataggacgatgcagcagaaatccatgtatatttcttttttcatcttctcagctttccctgaaatgagtgccaagctccagtcctatgcatttccttacatgcactacaagcaaccctcaacacagagcattcatcatgagcatattctttccagtaccaagtgggcctgggtgatttcactttaagcattcattatcatttacacaatgctaatgaatggtttgcccttcaacgtttgaccagagtagtgaaggctgctaccactgcttgggatacttggcacagttaataggtcaataacaaaagagattctcagaaagagacctgatatttaaggcttagctatttcaaaagcatttcataaacatcaatgggttgtcattaggcttgtactcaagacaaagcaggcacagggaagttcaaaatcaacaaatatctcataagtttttgtagacttttctccattgttccctagtgccaccactagcggtgtctgtattacaaa

SEQ ID NO: 915207 - DNA, 4001 bp, Homo sapiens
aaaagcaaaaattcttcatagatgattctgactactgtacattgcagtccattgagaagcacatggtaactggttgatgataactgtttgtccaacttttagtgatgatcattctgatctctgaattcaggttgtgtcaacttagttacttcatcttaaaattatccacaaactttttgcctaatgattattatgtctgttgaaatcattacctttattcattttttaaatgtggagttctacagttgtgattgtccaatttcatccttgtttatgcttttatttcttctgaaattcacctcattaatcagtaggtgatgctgacatactattcatataggaaaaatagaataaatatatatattatttaattacttattttcagagtaatgaattggtgccctaatatccattgatattaaacaatggcttatttatttttttctttttcagtacctagatttaaatctatatgaggactttaaatcaattgtaatcaatatccatttttatgtttaaaaagttttttctgaccataaaccagcatcagccatttcaaattgcttcctatatctctttgagacaatctgattagctgctgatagtattctatctttctggagcattaaattgcccaaagctcatcttgcctattttccaccctagacttcaaattagccatttctccaagaagccctagttttgttcctaggggaaaggtttctttttagagaaaatttggagaatgttgcttgaatttgtatagtatttgttaccaaatatttgtgtttatttagtcattcatataaaagttagaaataattttgaaatatggtttctcattgttttcagattaaatgtttattttcattcattttgtataaactggactaaacttgtagagatttctgaacctgataatactgggaatgctatatcaattcacatttgacaattccataaaaacctcatataaatatatgctctaggctttagaaacattgtagcctctgtttgggttgttcatttggattgaaaacaacttttgagactggttcagtgaaatggaacttgtgtatgtattaacttccagaaagcatccttcacgtctttattccttaggctgtagatcagagggttcagcatggggttgacaactgtgtaaaatacagaggccactttgactgtttgccgagagtttttggagttgggtacacagtaaaggaaaaggatggtcccatggaagatggtgatagaagtcaggtgggaggcccaggtggagaaggctttgtggcgcccactaacagaacggatttttagtacagtcacaaaaatgaaaacataggaagtgaggatgatcagtagtgtacacatctcattgaaggtggcgaagctgaaaagcagcaggtgggggatgagtatatcagagccagacacagagatgagagcagtatactcacaaaagaagtggttgattacattaggtccagagaagtttaaccggagagcataacaaaggagtaccaaggggccaaacatgccccagagatatgacccagccaccagcagggcacagagcctctgtgacatggccactgtataaagcagaggattgcagatggccacaaagcggtcataggccatcactgccagcaagaaagactctgtcaccacagcagtgcaggacaggaagtactgcatcatgcagctaaagtagaagatgcttttatctgccattaccaagttctcaagcagcttgggagtgacaatggaagagtaacaaaaatcaacaaaagagaggtgactaaggaaaaagtacataggagtgtgaaatttggggttaatcttgattattatgatcatcccaaggtttcctaccactgtgataacatacatgagcagaaacacaaggaagagaggaatctgaagctttgggtaatctgtgaaacctaaaagggcaaaggtgggctccatgctcagattccttaaaaccatcatcataattccttttaatggaagggttgaagagaattgttcctgccaaagcaaaatatggggtgagtgataattatgtcatgactttctttgattaaaaggaaaaaaggagaaggaatagttactggtcctagttttgtccaagaagaacatacctcatgcaggcagctgttatgtctaaaacaaaccaagccaagtctttggagtgtctttccatttttattacactttctgttttcatacatatatatatgtgtgaatatatatgtgtatgtgtatgtgtgtgtatatgtgtacagtagtatacatgtctacacattaactagtagcatgacatgcacataacttatagaaaatgtttatacataaatatataaactaataaagattctgtggaaaatgtaaaatatttacatcaaacaacaacatgcattgctactgtatttgtttatatagacaaattgattaaaatattcagaatatatttctattctaaggataaaggaaaatattgtagaaatctggaaaaagagcacactaattccactttttaccaacttttattctagaaaggctacttctctcattgaatatcttagttgctgaggagttgacaaggacaatggcctacttttgacctcttggtggaatgggcattttattggggtttatgacttaagggtcagcatctactatagctcaggtattgcataagtatcttataagagtctcaagatttatcaggtgaaagttcccttaagcctgactagttttcaatcttataaaaatttacacactaatttaagatgaatataaaggaaatatggataaatatccatttccaagtagcaagtttatactattcatcatgagataattttcaatggatataaggctaaatattttcatgagtgttgacctcattttttaatattattgggcacagaattgaataacacagtgatttaacatttaaaaaatcaaaggccccatttgccgtatcaggaagaccctattttcagtttcatagaaagcctgaatacacttacctgctacatacaaagaaacaggctgccaccctcctgtctcttcagacagtgtatacctgaggcaccaagactctttcatttaacttcatagccctagggactcaaactctggagaatcactaacaacttactctttacaagcatcaaaacaggcaattaaggcaaataccaagtctcttgtgtcacatttagtgactggaatttccttgaaactactcagaaaaaaaaatgcagcatgaagttaactatcaagctttgcttgcatgtaattcaaattacaataaaactttaaatacttgcctcatctgttccaaaattcagtgcacctcttagtgagatataatctatcctgcatgcatcctgggtataaatatgcagcagccaatagcactcctattcctgaaaacacaagtaaatttcataatcaagtgctacagatgtccgtggcccataccttgctgtattgcttcttcttgctcagcctgaatttgtgtctcatggggcattccctatggcaacctgaatgtggaagaaagcataggagcctcattttcagatgattccccatgatatgctggcccacacaaaagtgaataactgcaggactgtaatcctaccttaaggtggccctgaaaagcaacagttaaagacaaatattctagtatttacaaattcaaaaagtatgcttggaacatgaggaacaccttttgaaacttagttacagggcaggttctttggcaataccttagaaggatggagtaatagcctcctgaatatattatatgcttgaaatctgcaaccaacatacattgctgttcctccaataatttgtgagacctagaactttcccataagagaaaccatgagctctaagggtttagaggttttatctcccaagtgtgtcatgcttccactagagaacacagtgattgattcattaaattggaattgtgactt

SEQ ID NO: 915208 - DNA, 4001 bp, Homo sapiens
cataaaattgtagctcaaaaacatttattgaaatattaacttaataatatataatcacctccttaacattatccatgctctttactcctgattaaaacttctgtcttgctcttttgtttctctcaaaaacctattcatccttcaaggccaaattaaaatagcatgcaattctgaaacaatctttcctgcatctccaaatggatttgaagtaactctctccaccaatccttttaggatatttaccaacattactggattttgaagtcctagaaaatgggtctatctttttctgaataccatttttttcactaaatttatagtaccaaattgcttgttcaattaacacacctatcagtcaccaggaaagaaaggataacataattaacctttattacacatatgtaatatgccagctatattgtttacattttcatttgctttccacaatgtcttatgaactaaatcatattacatggccagccacagtggtgcacgcctgtaatcatgcactttgggaagatgaggcgggcggatcacctgaggtcaggagttcgagaccagcctggccaacatgataaaaccccgtctctactaaaaagtaaaaaaaattagccagccgtggtggtgggcacctgtaatctcagctactgaggggcctgaggcaggcagaactgcttgaactcagaaggtggaagttgcagtgagctgagatcgcaccactgaactccaacctgggcaacagagtgagaccccatctcaaaataaataaataaataaaactatattattttgtagacaaagacaattattttgtagacaaaatattttatagacaattattattttgtagtcaacgtcaattagttttgtctggcttatataagctgagccaagaatagcttccctgatctaaaactcatagccattctattgcaaaaaaggtttttttaaatctaaagtgattttttttagtgaactcttgatgcacagtccatttgaaaaaacaggaaaaatttattgttcaataacaaaattaaatggataccaatgcctatgtttaatatgaaaatattttgtattgattatttttcggattgcatccttaacatctttatttctcagactgtagatcaggggattcaacaaggggatcaccacggtgtaaaacacagaggccactttgactgtgtgcctggagtttttggagttgggtacacagtagaggaagaggatggtgccatggaagatggtgatggcagtcaggtgggaggcacaggtggagaagactttgcggtgcccactggctgaaggcatcttcaaggtggtgacaatgatgaatgcataagatgtcagaatgatgagtagtgtgcttatctcattaaaagtggcaacagtgaaaagaagcaactggctgagataagagtcagggtaagagagtgatatcagggaggataactcacagaagaaatgattgattgtgttgaaaccatgaaaagataactttaaagcagagcacgcgagtgtcagggaacatgcgactccccatgcatacaatacaaccaccagcatggcacagagtttctgggagatggcaactgtgtagagcagaggattgcaaatggccacaaagtggtcataggccatcaccgcaaatagaattaattcagtcactacaaaggtgcaaaagaaaaagaattgcaccaaacatcctgagaatgaaatggttctatcttctacaaccaggttcaccagcatcatgggagcaatgatggaggaatagcagaaatccacaaaggagaggtggttgaggaaaaaatacatgggggtatgcaattttgggttaattttgatgatcactatcatcccaagattccctaccacactgaagccgtagactgccagaaatacaaagaagaggggaatttgcagttccaggtaatctgagaagcccaagagagtgaatgtggcctcagatgtcgtatttctctctgtcagaaacatgttttcctttcgtgtgatccgaaaatcagtcttagaaattaaatattgaaagtgattgacaaagcagcttaaccatcccctctgtagaatataaggtgagacaaaatagatctctgttaatatcctgataggtgctgtgtcaagacaggaataactacagtttcaaaatagaattaccattaaatgttgctttctccaaattagaaaattaattctgttcatgtccttaaataaaattttaaaaacatacagttgtcattatgaaatcaagcaattcaggtgataacatataataaaactctcatgtaaaacatctgaatctcactgaacctcaccagttctgcaaagaaaaatccagtaaagtaaaataagtatttatatcagtccaacaatttctaacaaaaaatgagtctgaaataatttctataattgcaactattttctatataataataataagggcatatattgtgatatagtgaatgtagtcttagagttatcatttctatctatggttaatttttagttcagccttttaattgttattattcttttgaactaaataggccagacatcaaaatcagtaattatttatgtttttcagtaaagacatctattgaatggttttattctacagataaacaaacagaagcttgaagaaggcatgacttgaccaagacaggtacaaattcgatgcaatggacccagtttccttgactctcagtcatagactcatctctctatgccaggctttactctacattacagatagaaatttcaacattttactttgtaaagattacattttcatatatcatttttctaattcttttgaccacatttaagacaatctttagattataaaactataaaaattagcccagtgaaagtgctgatggatgcagaggtgttctgaatatttatcaaaatgagacatagagaatggaagttagaaaaatgtccccattcaggaataaatatcataaaaacctataaacattgacgaagacattttctttttctaggtcccctctcctttcccttaacatcatcagctaggacactcgttctgtccttctcttacctgtcaataatatagatgagattcttaaggtgtcaccccactctaaagacattcatgagaaaggagtttttaatacagagagaatggtggggtttctcaaatttaggcataggggcggggttatcataaaaaattagaaccccagtcaaatctgaatctcaggtagacaaaaaaattgtttatggcctaaatatggtgtggaacataatcatagtaaaaactatttttgctcatctgaatttgaaatttaattcagtgtcttgcatttctgtctgctgaatcttgcaactctatatccaaaacaacccagcatcttatagcaagaaatacaccctggtttacctgacactttcctcattttagtactgtaagccactcacacccaaatctctcaatcatattcctttataattaagacttatgtgaactgtcatttatggtaaggtcatctccaattctgtaaaccaacaaataggttctaaatgttccagcaccaacagggtcccatgcaacagcgagaactctccatagtgctatatgttcatttatgcaagaatttaaagcaccagtaaaaagacagtactttctagccatttctcactattataaaattcattctcattgaaggtttctaaacttcagcagtactgacactgtgctggattattctttgttttgggaagctaccctgtgcattataccatgtgtggcagcatctctgtcttccatccactagatgaaagtctcacttccccacgccctcacccagatgtgaaaatcaaaaatgtttccagacactgccaaatgttcccatcaggagaagggtagggaatgcataattctctatgctgccttgcttccttgattctgatagattgcaatgtatcttctactgaattcaatttaagactgaggt

SEQ ID NO: 915209 - DNA, 4001 bp, Homo sapiens
cctttttataaaggttgttgggaattctgttgagaaggattcagagattatttccatgctcataaaaaaatcataatggattgataaagtttgtgatgtctaacagtatgacatacaggttgggcaggtgttcatcatccctaatttggtacataggattttctaagatctgatccattattcatcagcatctggtgaagtctattatggtttatcagatggtcacactggagctcctttgaaaacacattcaggatgtagcccatatcatattaaaatttcagttcatgtcaagtaacccgtatacataaacacacacacacacacacacacaaacacacattatattatgttagctcaataaaacaagtattagatctttgactaggtattacattcttacctaattggttttattcacattgttttctccagaagaaaactcctttctccctggaatgtatctcataaactccgcccatttccttttcaaaagccggtttcaaacaatacctatttcattaagacatccttctaaaatccctaagtagatttgaactttctcttctctcaaactctctttggtacatattaatttctgccttacacaatggccacttcttcattgtcctattatcaacacagttttcatccttgaagatgaggactatttcttcttttaacttattttgcacatttataaaagaaattcatatgtttcctaagcacttagtctattcccggtatcttataaggaaaggacatgaaattaatatccattgacttacgtaaggtgtccattatattttaatcttcacaatcagactatgatctaacccatactatactaatttcataaatgaaatattaaagattagagggattactgatgcttcccagaaagtaagagacagagctaagtttagtctgttgaaaagaaaatccatttcgttgagttgtacaaccctaactttgtttatttgtaaagatatctttaagatcaatatttatggacagaatttatttatatgtgtgacaaactccatgaaagtaacaggctcagtaagagaagactttggtgtccagtatctcggtgactgtatccttgacatctttatttctcagactgtagatcaggggattcaacatggggatcaccacggtgtaaaacacagaggccactttgactgtgtgcctggagtttttggagttgggcacacagtaaaggaagaggatggtgccatggaagatggtgatggcagtcaggtgggaggcacaggtggagaaggctttgcggcgcccactgactgaacgcatcttgaggatggttacaacaatgaacgcataagatgtgagaacgatgagtagtgtgctgatttcattaaaggtggcaagaaagaatagcagccactggttgatgtaagtatcagagcaagaaagggagagtagtgaggagaactcacagaagaagtgattgattgtgttgaaaccatgaaaacataactttaaagcagagcacgtcagttccaaggaacatgagactccccaggcataggatcccacaaccagcagcacgcagagtttctgggacatgttaactgtgtagagcagagggttgcaaatggccacgaagcggtcataggccatcacagctaataaaaaggattcagtgaccacaaaggtacagaagaaaaagaattgtactacgcatcctaaaaatgaaatggttctgtctttgacaacaaggttcaccaacatcttgggagcaatgatggaggaatagcagaaatccacaaaggagagttggctgaggaaaaagtacatgggggtatgcagtttggggttgattttgatgatcacaatcaacccaatattccctagcacagtgacattgtagatggccagaaaaaccaggaagagtgggacttgcagttctgggtaatctgagaagcccaagagggtgaacgtggtcccacttgtatttctatcagtcagcagcatcgcttctgtttcttcgaatctgaaagttagttctgaaaacaaaaatgttaaggagaatgagaaaataagaagggtgattgaatacctttacggctcctgaaggatgaagcaaatatctcttccggaatctatgagtttgttgtttaagatttcttaaatatctaacatgtaaaaacactgtaatgttttttaatttcttaagaaaaatacaattattgagtaaaagagtaagttagtaactgtaatttttaatatttccaaatataggaaaatgagattaaatatttgtgattattttaaattaaaaatttacataataatttcaggcctccttaagcattctacataaatgatcttcctcgtataatatgatgactgattgtgtaaatcttataatcagttatacaaatcaaaatttcataaattagttttcacataatttgtttatacgatgacattaactatcaagagccctaacgcttaacatttgtgcctttattgttaattccatatagcagtttaatgtttgtctgacccagaaaatttgacttcaaaatacagctgaactaattgtttcagagcgtatgctccaaaatcaggctgtactaattatcaatccttcctcattgcttgagaaataataaatatcgaatagtcaatacagatacccttgtttattctttattctataggtgacaaagtagaagccagagaagctttgaatttcctatcgatatgcccaggaaggccaatctacacatctgtgactagggttttgatccttgaactcctagacatgtaaccctttacccgcaccaaactctgctccattatctaggtcgagatactaacacattcccttcattaataaccatactttcaattaataagcagactagagaatctacatagtccagtgacagttactgccacaaagatatattagaaagcagcatcaagataaaacacatgagaatgggattgaggaaaatctttttacccagaaataactagtgtaagagtctgacttgcaaacttcccttttcttctaggtcctctctgtctatccctgtctccatgtctatttcttttctctcccttcaagacacattatatattcattgtgtccatctattacctatgaaggagaagaactaaaaacttgagatagtacagcaacatgaatacatttcatgagaaaacagaaaacaataataggaaagaatcattatattgctctaattagtgtccaacacctctcagatgctatcatatctgtaatctctttctctatcataatagacattatatctattcacataacccacccaaatttttagacggcctatcaagaaagatgttaatttacatgcaagaccaacatattcaagggccctctcttcctatactcatgaatttgtgtattaaagacaacctcaaggccgggcgcggtggctcacgactgtaatcccagcactttgggagacagaggcgggtggatcacgaggtcaagagattgagaccatcctggctaacacggtgaaaccccgtctctactaaaaaaaaaatacaaaaaattacccgggcgtagtggcaggcgcctgtagtcccagctactcaggaggctgaggcaggagaatggcgtgaacccagtgaacccaggaggcggagcttccagtaagcagagaccccgcgccactgcactccagcctgggcgacagagcgagactccgtctcaaaaaaaaatagacaacctcaaaagacaatccatcacaaacccagatatcctaattagcatattttttcttttctctttctttctttccttttttttttttggagacagaatcttgctctgtcgcccagactggagtgcagtggcgtgattatggctcactgtaacctccgcctcccgcctcctgggttcaagagattctcctgcctcagcctcctgagtagctgagattacaggcatgagccaaaatgcctggacagcacat

SEQ ID NO: 915210 - DNA, 4001 bp, Homo sapiens
ctccataaaagtgtctgtctccttaccaagtcacagccccaactcagcttctttcagagttctaccaaggcaacttcctgtttatctccacattattaatgcctacatttaatacaaataccattttcaattaatacgtcattgcaattgagaaaagacttttgtgaacggaaattccaagaacttattttgaagaatatttgtcagattcattcaccgaatattaatctatcacttgcaactatgcaatgattaaaatctttgcagcacttgaacatgtgtgcatgtgtctttctgaatgtgtgtctgtctcaaggaaagagggagggacagggctagaaaatttggagcagaatgaaagagaataaaagaatagctgtaattgatgcatactaattagagttttcttgatagcacatttttgcagaaactctcacattctttaaatacactcatgcatgtgtgtgtgtgtgtgtgtgtgtgtgagagagagagagagaaagacagacaggcagagagagagagagagagagaggaggtaaaaaaagcagagtttagaattcctattaaaactatagtcctaaaatttgattttattcccccaagaagtagttcagtgaatacaaaggagaaatatatattaaacttatagcatttctcacctatgtgatatttaacaatcccttaaaaatcataaatggtgaaaaataatgcataagaaaaaaagaatggataatagaaattattttatatttccagtttcatgtatcattgtggctttggtctgtgaacatatattccatttgatttctagatgaaatttcatttaaaaatattcattattttggagaacctaacaaagatatatagaatcatagtaaagtcaacatgccatgatcttgaatcagtttggtaactttctttatccctaactggatacaactattaacagaatgtgtttactgagaaaatattctaataaaaaaatgtagatataaactagactttgaaagtaactaaaatatgctctttagttgagatttttagccaaacaatcacagaaaggaagaggtccttttcctgctaattacattcgctaaagccttctttacttccttactcctgaggctgtagatcagaggattcaacatgggaatcaccactgtgtagaacacagaagccactttgtcctgattcagggagtagctggaactaggtctcaggtaagtatagatgcaggtggcatagaacagaattatggctgtcaggtgagaggcacacgtggagaaagctctgtgcctcccctcccccgaatgcatagaaaaaatggagaagagaacgtaggagtaggaggagaggatgacaagcagagtccccacaatattcacaccagccaaaatagaacttatgctttctttcaggattgtgtcagaacaagagagcttgaaaagtgggggactgtcacagaagaagtgatggatgacattggagtcacagaatgacaagctgctgacatggcttgtgttgaccatgaagttcagcaaccctgcagcaaaagccccggctgccatttttaggtagacggtcctggacatgatcaaggagtaaagcagcgggcgacatatggccgcatacctgtcataggccattaacccaaagaggatgcattcggttgtcgccagggagataaagaagtacatctgtaggaagcagccagcaaaagagatggttttcttctctgataataaatctgccagcatctttggggtgatggtagttgagttacaaacgtccacaaaggacaggttagccaggaagaaatacatgggtgtgtgaagctgggaatcgatcctgattaagaggatcatcccgagatttcccagtactgtaagtgtataaatcacaagaaaaaacaaaaagaggataatctgtagctccagcgtgtctgctaatcccaataggacgaactcagtcagtgaggtataattttttctggtcatttatgagaaatatattttgtgtaaactttgtattagttgcacatattttcctctctaaaagtttacaaaaaaaaaaaaaaagaagtgttaataggacagtcacatatggcaaataaataaacaaaaacccagaataatatgtcataattactgaagtaagaggaatattagaggacccatgggtaagcatttacatgtaataaacaattgattgtattgaattggagttgtaggcttctcaaatcactggctgaagtccacatactctatttctgtgaatacaaatactttgttctattgtttctatactagcccacatccaaaatgtaaaataataaaaatattcttgctaaaatttctcccattctcagagcaggtatgtgaatttaactcaatgcattcttttttaattttctcaaaatcactctgtacattcttcaactccaaaattcatactttatctcttgagaatggcttatgtgtagccctaagcagcaaaaagagtgaccatttcaaataatcaatattttcacatctattgtatccttaaaaataatttagtgatgttttaaaagtaaaccaaatgattgttatactacaatgtccattatcaagttaattccaagaagcagccgacagggtacctatccaccttacttaataacattaccaaatctttaaaacttcctccccagatggctacttacctaagtaagtaactattattttttttttatcagaggttcttagttggagcttaaaaataaaagaagaaaatttaatttaaaaaatgcagtggaaaattgaattatctattggtaaaatcttaagatgccttatgattaaatacttgttactgcacttgtattttgtttttctccaagaagacagggtaaccatggggagtagattatagctattaattgcagagtcaattctctacaggcaggagctctgtctcaaaacaatattaaatataatatgatcacatagagatgtatggaatcagacattatgaaagtcttacatcataaagtggtttgtgacctctggaaaataattgtctatctacactgactctctctgtgtctgtatttttagcttattctaagtgcgtgactaaactatcgttctccccctgtgccattttagtatgtgggtgcacccctctttttttcggtgtgacttaaaattcagctattttcctgtataaaggtagtgagaaagggtagttaataaatatctattgtatgatttttaaagaaatcctataacctgagcaaatagcacaatagatttaaaaattattatatatttatgattttgaaattgtgttggtttttgccgttactatttgtgattcttatcctgcaaagacatgaagctatagattttctagatctaaattcaaaaagaagacaacgtaaaatatactacattgggtattcaaatgcaaagagagtctatttgcatagggaactcataatgcagcaattgctatgttaattattttgtttaaattctcaattacttctctcaaccagtctttcaggttgacattattattcgcacattttatagatgaaaaaagtaaggctttaatctgttaaacaacttccccaaagataaactgttggtaagtagaggaataaacttgaacacaatcttcaacataaagaactaatacctagctcgctatttcctatcatgctccattttagcttatatgtgtatatatatgtgtgtatgtttacgtgtatgtgtatatgtagcgtgtgtgtatgtatatctcatagtgaatctaatcctccaatcttcaaagcacgtaggagacatcagcatctaaagggaggcctctaacataatgcaagaaatttgttaaaaagttgacttttaaagatctcaccatcatgtctgatatggtttggctgtgtccctacccaaatctcatcttgaattgtagtttccataatcctcacatgtcataggagggacaccatg

SEQ ID NO: 915211 - DNA, 4001 bp, Homo sapiens
ttagttacagaaatacattttgtaataatacacatacttctacacatccttcaattagaattttcaaacacacatttcatgcatggttttctaccacagtactggattgatctccctatgaggatacaattacgatagtgtaataaattagagatagtattctttttctgagattccagcaaagaacgttcctcacattcagtaacacattggtgtatttaaaaacaagagatagtaaaacaaatattttgcattgcaattaacctatattgctcaagccactaagaaaatgtttccaaattgctttatgatacattggatgtagaaagttatcaacatgttatcacctgcattttaaaaaatattatttggctttttatgattgcttttctaacattctagcctctatcatcttattttattacatgcattttaattagtgtgagatattataaaaacatatcttataacaaacatgtaagtgtatataatgtccaggcactattctcagctcttaactgtattaactctgttcaccatcaaacaatcaatagcatatgtgcaatattcatcccattttacagataaatgaggcatagaaaaattaagcaactcattcaatatgccactcactagccaagtatagatctggcatataaatcaaagcaatctgacttattttcttatccagttatccagtaatctacacttataactgagatattctacagatagatacgcacatgtacatgcatgcatacttttctgaaatatttactatatcccttaagatggcttgatgaaattgattttagcataaatctcaagctagtaataactgaaaagtagtataactagcatttagcaggaactttgaaacttttaaatgattttaaaaatattttaggactatgaaattcatttggctgcattaaacaaagtgcttgataaaatccctagtgtgagaggttgtgtgtgtgtacaggtaaggttgttgtaagttcccaattacagtatgtgattgagaaattagatgtatcttgagatgctttatctcatgaagaatctacctttgatcttagaactttctcagctgcatcctttacatctttatttctcaaactataaatcaacggattcagcactggaatgaaaatggtgtagaacactgagataattttatcagtgtttggagaatacaggtagctgggccgtgagtaaataaagaggagagtcccttggtagatcgtcactgaagtcaggtgagaggcgcatgtagaaaaggtcttcttcctcccactgaaagagcggatctttaagactgagagaagaatgaaaaagtaggagatgatgatgatgataaaacaaatgatttccactgagctgccgtatgtggagaggagccactcattaattgttgtgtcagtgcaggatagtttaagcaggggagggaggtcacagaaaaaatgattaataacatttttgtcacaatatttcagaataaaggcaaaggatgtgtgaaccagggaactcatgttgcctccaaggtatgacaagacaatcaaccgcatacagatgcccctagacatcacaactgtgtacaataaagggttacagatggcgacatagcgatcataggccatggcggccaggatgaaggattctgtatctgcaaaagtacagaaaaaataaaactgcagggcacacccataataggaaatagatttgttctccgagaggaaattgaccagcattttgggaacaatgtctgagaaatagcaaaggtctacaaatgataggttgctaaggaaaaaatacatgggggtttgaaggtgaggatcaatcctgatcaacagcatcaatccaatgttccctatcagaattatagcatacaatgtcagaaacatgaggaacaggacaatctgcagttcagggcgagttggaaaacctaatagaataaactcagtgaccaacgtgtagtttctatctgtaaattccatcttctgtgttgttttccttttatgagaatttctaataccctacaatgctataatgatgaaaaaagaaaaataattagatgtaattataaagttattttattgtttaaaaataaataaatggcaataagataaagaaagcaagctcaaacttttttgaactataaactctgagaaatatatttcagaatttagtaatatcatatttcatggttgcaggttatattttatttgattactatttcttccattgaacagttgacttcctatgtgcatggatcatgtctgatttggcttaccattttgcacccaaaatattaaacaattactggcccagagtattaaaaaagtaataaattaatgaacagactgatgatcacattaagtaaagaaaatatgtatattattaaaaatggactgacttatagagtgttcctttgaataagaattttagaacatctgcttcttgttttcaggatttgatagataccggtatgctgtgtctcttgactgagtaaatagagtggtgtgatgaaatatgccggctaattttttttttactgtaaagcagaagctttagcgaaataaaaacaaatgtcagtaaataccagctctgaggatatttttgacagaaaagagcttagtgtaattccataaaccctgttcacatactaaactaagctgataaaattagttaactacttgtttcaatacttctggcatttatcgaactccttggcttcctggaaatgctcattaaacattagtggactgaccaagtacagtcagcaaaacatttagttatatgttaacttgcaattaaataacattactatatatggcatcatcactgattaaattttataagtaaagaacaattgttgcatttattgttatggtagtataatacaaagtgttgagtcagaaaaatctgttaaacactgcttctgaggtctcaaaatacttacagaattataaaaatttttaacttgactttgaagtacaaataatttgattttgaccatgaaggatagacttggaaatacgtaaaaaacaaaacaacaacaaaaaaaagcaagcaaagcatcaatctctaaagttcatgttgagagggccaagatgggaattaaaaatatttgagtcactgcctcatttacataatagatattatgacaatgacagtgctaaagacaatttatttatctcatgtaagcaataaaactacccaatgacataaacactgagaagcctattgataatcagaagggttaatcacgtgctcaaagtgctgccttatgttatcacctcaaagcgtgtgaatgagatgcagcactacagcaggacagtggttattctcattttgcttgtttgaaaatagtcaaggtatttagacaatataagacatcacttcgatttaggaggaatttgattagatgcccatcttggctgcatgggggctgtgtgaccttgtgccacttaatataaattatcctaatctatactacaacaatgataataaatatctcatagtgtttctgtatggattaaatagggaaaatgttctgccccccctttctgtccctttatctacctacttatctttccatgtgtcattctttagggagactgacatacagtagataacatcaaaaattagttttgattgccacgctgccattttattcttagattatgactagagctacctgtcaaattttactaacaataattgtcacctgtataatgcttactatgtgtaatgcaatattcttaacacttcacctataactcatttaattgtcaccaaaaaactaacaaaattaccatggagttactatcattatgatctttttcttacagatgaaggaaactaagaaagagagaatttgagatttaggatgtgatggaaacaggattagaacccaaaattctgactccaaagccacatgatacactggttctctataaacaggattctttttattagctccatattttggatga

SEQ ID NO: 915212 - DNA, 4001 bp, Homo sapiens
aagctggaactacacatttacttggctatttcttcaactgtctcatgaactttaagtatcaagattctttcctctgatcatgatagtagagttcaaaaatacagaaaaatacacttaattcaaattaatttaatattaatgcaaatatttcctcaaatttttgctaatggcaaaagttaacattacataatggaagaaaactatcaaatcttagaatggataattacagaagtgagtcaatgaacaggttttaacttacatagtctgattttaagtatttaatatattccatgaaatttctgtaaacgataaatttgtggaattttaactatcttatttgcagttttttattttagatctttaatgatagaaaaaatattcaaaaaagagagataaaatgtgtttttaattttaaatacttcaaaatgactatattattctattcatgcaattaaaatttttaaatcttaagctaaaattttatgaggcttttgctataatctcagaagtaatcatagggatagctaccctctctcttcagagtttaaatcatagagaaggagattaacaaaaacatgtttttgaaagagctggagagaaaataatctcttcagtttatttctatgaggggcctgccactgtttaaaatatttaaattataagtcaatgaaggcacatttcagttgtataattatatctattttcttggaaattcaaggactagttattttttcctacaaagtaccctatttttatatccttaagtgcaagtattattataattttgtaaccccaaataacagaaaagaacagatgtaatactgtactatgtattgattattacgtgaataacctagaatatcagcataactaagtgatagattgttgtttttgtgttgcaggtatgtgaattaagttttctcttctggctgcctcctgaaatgcaacaaaagtatatagaatgagaatatctgtaaagtcttgagaagctttggcattcacggaattcttggaagtgagaactgaatgacagaatgttgtaggattaatagtgacttgaaattaacagaggaaatgtttcatttctatggcccttttcactgcctcctttacgtccttgtttctcaaactgtgtatcaacaggtttaacatgggaatccctagcgtatagaacatagaaaccactttctcttgttccacaaaatactgggagcttggctgaatgtagctaaagattaaggtaccatagaatatggtcacagcagtcaggtgagaggcacaggtggagaaggcttgctgtctgcctgatgctgagtggatccttaggctagcaaaagcaatgaagatgtaggaaatgatcacagtcaagaaggtggccatggcaatgactccggagaaggttaacagcaacaactcattcatggaggtgtcagaacatgacagctttagcagtgaaggaatgtcacagaagaagtggctgacagcatttagcctacaaaaggacagtctcctcaagctgattgtgtggattaatgtgttaactattccacctatccatgatcctgtgacaagctccacacactttctatcagacatggctacagtgtaaagcaagggactcacaatggccacatagcggtcataggccatcactgacagtaagaagccttctgtggtgatgaacactccgaaacacaaatgctgtaccatgcaagcagagaaagaaattgttgccttcacaaccaggaggttcaccagcattttgggtgcaattgcagatgaatagcaggcatccacaaatgaaagacagctgagtaaaaagtacatgggtgtgtggagtttggaggtgatttggattaagaggatcatgcccagattcctcaacaaggtaatggcgtaaatcaccaggaacaccacaaaaagcacagcttttagttcagcatgatctgtcaatcccaaaagaataaactcagtgacaactgtaaaattatcatcagccatatgtttctttctttttcacaaaatctactgtgaaaaaaagatagactcataatttgtcagggggaaaatacatatatattacatatataaagtatttaaattgatacatattttatacacatacacatgcacaaggataaaatacagacaactactgatgttgttcttcaggtaaataatcttctttcttgaattctgaggattttcatcaataaatttagcaagtaggctagacagtctctaatattttttccagtgacactttatgtgcttatacctcatagaaatcgatgtgtaaaaatgattttttctcacagcatctgtctctgaaatgtctagctccataacaaagtgccaccaaaactgataaaacactagtgataatttaaatgaacagtatgtaaaatacatattgttagaatattaaattaccattcaatgaaactcctttctggtaattttttggtttgtttttgagtaaataagaaaactttctaaaattgcctgtattttctatttatagagggaattaatctacagttgcattattatagacagcaaagtggccacaataatgaagtaaggtggatcagggacccacagtgatgacattggaaaatgccagggagccagagactggcctctgtgactatgggtggcatggtgtggcaacaccaaactctgaaactcatgaaataacaccctgtctcttgaatgacacctactaaaagaagtggggattcttaactctaggtaatcctccctgcaatcatggtgggagagtagccctaatcatttactctgagattgaggacctagaatcccacatattgcatgaaatggagccttcctgttttttttttttttttttttttctgagacttcaaataattttaggcaataaaacaaactcaataatttagaacatgaatatatatactcaccaaatattctgtgatacttcttcctcttattcatcctataaaaggtagtttagacaatttaagactttctaaaaatgtaatttcaattggaacaatacacacctgcacctcctattcaaagctattcacctgtttcataatcaactatctcccactcttatttcctattaaatggattgtagttttagaaatgatgagaaacaaatattgattcagtctatgtgtaatttataccccttattaattttaattaaaatatttcaaagacaacaatggtgaaaagtgaaaatacatagttgacaataactggctttatttaattggacaagttaacttatttcatccaagatataattataattacttctctagaatccctgagtgtattgaaggagtgtattgaaaaatactttattacaatgaagtatttttgtttctttaacaattaacaaattagatagttacgtaagtatatgaagcataaccagatagatagatagaacagtgatagacacttagtgtaatatattttgattcacagtgatcaggtaaagctttaaaaactttctaattgatttctttgatgcagcatttctgcaatgtttaagcactatttttatttatttattttagtaaatgtttatctcaagttattcactaactagcattgttaaatataacgtgaaaatgcatattttttaatgattttctaaatgatctttagtaatttccaacagatatgacaatatggataagtactgtaaacaataatcctaagtatttaaaaactgcatttttatacaacatatatgctcttttttctaccactcttagaatatcagctggatagttttctcaataaaagaggaatacttatagatatgaattataagtataatttagaaaatagtatgtttgaagaaattagaaattaaattaactatcaaaatgtataagtgtacaactttcagcaaaattaggtggaaatattgtaaatggaatcacataataaggcacagtgttaacttacagaaaatttaagattcaaaaccttaa

SEQ ID NO: 915213 - DNA, 4001 bp, Homo sapiens
gacataaatcataatgaagtcacaaagaaagcatcaatggtgcatataattcaatatagaattcagaaatgtggttggggtacatatggaaagtgaaataaaagggagttcagcaaaactaaaaacacatgaaaagaacatgaacagagattaaaagtcctcttataagtgtcagtaagcatgtcttcctcaatggattttagagttagtttgaagataagaagtaaagataaagtgagagaagatggttaattcagaaatgctgagattcataataattctaaattattatatgcacatgtttatgtatatataatatatatgtatatagcatagacagagagaaaaagagagaactacttattatgtttcagggattattctaagctccttgtaagtgattccagctttttaaattcaattttcctagagtcctgtgaaattattatgtttttcatctatcatataacatattatccaaagttccaatgacactggaaactaaaacaacagcaagaaaataataaagaattttaaaatgtcaaaaactgataaatatatacacattatacatatatatggaatatataaatattccatatgtattccacacatatatattccatatatacatataatccatatatatatgaaattctacaaacttcaatgacaatgtaatcatcaatacaaaataatgaaaactttgttttgaaaagaatcgtagtttccataatggatcctgaaataaattgtaacccttgtaagttcttcattagaagacttgtaatggttttagagaaagcaaaacttgtctatcttaataatactattgctcatatccatttaaacattatgtatttattttttaaaagttggcagcaaattttgaaatatgttcaatcctactccttaaagtttaagaagcacaaagataagtgaatcaaaaaagactcgcttataactactgagctccttcttctctgtactccaacactgtgcctctcccgtgaacccccgcctgccactacttgggaatcctgaattgtgctaataaaatcttccctaggagtgaattttggagcccatcacttttctgagagcttctttcacatctttatttctcaggctgtagatcacagagttcagcataggaatcacgactgtgtagaacacggtggccactttgtcagcatctccactattgcctgaactgggcctgcaataaatggaaaggactgttccatggaagacagtgatagctgtgaggtgggaagcacaggtggagaaggctttgtgcctgccctctgcagagcccatcttcaggatggtggtgagaattagcaggtaggaggtgaggatgatcatgatggtaacactctcattcaaagtggccaccaggaacagcagtgtctcattcacagtgatatcagagcaagcaagacttaagacaggaggtagatcacagaaaaagtggttaatcacattagatctatagaaggggatcctaagagctaagcacaaatgaatcagagaacacaccgtcccacagaagtagcagcaagaagccagctccacacgcaccttccaagacatggtgactgtgtatagcaaagggttacagatggccacaaagcggtcataggccatcacggccagcaggaagacctcagtgaccacacaagtgcaaaacaagtagaattgcaccatgcaccctaggaaggagatggctttgtccttgttaaagatattagccaacatttttggcacaattattgaggagtagcagaaatctacagaggacaagtggctgaggaaaaagtacatgggggtgtggagccgagagctgacctgaatcagtgcaatcatgcccaggttggctaacaacgtgactccatagatgagaaggaacagcaggaagaggcagactctcaactcagggacatctgatagtccaaggagaatgaactcagccacagtggtgcagttttccttgcccatgtctccaatttatatgagattggaggaaaagaaacttaaaaattattctccattatatagtctaaattttagttttggctgtatcctgtaaaaagacaccagaaaaagtaggatagtttatcttatcagcaaagaataaaactttttgtgaaattttaaaaagttcaactttgtataacacaaatgcataaacttagtttaattcaaagatcaaacaaaaatattaacgtatatatgaatttatattgttcttttaattagtctttgagaattgacagcttttcactgaatcattgggaatgaggtcaacttactatttaattagcctccttactctttcaaattcaaatcccattttcttagccaactccaaatattgggatcctagaaaataatgtttagaatctacggcacctctctctgaatttttcattacagtgatgagaaatacacttatttaagatgttagcagtcaagtgtttgcattttattgatatattttagatgaagaaactcattttataatctgtattagtattttctctgtaaaattagtatggtgatttggttaattacatttttcaatgtcagccatggtttagggaattggtactcttggggacaacttactgtaagtatgactccacagtcttaaaaaattatgtcttaaataaatttactgctttcaatctatttgaagacctgatcaaagatgtgcatgggaaattactaagaaaacttcccactgctgcattgcagtattgtttgtaatattaaaacttagaaataaaatatcaaataagagaaagatgatcacatttgtagtgtatataatataaaagcatgcagtcatataaaggataactttaaatcatcttaatgatatcaataaatgactgtgaaaagggataaaatacttaaaaacagccagaatgtagagaaaaaatagtatataataatgtataatataaatacatatatttatgccacacacaatcgtatatttaatccttacaacatccatgaacataaatatttattttaaaaaatctgttaacttgtcttacttctcccaaaacatcattattagtgagtgaaatggggaaagacgttggaatttttaaaattagggacacatactttttagacctttgacacacagcaaacgtaaagtgagggtgagaatcttgtcattctttctcttcctgacccttgatacgttcatacatcattgtagaagcaccagtcaagcactcctgcaagaaaaaaatctggactagagaccaacacaaccagacatttttcccattcttcaactgatttcaaagatatgcagcatgcatattgctaaatgccaggttgaaaatttaaaaaaattgttttgataatatggtgttttctcttaaaatgaccaggagaggtgagttgtgtatcttcccctgagttcaaactaatacacacttttgaaagccctttcctgctttcaaatctaaagaaaaaaaaaatcaagctgttaattgcacatagagcggtgattctttgtcaaaagtgactttgatcccaatggcatatttgtcaatgtctggggacatttttggttgttacaagaggaagggggtgctattgacatgtagtggggatgttgttgaacaatctacaatgccttctacaaagtacatgaaggtccctgcctgcagcacatacaacaaaacgttatctggaccaacaattcaatgatgccttagttgagaaacctgccatagagaggcatttcaacatgcttttcaaaaagaaaaagtaattcctcttctttctgcttcagaggtggttctcatgttcatgtccctccatgaacagtcctgttcctattgcctcttgctaccaccctcagcatcaaggtgactttggagataatctccatgcagtctttactaggttgtctggacagagttagtgtgatagaggggaaagagggaaggatagagaaaacaagtgttcat

SEQ ID NO: 915214 - DNA, 4001 bp, Homo sapiens
aatttaaacaagtaaataaaatgaggaaattgacataagtcgtaatggaatcacaaataaagcattaatggtgcatataattcaacagggaattaagaaatgtggtttaggtacatatggaaagaatacaataaaagaaagttaagccaaaaaaaaaagaacacatgcaaagaacatgagcagaggttaaaagtcataagtgtcagtaagcatctcttcatcaatagattttagggttagtatgaagataagcagtaaagataaagtgagagaagagggttaattcagaaatgctgtgattcataacaatggttctaaattattatctgtacatatttatattatatatgtgtgtgtgtgtgtgtgtgtgtgtgtgtgtgtgtgcgtaatgtaggtagagagagagacaactaataattatgttccagggattattctaagctctttttatgtgattccagcttccttaatgcaatttccctagagtccgctgcaattattattttcgtcatctatcaaatcacatagtacccaaaatttcaatgacattgtacactgcaacagcagaaacaaaataatgaagaataaaacaagaaacataaaaaatcaaacaatgacaaacacatatatatgcatagatatatggaattctcattctgtacacactttgacgatggtgtaatcgtcattataaataatggaaattttatttgtaaaagaatcatagtttccataaatggatactgaaataaagtgtaactcctctgagttcttcactagatttgtgaaggttttacagaaaactaaatgtttgtatcttaataatgttgtggctcatatccatttaaaacatcacaaatttatttttataaaagttggctgcaaattttgaaatatgttcaatcctattagtttaaatttaagagaaacaaagataagtgaatcaaaaaaggatccctcataactactgagctccttcttctctctactccaacactgcacccctcctacgaaccttcacttgccacaacttggggatcctgaattctgtgaataaaatcttccctaggagtgaattttggagcccatcacttttctgagagctttgttcacatccttatttctcaggctgtagatcagggggttcagcatgggaatcacaactgtgtagaacacggtggccactttgtcaacatctccactgttgcctgaactcggcctgcaataaatgtaaaggattgttccatgggagacagtgatggctgtgaggtgggaggcacaggtggagaaagctttgtgcctgctctctgcagagtgtatcttcaggatagtggtgagaattagcaggtaggaggtgaggatgatcatgatggtaacactctcattcaaagtggccaccaggaacagcagtgtctcattcacagtgacatcagagcaagcaagacttaggagagggggtagatcacagaagaagtggttaatcacattagatctatagaagaggatcctaagagctaaggacgagtgaatcagagaacacaccgtcccacagaagtagcagcaagaggtcagctccacacgcagcttctgagacatggtcaccatgtacagcagggggttacagatggccacaaagcggtcataggccatcacggccagcaggaagacctcagtgactccacatgtgcaaaacaagtagaattgcaccatgcaccctaggaaggagatggctttgtccttgttaaagatattagccaacatctttggcacaattattgaggagtagcagaaatctacaaaggacaagtggctgaggaaaaagtacacgggggtgtggagccgagagctgacctgaatcagtgcagtcatgcccagattggctaacaacgtgactccatagatgagaaggaacagcaggaagaggcagactctcaactcagggacatctgatagtccaaggagaatgaactcagccacagtggtgcagttttccttgcccatgtctccaatttatgcaggattagaggagaaaaaaacctaaaacttattctccattatatagtctaaattttagttttgggtgtatcctgtaaaaagatatcagaagaagtaggatagctaatttttatcagcaaagaacagaaattttgggaaatctgaaaaagttcaacattgtataatacaaatgcataaaacatacagtttaattcaaagatcaaacaaaaacattggcatttaaaaaacttatagaattcttttaattaatctttctcagttgagacattggcacagaatcattaggaaagaggtaaagttgtttaatttgccttatgattatatcaaaatcaaatccccttttcctagcttactccaaatattgagatcctagaaaataatgcttagaatatatggtacccctctctgaattttccactacagtgatggggagatatacttaattaagatgttaattcacaagtgtttatattttattgatatattttagatgaagaagctcattttattgtgtgtattatctttttttctataaaattagcctggtgatttggttaattacactcttcaatgttggccatggttcagggaattggtactcttgagcacaacttattgtaactatgactgttcagtcctaaaacatttatttgttaaataaatttactgctttcaatctatttgaagaattgatcaaagatgtgcatagaaaatgattaagaaaaacacccactactgcattgaactattatttgtaatattaaaagttagaaataaaatataaaataagagacgtggtcacaaatgtagtatatataatggaaatgcttgcagttataaaaaggataagactgcgataaatgataaaatggaaagttataatacagtcagattgaacataaagaatgttatataataatgtataatataaatatatgtatttattctactcacacacataagctgcatcatatatttaatctgtgcaacatcaatgagcataaatatttatttcaaaaaaatagataaacttacctgattcctcacaaaacatcattatgatggagtggaatgggggaaaaggatggaatttttaaaattagggacacatactttccaaatcttcaacacacagcaagtgtaaagtgagggtgagaagcttcctattctctctccctgacccttgatagatgcacacatcattgtagaggcacgagctgagcactctgggcagaaaagaatctggactggagaccaacagagccaggtatttttcccattcttcaactgatttcaaagatatacaggaggcatataactaaatgctagattgaaaattactaaaatgttctgaagataagattttctctcttaaaatgaccaggagaagtatgttacatgtccttccccaagatcaaactagtacatactttcaaaaaccccttcctgttttcaaatataaagaaaaaaatcaagctgttaattgcccatagagcagtgtttctttgtcaggagtgacttgaatcccagtggaatatttgtcaatgtctggagacatttttggttgttacaagaggaagggggtgctattgacatgtagaggggacgctgccaaacactctccaatgacctctacaaagcacatgaaggtccctgcccacagcacacacaacaaaacattatctggaccaacattttaatggtgccttatttgagaaacctgccatagagagacatttcaaagtgatttgcacaaagacaaaataattcctcttctttctgcttcagaggtggttctcatgtccatgtccctccatgaacagtcccgtgggcctcctactgccaccctcagcactaggatgactgttaggaaaatctccatgcagtcttaaccaagtcgcatggacagagttagtgtaatagaggggagagagggaaggatagagaaaacaagtgcttatgccaatgtcttcacactgctttac

SEQ ID NO: 915215 - DNA, 4001 bp, Homo sapiens
ttaaaatgccaaacatatgaggcaatttattagggctaaatacatatgtatcaatatgcagtcatctggttgactaataatgcatggattaatgtgtctccttaggtagcctctctgagattgattttctctatagcagcttcaagaactactagaacacccttattttaaaaataatgggccacagaaagcttcatgaagcaaaataaacactgagtatttcctccagaaacatatatacacccctatttatttgtatactgtttcaagacatttgtgggtatgcacagggcagttaatagaccctattgactcctactgaattagtcctaagtcagaggtacggcactggaaaacataactggaatgcagttaaagtagtttgatgatagaattggatccatacacttggaaactcataaaaaggtgttgagagttgattttcagaatcaaggacgataaccagtattatcatatgaacaaaaaagaagcttctcaagatatttacaagatgggtttggggaacacttacagcaaatttaacgtatcagtgacccatatatttatattttttgcacattgattacaataagcacaaaggtagctgagctattgttcaagacaccatattgaagtagaaataatttcattttttaaaaagtgtaaaattatccaccctatcttgaacctcattatggctctgtggaccatcatattcaaaggagatgaattttcagaatttctctcagcctaagttagttaaaaatttacccaccccccaagtaagtaaacatagtattttcatatagaattattagatactaaaaaatttattttcatagaatttctgacaaataaaacattttaaatttctcaacattaaggcttttatttctaagaaatcaatcttcaaggttttcatttggataagaaagtaaagtggttactgacagtccatgatgttaaataaatcacgactacactaggtttttccatttcaaaagccagtttgttactccacaagcaattcgtgactgcaaataaacacaagcctaaactgcaattttatgaaaggattttcccctaatcatttgttgcatggcaaggattacatctgtgttccgtaggctatagatcaatgggttcagcattgggctcaaaaaagtataaaagactgcagttattttggactcctctacagacttctctgatggaggccttacgtacatgcagaagagggttccataaaacaaagtgactattgtcaggtgggaagcacacgtagaaaaggctttgtgcctgccttcagcagaacggatcctgaagatcgctgcaaaaatgaaaagataggacagaagaatgatgaagagagagcttgagagattaaagcctgcaactacaaacattgccatctttttgacacgggtgtcagagcaggccagcatgataagaggaggatcagcgcagtagaaatgattgatttcaagggagccacagaaggataagtgaaaggttagcagtgactgagagaacccactaagaaacccatacatgtaagggatagtgaccagacagacacagatgttcttggacatcctggaactgtaatgcaaagggctgcaaatggctacatagcgatccaatgccattgaagcaaggatgtaaaactcagtgatcaccagggcgatgaagagaagacactgtgtgaagcatccagcgtaggagatggtcttctgttctgagaggaaattgtgcagcatatttggagtaacattggaagaatagcaaatgtctacaaaggagaggtggccaaggaagaaatacatgggtgtttgcaggtgggaattggtcctgatcagcaggatcatgcacaggttgcctgccagtgtgattaggtagatcgcaaggaataccccaaacaggatcttctctagcactgggtcgtctgtcagtcccaagagaatgaattctgtcactatggtgtggtttggggagaacatcttcttatctcttgaaactgaaagtgacaaagaatgtgaggatttctctctgattcagatttggcatttgtttcatccatttatcattcgctcattcatctatttatctaggtgacaattacttctcttgtttcaataatcacatcggaaattttacataacattgtctccctatatgtctgttttaatctgtatctttctatacatcaaacccacataacttacacaaacatacatattctctatttctctctgccatacatgtatacatacataagtttattcattcctacatttatacctgtcttcttggtgtactccacatttggtaattttattcaaacttcgtgaggaaacaaaaaatccaaaggaatgaaaattaaatacaaaaaccctaggttatttgcatctttcaaatggataaataaaggaagtctgatctttattatacctccagctctgatattgtattgtttcagatacaaaatgaagaaagaaaagcaaagcattttcaattaagacccatagctgtgtgccttacctttattcaggaacgattaaactagagaaattaatttctatctgatatatggctaagagggtacaaaatgaagacttgtttttttccactttgtaatgtcactgcctgtttactcatgtatactgtatagcttcatttctttctgttccaattcctgcggttactacagtaaacaagtctcccagctcagggagcacacattataatagagggagcagagcacacattataatagagggaacagagattaaacacacagaaaaagttacatacaatttcaggcaaaccatttttctgtgaagaaaacatgaatgtaggatgcttttagatgaccactcaaagaagatctttctaggaatgcagcatttaaacagcagatatgcaattctactatttggggaaagtgtggattttttttgttcccatttttgtgccactaacccactcatgacaatattgtttaggtatgcacagataatttttaaaaggggtcttagcttccaactcaagccactctctctcagttctctttgaaagtaacataagattgtaaaaatttctactccaaaaattccaccttaaagccattgtttatttagttctcatgtatacatcaaaagagcttacatataattgattgtagagagtcaatgcaatactaacatatggatagaaaagtctagtgaaattggagaaaatatttgttttccccattgatggaatacttatctctacacacacacacacacacacacacacacacacacacacacaaattgtatttttagtgaacaaatgtagaaaatgacctacctgttaatgttaatggaccatatcttatgaaaacaaggtagcaagatttacaatatatttattaggtatcttccctagagtatttttaaactaattctaaagagccaattaaaatatgctttgttcctcaagagcataaccttcatttgatgcttcctggagctagactctcctgcgaggataaaattcctattttacatttatgtagagtttcggtacaagtgtgcatgagatccttagtacaaacagagaaattagccatccctttcaataacatggaagaggaaaacatgggtagataacttctgcctttttagtatgatgaaaacaaggaattctcatcagaactcttcagcttttgcctataaacactgcagtgaggtcatctaatgagtgaggggtaggaagttgtggcaggtgagacatttgagaagatgaaagatttcaaagactgtgagagcagaagagtggcataatcagtagaaggaggcagaagtattggtcagggcccaggatcctttggaggacgggcgttatggatttattttggaactagtctgcactatcaaggttaatattaacatgctaatcatcaaaggtctcagaaccagggctatttataaaattgatgatgcataaaattgttg

SEQ ID NO: 915216 - DNA, 4001 bp, Homo sapiens
attattcctaagtcagaggtacttcactggaaaacatacgtggaatgcaattgaagtattttgatgatagaaatggatccatgcacttgaaaactcaaaaaaaaaaaagggtgttgagagttgattttcagaattgaggaccataactggtattaccacatgaaccaataagaagcttctcacgatgtttacagtgtgggttttgagaatacttacagaaaatttaacttataggtgattcatatatttacattttttgcacagtgattacaataagttcacaggtttcagaactattgttcaagacaccacattgaagtagaaacaatttttttcttttttcgttttctttttatttatttatttatttatttttttggagatggagtttcgctcttgtcgcccaagtggagtaagtacaatggcgtgatcttgactcactgcaacctccgcctcccaggttcaagctattctccagcctcagcctcctgagtagctgggattacaggcatgtgccaccacaaccagctaattttgtaattttaggagagacggggtttcaccatgttggccaagctggtctcaaactcctgacctcaggtgatccacctatctctggctcccaaagtgctgggattacagatgtgagccaccatgcccggcatcatttttttaaaaatgtaaaattagccaccctatctggagcctcactatggctctatggatagtaatattcaaaggggttggattttcagagtttctctcaggctaagttagttaaaagtttacccccaagtaagtaaacccagtattttcatacagaattattagaaaccaaacaatttatattcatagaatctctgacaaataaaacattattaatttcaacattaagctttttatttttaaaaactaaatcttcaaagtgttaattttgagaagaaactaaagtggttactaagagcccatactgttaaataataactacactaggtttttccatttcagtttgttaccccacaggcacttagggattacaaataaacacaggcctaaactgcaattttacaaaaggattttcccctaatcatttgttgtatggcaaggattacatctctgttccgtaggctatagatcaatgggttcagcattgggctcaaaaaagtataaaagactgcaattattttggactcctctacagacttctctgatggaggccttacgtacatgcagaagagggttccataaaacaaagtgactattgtcaggtgggaagcacacgtagaaaaggctttgtgcctgccttcagcagaacggatcctgaagatcgctgcaaaaatgaaaagataggacagaagaatgatgaagagagagcttgagagagtaaagcctgcaactacaaacattgccatctttttgacacgggtgtcagagcaggccagcatgataagaggaggatcagcgcagtagaaatgattgatttcaagggagccacagaaggataagtgaaaggtcagcagtgtctgagagagcccattaaggaagccatacatgtaaggcacagtgaccagagagatgcaaatgttcttggacatcctggaactgtaatgtaaagggctgcaaatggctacatagcgatccaatgccattgaagcaaggaagtaaaactcagtgatcactagggcgatgaagagaagacactgtgtgaagcatccagcgtaggagatggtcttctgttctgagaggaaattgtgcagcatatttggagtaacattggaagaatagcaaatgtctacaaaggagaggtgaccaaggaagaaatacatgggtgtttgcagttgggaattggtcctgatcagcaggatcatgcacaggttgcctgccagtgtgattaggtagatcgccaggaacaccccaaacaggatcttctctagcactgggtcgtctgtcagtcctaagagaatgaattctgtcactatggtgtggtttggggacaacatcttcttatttcttgaaaactgaaagtgacaaagaatgtgaggattctctctgatccagatttggcatttgtttcatccatttatcattcactcattcatctattcatctaggcaccaattacttttttcaataaacacatcagaatttctgcacaacgttttctctttatatgtgtgtgttttctgtctctttttgtatctcaaacccacacacacacaggcacattctctatttctgtctcttatatatatacatttataaatttatacattaatgcatttatacttgtcttcttggtgaattctacatttggtaattattttcaaggtttgtgagggaacaaaaaaaacaaagaaatgaatatcagatattaatattagcatcatttaaataaataaatgtaggaagtccaatcttcagtttccctccatgtctgatatcttattatttcagatacaaaacagaagaaaaaaattaaggtagcattttcacttaaaacctatgactgtcggccgggcgcggtggctcacgcctgtaatcctagcactttgggaggccgaggcgggcagatcacgaggtcaggagatcaagaccatcctggctaacactgtgaaaccccatctccactcaaaatacaaaaaagtagccaggcgtagtggcgggcgcctgtagtccaagctaccgggaggctgaggcaggagaatggcgtgaacccgggaggcggagcttgcagtgagccgagatcacaccagggcactccagtctgggcgacagagcgagactccgtctcaaacaaacaaacaaacaaacaaacagaaacctatgattgtcagtgaacattaaattagttaaacttagtgcttgatatatggctaagaatatacaaaaccaagaactgttttttcactttgaaattttacctgcctgtttattcatgtacactgactgcatagcttgatttttttgtgtgtattacaattcctggggttattggagtgaacaaattttccagtttcatggagctcacattataatatgagaaataatggttaaacccacagagaaagatacatattataatttcaagtaaaagctgggtctgtgaagaacaatgaatgtgagattcttttagatgactattcaaagtagccttttctgagaatgcaacatttgaacagtaaataaacaattatagcacctgaaggaagagagtgaagtttttttgtctccatttatatgccactaaactacttattaaaatattgttagagaatcacagaacattgttaaaagcagtctttgctgccaactcaagccactctctctgagttcttcatgaaaataagctatgactgtaaaaattattgctcaaaaatttgcaccctaaagaaattgcttatttagctctcacatatacatcagaggagcttgcatataattgattttagagtcaatgaaatgttaacatatgaatagaaaagtccagtgaaattgatgaaaatatgggtttcctctattgattggatactaatctccacacacagaaaaagttgtatttttagtgaacaaatgtagcaaatgacctacctgttaatgttaactcaccatagtttgtaaagcaaggtggcaagatatatatttcttagctatattccctagagtatttttaaagtaattctaaagaaccaattataatatcctttgttcctcaagggcttaacatttatttgatagtttgaacagctagattctcctttgaagatgaaatccctatacaacatttatgtacagttttgttacatgtgttcatcagagctttagcacaaacagagaaactagccatcactttcaataatatggaagaaggaaaatatagatagataagttttgtaattttaatataataaaaccaagaaggttttcatcagaactctccagttttgtctatagacactggggtgaggtcctttactgagggtgaggggtagaaaggtgtggca

SEQ ID NO: 915217 - DNA, 4001 bp, Homo sapiens
aaaatatattttttacttgttccttaaataattcattttagcataatgtctaaagaggaattctttctactttctaaagtttcttgaagatgccagagcaatgtcttctcttcctgtggaagaaatccttacttccttggacacatataaacaggccagtgctaaggaaaacaaaaaattaacattacttacctaaacttaattacaaatagaaggaatattcaaagcaaggtggatactctatcgtatgacctattgtttactcggttctttcatttcccattttaattttagtccttattctcagatcagcctgcttaaatttttcaaaatcaggcgaaacagaaagtgacctccatacactggaggctcagaatgggaaggtgggtttatgtaactcagagagctggatccataaactcaagtttaagaaaagtacaatcattctcttcccctctttttccattgccactcttcactatgtaagagcacttataaaaaccagaagccatcaccatggcccctagtttctggtctaccacagcaagtcaggaaaggagtacagaagaatggatttcttggagtgcagaagaatgggtttcttaaagacatctctgctgaagcagcaggcgagaataagaatagaatacattcaagaaattgggctgggagcacatttattttgtttgccattgtaaacaaaaagagcacaacagtgttccagggcatgccacgtttcacccacagcagtgctcctcaaaattcagtgtgcttatcaatcatctaggagtttggataaaacacatatttaaatacagtgcacctgaggtgcagactttgattctgtacgtgtaacaacctccaaggaagagctcatgctgctgattcatggaatatatgtggaggagcaaagcctagaaaaatctcatttttacccagcatgagctttttagctgagacactcaacatagactcacagagaatattaaaactcaccatcagaacgctaggacatgtgagccaaagatttcgatttaatgtttattaggaaacaaaggcatcaccatggtcatgacaatatttcatctcaggacattcttcaaggcctgcttcacatctttattcctcagactgtagatcaatggattaagtaccggactcacaaaggtgtaaaagacagctattattttagattcctcaacagtcttatctgttggtggtcttatatacatgcaaaagagagtcccataaaacagggtgacagccatcatatgggaaccacaggtggagaatgccttgtgccttccctctgctgatttgatccggaggatggcagcaagaatgaaggcataggacaccaagacgatggtgagggagctggagaggttgaagccagcagatatgaacatggcatgctctttgacataagtatcagaacaagaaagcttaatgagcggcgggtcagcacagtagaagtggttgatgacactggatctacagaaggtcaggcggaaggtcaggatggcctggaagagtccatctgagaagccatagacatagggaaatgtggccaagcagatgcaaactctcctggacgttttcacactgtagcgcagagggtcatatatggccacatagcggtcataggccattgctgccagcatgtaaaactcagtgagtagaagggcaatgaaaatgtagcactgtgtaaagcaaccagcaaaggaaatggtcttctcagatacgatattagtcgacatctgcggggttgcatttgatgtatagcacaaatccacaaaggctaagttagtgaggaagaagtacatgggcgtgtgaaggcgagagtccagtctcattaacattatcatgcccaggttgcctagcagggtgacgaggtaaacaaccagaaacagcacaaaaagcagagactggagttccgggcaatctgtgagcccaagtaaaatgaattctgtgattgcactgccatttgtgttggacatttcctgacagtttgctcttcaagctatggaaataaagccaatataaacaaatgcacataccatgttaatgttcatttgaattagtttttctccacatcttcatatatcatcgaaagttatctatttctgggtactaccataaactggttttggtaattatggtagacttactataattttgtaagtctacaatgtcattatatcatttgcctaggcattacattactaatatattctttctctacacctatagatatatctatacctacacctgtatctatctatccatcatctatctatctatctatctatctatctatctatatgactgagctacatctcttctatcttcctgtactttttaaaacctaattctattcatgctacatgacccactttaaaggccacttctttgtgaagcatttctcatccatttctcctaatacgtgtcactgaattctctcttctttatttccagagtattctatatttctctaatttattatttagcccccattgtatcattataaagtatatactttctcatcacataatggtgttgagagcagggacaaagtgaagttcattttttaattatacttctcaacacatatttttatactaaattttcttaaaatgcaaaaaggagagcatgtaagaatgaatgacttgcaatttttactcacagatttatctccatgtagccttgcgtgatgtcatgttctcaggagaattaagtgattattgaaacttagtgtagaagcaattcttgggaagcttgtttattagcccatatcacaggtttttgcagaaattcttatgtggggtactggaatcttcatctctaatgattatctgtaggattctaatgcaagtgttccaagatcatagctcaaaatgcacagtcagaatggctcaataaacatatgccaaataaatgaacaaagaactgtgaaataaaataaattttcatatagtatcttgaggatgtttagagcaatgacttaatgtgtttagaaagaaaataaattaatattttcagagttggtatttaatcttttaatcacaacttgtatctaacaagaggtattacaaatccttttggctttttacctctcttcacatcagaatctttgctaattcacattttcctttctttcgagaagtttttaatttttgcccattctttcatacttgaaatttttattacaggcttctcaattcttgtctcatctcaaaatgagtcacctcatttattttactgtaagttttagaatgcctataatcaaaactctgtcttgctgttactattgagaaaagcaacgtacaaaaaggttaaataattgaaccgaggtcacactactagtgcatacaatctgagaatctgaggtaagaactgaaaattatgtattttaaaaacttcctttattagctgctgctgcaatacatatcacctttctaaagctaaactgtttcataaaattgtatgtatagacctggaaggccttgagatatatgatgataaggaacttctggggacacagatagtcatggcattcttacatagtgcaccatgataaacaggattgtgccagacacattctccttacacttagtcatgttctactatgtgactgacttgtgcccttgagtacctgtatgtgatatatctaagaaatatcaagtagaagctatgacatatcttgatgttaggagctggttaggagccctggattacagagttacttcagtaatttaaaagctttgcaactgaatgaatcactgtgttttcccatgtgtaaatggaaataataatatttatctttcctcttctcatgtcattttgggcatcaaaatagatattcatgaaacaagtatttactgatactcaatattttgtgtgattgggcactatagatgcagaagcgaacaaacctttcaaaaatttctgctttttttggttttcccattctagtggacagagagagctattatttcaag

SEQ ID NO: 915218 - DNA, 4001 bp, Homo sapiens
tttctttagctatatattgtttgcctcaaaacagaaggtgattatttatttatttgggctgaggacgtagacttgatgaaataagttaagttgtagcttcatccttatgcttcacgaaatatggtgcaagagagatgtgaaattatgttcccattattatgtcataaaatgttattgataacaacaaatagtgcatgctaaatactgaatttattttaaatgcaaaagttaactagaatatgtaagtgccatgtcttggtcacaggtgtaccaaatatcccacatgagtagaatgtaatttattctgtggaatttggagagcaatggttttacaatgacagcttcttccactaattcttcaactcctcagtcagagtgaagacaccagcaggggcaaaccacagtctggtgactggcaatcatagagtagaaacacagcagttcctggggtctgtgaaacagagacacttaccatgttgtgtttcttaagaaacaccaaaaatttaaaaatcatgaaatacaatagtattgctattttcaaagtagcagtctctgaacagaccctacccaacataatgaaagacgcattaaacaataaataatctcataacaattagagagaccaatattttatgtcttcatgttggaaaaccaaattaaatatcatgggttttttttttctgccccacatttgtttttaagtgggcaaataaatatttcttaaattcatgcacctgcacttttcaataagaaaacgtcttttggttgcagctatttgagcaatttcccttagtacacctatgaactttggcacacatcacagtttcaattaacttatttgtatgtaattaatctccatactcacatcaacagaaatgaatcattcctccttatattttctcaatttgtaccacttttatttttcttttcaacccacagaatatctttatcttaatgttcctaggtactgggtaataaactttttccaaacaaataatagaagataaaattaaatcaaatttgattttattttgtttaacatgatctgctgatcactttcatcatggcctttttcacatccttgttcctcagactgtagatcatgggattcaacatggggatcactgtggtatagaacacagccaccatcttcccctgctccacagactcctctgtgggacgtctgagatacatgaagatcagagtaccatagaatataatgacagctgtcagatgggacccacatgtggaaaaggccttctgccttccttctgctgagcgcattcgcagaatggcaatgaggatgaataagtaagagatgataattacagtcagggaatatgtgaagttaatgccggcaagtatgatcattgtatattcttttacaaaggtcccagcacaggccattttgatgagaggtggatctgcacagtagaaatggttgatctcaatttttccacagaagtacaagccgtaagtccataatgttgctgccagactcgtcagaaaaccataaatgtaagggaaagtaatcagtcgaatacagacaacccttgacattttactgccataaagcagaggattcccaattgccatgtatctatcaaaggccatcgcagcaagaataaaaatttccacatggacaagagcaatgaagaagaaacactgtactaaacaaccagcataagtaattgtttttttatctgataacaggttttccaacattttaggggtgacattggaagaaaaccacacatcaacaaatgacaagtgactgaggaaaaagtacatggggttgttaagctgaggactgaccttgattaacaccatcatgccgatattgcccaccatggtgatgatgtagaccacaagaaagatgatgaagaagagaacttgccattctcgacggctcgttagccccaaaagaatgaactctgtcacatcggtgaaattgagcattttctgaattctaagtcaatatcagttacaaaactttttgataactaaaataaaataaaggaaatattagaatatttatttattaatttataccttcagatgctccctttatacaatatctattagcacactttgcattcttttcacagatcttttctcagtgcctgttatgtaacaggctctgtgatgaataaatgtagacagtccctattatataacaattatacaaagtttagtgactgaaatacactggtagtaagtaatgtgagtagtcatatttccaagattatttcattacttcttaaatatccctcatttccaatgatggcatgtttggagttttatattttaaagataattacaatggattatagttattttcgtaatagaacttaaaaagtgtacatttttacctaatctctttttcattgtaagcatattctcaatgattagagaaaaaaatcatatgatgaaataattcatcagcctaaaatgttataaaaatgtttttaatctaatcttatatttgcattattttcaactgaagaacaaaaaaaagatgatagtagccatcaaagtcaagttaaagggtgaattattggtccatgttcacactatataaacatttcctggatatggactcccaactctaacatgaaattataatccactagatatcatatactgctgtgttctagagattcaaaaataggtaaaacatacagattaatgtcagtatttatgaagatactaatgtaaacaaatactttttaaaacttgaatgtattctcatagaggtataatagggacagaaatttaggaagtgatttattcttctttgagggttcagtggaattctaggaaggtttcttgtatattttgcaaatttattttcaaatataagatgtatcatataggaaacttcttctagaaaatgcttctcaaattatatttctaagaaaacattagtgcttggcatgatcttactagatataatggagaataatccacaaatttttctccatcaaatgggacatctttgtgtcctgtcaaatctcttagtgattcacaatctacctagtaaagttatttactgtacacatcattcatttaacatagaaatttacactcacacgcacacacacctctatttatgtatatacatatgtatatatatacacacacatatgtatataaacatacataaagcttatgtatatttctctcatatatgtatgagaaattccattaattggatattttgtcaatgagcattcacattctgcagaacagagtgcaaatctatctaataagaatcttgagatagcctttcagcaggaaatacatttgttggagatgcgattgtgtcaaaccttctaatggctatatgttatctctagagcaaacaattattcccaagacccttcttgtaatctgcaatgttaaactgtattcaatcacaatttgatgaaatttatccatattattactggttagcagttacccagaaaattagcagtcaggaaggtaaatcacaatggatagtgaaaataagtgaacatttatccatagtaataatccaaaacttttcaaccacaaacttggaaagaacatttttctatgactagaggagaaaattactaattgaaacagattgcattctacatggccccagaggtttggtctaattaataaaaatttgaaggattaattagtgggtacatttttaaaaatgaataatagttaaagttctaaaaactgtgtatactgccttagaatatatttatatatagactgtaaaatctgttacagagttgttaaaatctctaagatccttagatttatatccaaacggagattacagacatgtcaacagataactccagatttctggttcaacagtttatgtctgtggctgcctgaaatgttcttgctggcaatagagggattcttatttggaaagtcatatctcattttgtagtgacgggtgattcagcacaaacaaggatgtagaagatggcattgttagtactcccctcaag

SEQ ID NO: 915219 - DNA, 4001 bp, Homo sapiens
agacaggagtttatatatggcttgtaatattatttgacatttaaaactacatacattaatcatgagtaggttcaaatggtaattataataaataattttaactgaacacacatgtgtatgtaaaagcattaaaaatgactacaagaacacaaaacaaaatctcaaatgtgatttcttcaaggtttgtgatgttctcattctatgttatataattcagcctgtgtgaatttgtataattaatatggcatcaatcagaataggctattttgtgctagggaaacaagcaaactccacatatcatagtagcttatgaaaacgttatttatcagccgttttgtattgccattgtgagtcggatgagaacagtgttccatgtctcctgactgggcagccactatattaagtcttgctggtcaccatggaaaaaataaaaacaacagatccactcaaaaatgttctaacaatcaattaagtattcaactgagaagtgacatatgtgaattttaatctcatcttccagaaatagccacatgatcttacctaaacctaagggcatggaggtacaaagccattctgtgcacggaagacaaagaacttaaaataactgctgaacaagatgaatgacaacttaaaacataaaagcttttgtgaacaaaattgtacgtatttgaattttagaaaataaagtttttagactgggcgcggtgtttcatgcgtgtaatcccagcactttgggaggccgagcctggccagcatggtgaaaccctgtctctactaaaatacaaaaaatgagtcgggcatggtggtgtgcgcttgtgttcccagctactcgggaggctgaggcaggagaattgcttgaacccgggaggcaaaggttgcagtgagccgagatcacaccactgcactccagcctaagacagagagaaactccatctcaaaatataataataaaataaaaataaataaagttttgaaaactgcaatgttctccattgatgcactatatttctcagctaaagaaaaaagtctaggaagggctttagaaaccaaaagaatactgatttttaagaaaagtatatcttcattgacagctctttgattaatgcttcttttacatttttatttctaaggctataaattataaggttcagcatagggattactgtggtataaaatacagctaccattttaccctgttcaacagattcctttgaggggggtctgagatacatgaagaaaagggttgcatagaatatagtgacagctgtcagatgggagccacaggtagaaaaagctttttgcctgccctctgtagagcgaatctttaaaatagcagggaaaatgtaaaggtaggaaatacatatgatgaagagagaaaaagaaaggttccagccagccacaataaacattgacaactccttgttgtaggtgtcagaacaagccagcttaatcagtggtgggtccgcacagtagaagtgattaatttcattggggccacagaaggctaggttgtaggtccacatggtctccatcaggccagtgagcgctccatacacataaggcaccgtgatgaggaaggagcacacactcttggacattctgctgccataaagcagagggttgcagatggccatgtaccggtcaaaggccatcacagccaggatgtagatctcaacatggaccaaggcgataaaaaggtaacactgcacaagacaggcaggataggaaatgcttttcttctctgaaaggaaaatctccagcatctttggagtcacattggaagagaagcacagatccacgaaggataagtggctcaggaaaaagtacatgggcatgtggagccaggcgttggcctggatgaggacaatcatgccaaggttccctgccaccgtgaccatgtaaatggccagaaacagcgtgaagaggagaatttgtaattcccggcgactggtcagtcccaggagaatgaactcagtcaccaacgtgcagtttcttctcataatttccttcggtggaagaaaggaactttacatatatattggattacaatacaatagcaacatgattattactattacagtaatgatcttttaccaaaaacgtcccctctttttggcagttttcctcattctatttctactgaactttgtttcaggtaaactaaattagggatattcaaagcagctctctaccttttatgatactgccctttatttttcttgttttctttccattttctttcttttcactcccttcaaattcagcttctgtttttctattcttcttctctcgtttctcctccccttattctgcctctccttttatttgagaaatgtactttataggtggacttgccccaaaacataacattcagaactaagcaatttcttttttcccgattataatactgggcagagaatgcgcgtaaagagagaaaaggacaagtatcaaaaagcaatatttgcccgaggatcttgttctttgtgaatagttttcaccaatccgatcccttcctggagaagcctgagcaaacaggttgggctcatttgttgctttcttattcctccaggctcagtgcaatagggattctccaggcagggcatgatttttttccccttattttgaaaagtgtctgcatatttgccttttgagggttgcacagctattaaattctctagccagtaacactctctttgaattttttggaggaaattttccattatgtggagttaagactcatggaaattctctcctcttgatcttccacttctagtttccactgagagaccagattctctgtttagaaaggagtagtcagggcaggtgtggtggcaggcgcctgtagtcccagctactcaggaggctgaggcaggagaatggcgtgaacccgggaggcggagcttgcagtgagccaagacggtgccactgcactccagcctggacgacagagccagatgctgtctcaaaaaaaaaaaaaaaaaaaaaaaaaaaaaaaaaaaaccataaaggagtaggcaggggtcagatgttagtccctgcttgtcttaagtaagttcatgactcaaggttgcaaaatattttttcatctaattgattacagtgaagtttgaagatcaggctgatgttgcaaagaaacactgattctgtgtggtttgatctgctcagcctccacacctgcctaggctgctatctgttctctgagcctggtcttttaaccgcacattgatttaggagccctaacatcctttcagaatgttccggttttgcttagcataaccagagctgtgttctgttacttacaacaacaacaaaaactgttaacactgatattaatgaaatgtaccttctatttttctatataaaaatcatctatattcacaagaacaacttatagaaggttatttttgaatatctgaaacaaagattttatttgtgatttatacaacattgagtaaaagctgtgtctacatctattcaatcatagtagtgatgtaccctcattcatttttatatatcaagctcctgtcagatttcacctttgtttctttgtttaatgttgtttttgcaataatttatatacagtgaaattcacatatttaaagtgcccaactttgtgtgtttgacaaatgcacacatctggttgacattcttaagttttaggactcaaccaaacaaaaagatgaatgctttgataaaaatgcaataggcttagcataaaatcagttcacaggatctggagttagatatttctgaaatgctgctctattcttttgacatgttccttattctgtgttttagttttacaactaatttaaccagcacttacatggtgtttcttataatccaaacgctaatctattttataagttttaacacattcaaccctcaaaccgattctatgacactctgcctgtaataggtatggataatagcatatttccctcatggttagtacagaaggaaattccactacgaaccataaagcatactgtactggtaga

SEQ ID NO: 915220 - DNA, 4001 bp, Homo sapiens
ttccattgttgtctttaacaagaatataatgtagaacaagtaagctatggaagcaccaatctagacaaacagtgagcttttaaaaatgtttaaccaggcccaaatgggatgcaatttagaactctgctggtcacctttgagtgagggtcccatacaatttagctgaacagttcttcttatctggtttatcaactatagacattaaaagcttgatttaagttgctatatacaaagtcaaagaatttaatgttagtgaaaagagctggaagcaaagaaaactttcaaatcatattatcaatcaatggtttaataagacaatatggtattgccaaagctcagactttgtgtcagaaaatgtatactgcctcatcttttcattatgattagggcaggaaaatcttttgtcagagagagttcaccctactaacataaaagaatgtgtaaatgagtacccatcaaggagtagagttagggtaagaaaacagaccattgaaacaaaacattattaactatcaaattatgtgaaatgatgacaaacaggattatattaagacactagtttaaaattctaaatataattgcattttcaaaattttaaacactttttaggtaaactgttcatcagtattctatggccatgaaaaagaaatgaagtatttacttttttctgagaatttgtatatttcacatgaaatctagtttgaggaatatgtatatgtataaagtactctgcaaaataacatccaacactaacaagcatacttccaacttaacatatatgtatgtacactcatttgtgagttcctccagtgactaaacttagcccaattttaagcatattgtgaatgaacattgtgtcatctttcataatattggcgcacatataggagaaaatatgcttagtaattagagtccatacaaggggtaaaacatcaccctgttacatcagacctcttagtgtgtgaaagagttaccttttgatactgttttctgagctaggacttttacatgtgaccatttataacaggaccctatttataatagggacaacaatatccactacagttttactgcctcacatatgtcttggtgattgctttgttgactgcttcttttacatccttatttctcagactgtagatcatgggattcaacataggaattactgtggtgtaaaacacagccaccattttgccctgctctacggattcctcagtgggtctcctgagatacatgaagatgggggtcccataaaacatagaaacagccgtcaagtgggacccacaggtggagaacgccttcctcctgccatcggcagagcgcatgcgtagcacagctactacaatgagagtgtaggagatgaggaccaccgagagggaatatgtgaagttaattccagcaataacaatcattgtgatttctttgatgtgcactctcccacaggcaatctggatgagagggggatctgcacaatagaagtgattgatttcaaagtttccacagaagtataagccataagtccatagtgtgcatattaggctgacagagaatccatagacataaggcacagagatgagccgaacacacacagtcctagacattttactgccataaagcagagggttgcagccggccatgtacctgtcaaaggccatcacagccaggatatagacctccacgtggacaacggcaatgaaaaagtagcactgcaccaagcatcccacataggaaatggtttttgtctctgataataagttttccagcattttgggggtaacgttggaggagaagcacacgtccgcaaaagacagatgactcaggaaaaagtacatgggactctgaagctgaggactgatgctaatcaaaatgatcataccaatatttcccaacagagtgatcatgtaaaccgctaggaacaccacaaaaaagagaacctgtagctcctgacgacaggtcagccccaggagagtaaattctgtcacatccgtgaaattaggcattgccttagtataggccaagtctgtgttgcctatggagaaattgtttcaaaaggaaagtaaatgaatttgttttattcttgaaactgagttgcgtttgtccttattttaattcaaataatttaaaaacaatgtacactttgcaaaaatgtacaatacagggtttaaatatactatacataaaatgaactgaatatataacataatagacattgcagttttagttctgatccaactttcctttgctatagatgtccatgattgtagtttcacttttttggctcattataaatgtcaaactaggtaaagagctgcagatgctgtggtcagagattttcctatgtaaaaatttctgatctctactggtttcctgttactaacagaatttgacttgggttagtgttactactgtattaagtataaaatatatgaaataaagcatcaaggcatctaagaaacataaactaacactacattttgtttcagtcacagtgtgatgtacttttcttattttacacaaaatcattagcgctttagcatttaggttgctgcaaaagttattgtgggttttgccgttactttcaatggcaaaaatgcaattacttttgtaccagcctaatattagtttgttttgtttaccttgaaactccttaaactgtcttgcttagtagttacatttaacagaaatttagaaatagttatacatatgatttctacatgccctgatctctagatccactaaacatagtacaataatccagtataattaaaactctctaagaaatatttttctagaggcaacagtcccagccttgtaatacttataagaatagctgttattgaatgttcaggaaaactcttctacgcaaatgtcctgtaaaacaggttttatttgcatgaccattttacaaatgaggaagctaaacactgagagattaagaaagtctccctgggtcagaggtctactaattagcagaattgggatgcaaacaaaatcattttagtgttgtgtctttaacaatcttctattgctgcatctttgacagcctcttctaccattatatttcttttcatttgaaattcagtttgctcatcctccacaatatgtggaagttatctctttcatagttcatctttaatggacttttaagagctttggttaccccagagcagcctaaaccactgagatagtaaatcactgcaactctctacttgtccaagtttatcatcccaggatcagatgataatgatttctgggagaaaattaatttaatacctaaatgtgtatcatctatcaaaataatcaagaagattgaatttgtaatcgacaaataaaacccaaaattcatttctattaacacttcaggaatttttcatgaagaaaaccagtgaaggcataaattactggaccaatcatgccaactgaccctatatccccaactccattcatacatatatttaaacaatattatgaaagttaatagtttttgtctgtaaaagagaatgagaggacaaaaaatgagaaatgaggagttttgcaaatcttcattataataagctcattcttacaaagttttcaacaaaccagggatagaaatacaaaaagttcccaataatataatttcatacaagaagacactctgataacaaaataagtctgtgaataaggtattagttgcctcttcaagacagagagtgaaattaaaatatttgactacatcaatctctattgtaatgagtgaaaaacttgcagacctaccttcagcatagagagtagaaaatgataacttctcactatttataataatgtcttaaacattaggaacactgggatcatctccctaaaggacgattcaggtaattatgaaaaaaataataagtaaaattctagacacagctcaggtataggagcagttaaggagtgtggatgagaagaagattttttaaataaaatagatcaaaattcttgatcaataatataatcttatctctcactttcacatg

SEQ ID NO: 915221 - DNA, 4001 bp, Homo sapiens
tacatatagggattttttggtaataagaggaagggcctggaagaaatggggctacttcagcatcaaggtaatcaaaaatctatgccttcaaacatgtagaaatatgcagtttcttatgtatttcatgccacaaagttggtgtaatacaaattagcctgccatatccagatatagaagtctctatacttactgtgaacagaaagggtttgctagaaagaaatgtgtcagagacaaatgaaagttcatggtgaagtgttctcaaattgcccttcactccacaggaagtatgtgccttaaaaaaagccaaagtattatgagaatatttgtgccattgatcttttgcttaaccttacgtgcctcagttacatcctttgtaatacaataatttttaaaaaaactttaaagagttattccaagaaataattaggttaatactttacttgtaaacagtgataacagtgcccagaatgtagtagacagtttaatcctgttactactattactaacatttgacttctagatcttttagctctccaaccatgcaaatgcataaaggagcaactatttagtaaagtgtgaattcaaaccttttagtaaactaggctgagattctagttgctaatctaggttataaaagtgtcaaggaagtgatgtagatgtgctgaggatgggtttgttgtaaaagcctgtctctgttatagcaggatctcacctaaacattcagtcacttgaatcaggcagaagcattcagctgatcagtggccaggattcaaagtcagcagagtcagcagttcaagcaggaacaaatgcttcattcagccatccattaattcattaattttttctttatctctccattttaaatatgcaagtatgcttattaagttctagaaactgtttgaaaattaggtacatggggagaagaaaagatgtggtagattctacatgaaactttcaacactgtcaagaaagcaaacactaaatctgtatctacacgtgcattgagtattctcaagagaagagatagggttctatgtaatatcattatttgaagttctactaaaataacaagcatcatgagaaagtatttttctaacaagctctctcttcagagcccccttaatctccttgttcctgaggctgtagatcagggggttcaacatgggaatcaccactgtgtacaacacagacaccaccttgttctggtcagttgagtagctaaaattgggcatcacataaatgaaggtaatggtcccatagaacagggtaaccacagtgaggtgggaagtgcaggtggagaaggccttgtggtgcccctcagtggagcgcatcttcaggatggtgatgaggatatagatgtagcagacggctatgacacacacagtgaccacaatgatggatccagaagaaaatgagagaacaactgtggagacactgatatcagaacaggagagttcaagtaagggagcgaaatcacagaaaaaatgattgacttgatttggtccacagaagagtaaaaaatagaaggaagtagtataggagacagcaatgagaaaaccagctatgtaaactactaagagtagctggacactgacttgtgtggacattttggttgaataaagcagtggactgcaaattgccacaaagcggtcataggccatggcagccagaaggacgcattcgactgttgcaaagaaagccgctgaaccaagctggatggcacatccaaggtaggagactgtatttctctccaccaggaagtttacaagcatgttgggtgtgacagaagatgaataggccatgtcagcaaaagccaagtggctcagaaagaaatacataggatgatggagctgagaagaaattctgataagaataattatgctgagattaccagataggatgatcatgaagaggatgactcgaaggattggatcatctgttaagcccaataggatgaaccccgtcagagcggtgtgattcccgtccttcagggaattcatgagacgaagtagctgctgactaaatgaaccctaatgagaacagcacattaaaatgttataaatttgatggcttcatcttcattaatatatacatgaaggttaatatgaacagatgtatcattcaaggaaagttcagacttttttttttttaccttagggtttcattgtttatgtatttatgtgtaatcagtctttctatattttaaaatctgttttagaacaccaaaaaattgcttcaaataatgtatatccttttcaatttgtatttttaatgaaatatatttaaagttgctttaaagagaaagattttaaaacataagacttataagaataataaaaggtatggtacatataacaaaaatgattaaaatatattaatgtaagattaatgaacacaaatattagctaacatttactgaatgcctatcaaattactggctcagggttaagaattttatctatatgcatataatatataacatattattgtattatatacattatatatacagagatacgtattttaatttccataaaataatatgaagcacttttattattaccattttatagatagggaaactaagtttgcaaatgttaagtaatttacctaaggttacacagcaagtggtagaatctggatcagaatcccacatagtttgaatccagtcaatttccataataactatgttattaatgtaatttgtataaaattgtataatttgtataaaattgtaaaaccattacatttatagcatagttggagaatttttaccatgaaatctggtacacttgaaaatcagtagataacagattaacatttcagttctctgaaatgtacaactgatgtataaaagagacgcctagctagttacatagtttacaatgtttatcagttaaacaacactagttttttaaaagagacatacaattttcttcataggacagggaagaaatgggaatttcaagttatgcttatgaatgaagtcacctagtataaattgattaatgacttttattatttccaattaaaatattattatatcaagtaagttgaaataccaatttaaccattatgcaaaatgttgtatgattaatattcagaacataattaagatatttagtcaaaccaaatcttttcctagtgtaacaatgttaacaaattgaagtattatagaatcaaataatattattttggacataatatacagaagaacaaagtttcagcctagaaatataaaaagtttaccaagggccactctgttgatggccagcttgaccctcatctccaagttttctggccttatagccttatctttctccgaaatgtctagctgggccagccatggtggctcacatttgtaatcccaatactttgggaggccgaggtggacagatcactggagtccagaaatttgagaccaacctgtgcaacatggcaaaacttcatctctaaaaatgagccaggcacggtggtgtgcacctgtagtctcagttacttaggaggctgaggtgggaggatcacctgagcctgggaggtcaaggctgcagtgagccatgattacaccactacactctagcctcagtgatagagtgagaccctgtctccaaaaaaaaagtgtcttgggccaggcatggtggctcacatctgtaatcctagcactttgggaggctgagatgggtggatcacttgaggtcaagagttcgaggccagcctggccaacaccgtgaaaccccatctgtactaaaaatacgaaaattagctggcatagtggtgcatgcctataatcccggctactcgggagcctgaggcaggagaatcacttgaacctgggaggcagaggtcgcagtgagccaagatcacagcactgcactcccagcctgggtgacaaagtgagactcacacttaattaatttatattagcattacagctgagtgccaagtttagacggcagtgaaagaccacgtgagtttctgttcttatgggtggataaatgaag

SEQ ID NO: 915222 - DNA, 4001 bp, Homo sapiens
actgccttggcctcccaaagttctgggattacaggcatgagccaccgtgcccggcctcaaatatagtttttgaatgtacaaaataaaaaataaatgaatgaagtgattgataccctatgattctattgacagaatgttgggattgttgtctgaaacactaaagaggggacaggaaagagaaataaatctggtagtggtcagcatgcagaggttgattaagcctctccaggggcagacatactttcagaggagaggcagtctagtccccttgagtttcctaagtaagatgaggctctgaccatgaatgagtcactccaaaaggttgttcctcacagccacaatgtcacactataagctggattctcctcttggaagttattgcctgatttttttttccactcagtctctaaggagttcagaaaccctgctcattcccacagaagtcaccggttttgacctgacagagaaattcataggttagtcaggggcctctaacaggttcttctctgggaccctataaccatgctggagacagagaatagaaacgcagcccagattgttgtgggtctcccaagctcattgtcagcaggcaacctttctggaagaagaatatctccagcaattttactatggttcctttgtcattttctctcacaatgtactcagtaacaactatagatatcaggcatgtatctcaggataagctgatgttgacaatggccacagtctgaaggtttaaaggtatgccttaacttatggcagaaaacaactcttgaaaaaataagaataaaatttttaaaggattttcagcagataaagcatttttttcatgtgaaactatttgcattctcaattataaatttaattaaattttattaaaggtaaagcaagatggacttctaatttcctattctatctgaaaatcttccctcctgattgactaaaaagctccacactgggtaatggtctatggacagataaattttgaccacaaacactcggtgtcttattattattatatatagaatattaatatatcagattcttcaaactaactagtttcatcaagaaaatatttttattctaagctctctcttcagagcccccttaatctccttgttcctgaggctgtagatcagggggttcaacatgggaatcaccacggtgtagaacacagacaccaccttgttctggtcagttgagtagctggacttgggcatcacataaatgaaggtaatggtcccatagaacagagtgactgcagtgaggtgggaggtgcaggtggagaaggccttgtggcggcccttggtggagtgcatcttcaggatggtgatgaggatatagatgtaggatatggctatgacacacacagtggccacaatgatagatccagaagagatagctggaattatttcaaaagtaaaatcatgggaacaagcaagcttcaaaagtggtgaatagtcacagaaaaagtgattgactttatttggcccacagaaggacagtcttaataagcagccaatgaatgtccaagcattcacacatccacccaggtaggacatgcccactaagatgatgcagactccaggggacatgcaggtagagtagagcaggggtgagcagatggccacatagcgatcataggccatggcagccagcaggaagcactcggccgtaccaaacgtcactacagaacagagctgggccacacaaccagcaacagggagagaggtttctttccttaggaagctcatgagcatgacaggtgtgactgatgaggagtacccaatgtctacaaaggccaaatggcagaggaaaatgtacatgggtgtatgaagatgatgacttcttctgatcaatacaattatgctgatattacccattaaggtgacaacataaattcctagaaacacaagaaataaaatagcacaaactgtagtatcctcagataaccccaaaagagtaaactctaccacagtggtgtcatttccagtccccatctatattgggaatggtgccaactgaaagaaaaacaaatgaatattataatgggattaaatgctataattgcacacttatttttccaatatctatttaaccaaaaagtataacaatttaggcactcatgtaaatttgggaagaaaatgctttcacacacagtatcttatgtaagactttaaaacataaatgttcactgatgtaaggtcaggaatactcagaaaaatctttttttttttttaacttaacacactcaactcgtattggatggttaatttaggtgctctctgagcacatttcagagatgaccactagaatatataaagaatccagtaactcaatcttctaaggccaaagacgtgattgaagggagacataaatgtcagaatagaccaagactcatggaaaagaacagctgttcaaaaggatgtttgaggtatcatctattgtatcaaagatgtgtagtcattaagaattccgaattccaaacagaggtcaaacagattagctgcatgctaatccacaggaccaagaagaggtcagtaactcaacactgagctgtggtccccacccagagatttcacaattgaggaaaagtacaccaaatatccaggaagtctggaccgaggcagaaggtgaagtaatgcactcacactataaacaagtaaacagaggaagactgaggtttgaaagaggagatgagatatctcctaattatctcaggatcaagctatctgattcatgatagtgagccaatctagagaagacatgatcaggttactcctggaaggctccaaagatacaacttatacccaagactctgcataagctggggctaggttgctaacagaagattccagccttctacagaacacaaatatccagccctatctgaatagttgctgtctgaaaaaaattgcatctgtaggtcaccttctggaaggccctcctccataccaactcgcttgagaaaaatcaagaaaatgcaagaaaagcaggagagctttctcacagcttcaaaaggtcctagaaataatccactcgattctctcactttataaaattataaacggagatctaaaaaagatagataatacacaccattgtccaacataactttagatcaaatggctttctggaaactgagctaaaatgaagaaccatattcttggacttctaattcatttactatctttatttcacatattatacatcttttctatgatttctaaagaagactatagactatcagaaagtatatttggttcattacatatttaaaaaggttttaaaattatgctaacatataaataatacatttactcttgaaaggggaattttgcagtgcagtaattcacataaagatgcggctgagagataacgacaattctttgaggcaggtgatagtctccttcagtgcccagcacctagggaattgatatgcttttgttttcagctgaacagttgtgagtgcctgatagatgaggggtcaaatttcactaagattttcttttttctgagcaacgaaagggacagatatggaatgttagggtatatgcaaggtagagagtaaaataaccactacatttaagctaggcaaagatgaagtgagtacctgagatgggtaaaatcaacaaaatggttctagcctttctgcaaggattgaaaatttgctataattattctaccagtgaaaacaagcaggaaaaacaagaaatgatggtagttacagtttggggtgcttaaaaatgagattacggaaaagctacagttattggcaaatgctaatgtctaaactctaacaacgggagagacaggttttagggaggaaaacaaattttttttgaagatatgtcaagaaactaagaagccaaaatgttgaaagcaacctctatgtggaggtattaaagccaccaggaatagtgacagaaataatgtaagaaaatgagtgagccagagccaaaaatcttccaaagatgcggagacatgatgctagccagttg

SEQ ID NO: 915223 - DNA, 4001 bp, Homo sapiens
tacataataacatagggtactttctaattgaacaaatatgcaagtacaatgaaggtgtttattttaaaaattatttcttataaaacatgttcttccaattatattttttaaaaaatctgataatgacacatttaaatccaattaacctcattcttaacacccacagtgttaacaaaaaattcagataaacctaaatttgcttttagaattttcatattgctagttatgtgaccttcaatttagagagaaaacttcacacacatcatatgtttacttgattgtagcaagtaggactacttgactaattagccttgaagaccttaatgaatttattttttaatagttttatgttttggtttgtttgtttgtttgtttttagagagagagagagaaggtctcgctatgttgcccaggctggtcttgaactcctgggcttaagcaatcctcccacccttgactcctaaagtgctggtactacaggtgtgagccactgtgccaggccaaataaattcatttctaactttatataacaaacatttatatacctaaggcttccaaaacacttattatcactggatatttttctaagcatttcataaatattaacctgtacaatccttaaaaaaagagcaatgagttaggtcctattatttcccagacttggagacaaagccacacaaaatttagctcaattttccaaggttgcagagctaatatgaaggaaatagtgttcaaactcaatcttgtttcagcatcccaaactctaacaaaaacatgctgctgcctttgctttaaatacacctatgagtgtttgcatatatgagtgtgtctctgtttgtatttgaacgtggtttcagtggtctgccaagactgtgatggcctgaattgaatgctttaattcgtactgatttttcatgatctgcctggttcttgcagaaaatgtcaaggtccattaaagtaacagctacattttcagttcattgggaaataattacaagaaaaagtttgatttatttcctgcttgtttaataaagttttcttatttttaaaaatgttaatatctgtaagttttcacaacctttatccaaggctttctttgaggcatctttcacttctttgttccttagactatagattagggggtttaacatggggatcaccactgtgtaaaatacagaagccatcttgtctgtgtccaaggagtgatttgatttgggctgtaggtacataaagatcagtgtgccatagaaaatagtgacagtcaccatatgggagccacaggtggaaatggctttgtgttgcccctgagtagagcggatccttaggatagcggcaataataaagatgtaggaggtgaggacaatggaagaggaagagatcatatcaaagccagcaaaggcaaatatcagaatttccttcatgtgtgtgtctgagcaggacagagctaagaaggggaggtcatcacaatagaaatggttaattaagtttgggccacagtaagtcagacggaaagtgataacggtgtggaagagggcaaccaggaagctgtatatatatggaactgccaccagttgaatgcagactcttcttgacatcagtgttgaataatgcaggggactacagatggcgacatagcaatcgtaggccatggaggctagaaggaaacactcagtgatcatgaaggtgagaaaacaacccagttgggttgcacaagcatggaaaggaatggtgttgcgttccacaacaaaattcaccatcatcttcggtgtaatagcagaggagtaacaaaggtcaacaaaggccaggtggctgaggaaatagtacataggtgtgtggagtcgagtatcaatcttgattaaagtaatcaacccaagattgcccagcactgtgaccagatagataactaaaaacaccccaaagcacggggcctgaagctctggccggttggtaattcctttcagaatgaatacagtgacataaatgatattaacttcagccatttatcctaacaggttttgtagattttgtcgcagttgaaaaataaaaaagatacttctcatgttccctgtcagtgttgggtaaaggtgatgattgttgtcttcttgccttgaatcatatcatcatgtgggcaaaaacatacatcttacctctctaatgacagaggccaatcttgcctgagggaggggagtcttttacttgcagaatagtaaatagaccaccttaagaaatattttgctttgtaattttagaaaataagagaagatgttggttaaaattatatagtatgaaaccgcttgtgacaactgacactaatatttcaatgtttttgctgccattaaaaatcttatatattttccatgcatatataacagaacaaaaatattgaatttatagacgtgaccacatttatatttccttatttttcggttttgtgcgtgcttccataaaatatgtcaaaaatagatcaaaataattttagagctcctatgaactattcaatttgctatattccttcccacatttatatagaataagtaatttatgctgtagaaatggaaagaaatttgatcagaaatatgagaaaggaaacattcagttgtaaaaagttttatggaaacatatactggtgggtggagtttttgatgcatcttttaggataattataattatttgtatttctaccagccctgaaaaaaagaggattcatcttgttaagcccaatattagcctatttaaactttaatttggtcctggctttatttttcaaaaaatagaatcatgaaatattaactagaaaatgctttgagagatcatcatatctaaccactttgtctttcatattccattgattagtactattattattttatctattgcaattgagtgatgtccttatcagatattctgagtgcattacatgaattaagatagtctcttgcttaccctatgaggaaggctctcacccataactccttataaacattggaaaaatccgactttctggtgatggtcacagagtattagtgtgactatgtataactgacagcagagcccatatttctaatcatccttatgctgcccaagtgtagtggtttgttccttaagctttaatcgccgggatggatggaagaacgaggctaaagtgtcaaactaaatgtttaaagcttacagaagacaaacatgaaaactgtagttttccaaagattgctaagttttcatatactaggtcaaagtaaaatagaagactcctaaaacatatatatatatatatatatatatatatatatatatatacacacacacacacacacacacacagatgcatagacatatacatatatacatatatattgctattctcagtaaataactgtttcgttcatgaatattcaaaagtgagaattatctgacttacatatgggacttgaatatgctcaattttttttcacaaaggattttatgtcaattcgagctgtgaagttataatttgaaccctaattgaggataattataaggctatcccacaatgtaaaagtaaatagaccaccttcactgaaaaatagtgtcagggaaagaggtttatctaccatttatttcactttattttttacttaatgaagtccatctatatgttagcacttcttgtgttattgcttttatataacttcaagatttgtggtggttccaaggtacatgtcacaccaaatgagaaaaagccacatgagaaaatagatgtatcagtaagaacgttaactatggtggacacgtgctattaggtaacatggaatatttaagtttaagtagatacatacagcacattatggtagaaaaacaaagtccacagcgaagttggatattaaactggagtttacattccaaattcaataaacttaaaaatcacgtagaaataaaattacttataaaaatctgttacagtgctcataaaaatacagcatttatgattttgtatctaccttacaactctgtacattattttatta

SEQ ID NO: 915224 - DNA, 4001 bp, Homo sapiens
gttaggcctcaggataactgtgggcgggcctgactcatgtcaggccctccacaagaggtggaggagtagagtcttctctaaactcccccagggaaagggagaatccctttcctggtcagctaagtagcgggtgtttttccttgacactgaggctaccgctagaccatggtcagcttggcaacgggcgtcttcccagacgctggcattaccgctagaccaaggagacctctggtgaccctgtccaggcaaaacagaaggctcgcactcttgccttctggtcacttctcactatgtcccctcagctcctacctctgtatggcctggtttttcctaggttatgattatagagcgaggattattataacattggaataaagagtaattgctacaaactaatgattaatgatattcatatataatcatgtctatgatctagatctagtataactcttattgttttatatattttattatactggaacagctcgtgccctcggtctcttgtctcagcacctggatggcttgccacccacataacattatctgacttcagattatactatggaactcattttcaacaaaggtgccaagaaaatacattggggaaaggagagcctcttcaataaatggtgctgggaaaacttactttagcacccattatagagttatgtaggaacacatgaagccatagaatccagaggacatcattattaacatagccagtgaaaatcaagttatacaaaaactaaaaacagcaatgtttgcacatcaatgaatatttaatgcagattagtttaaacattgtcataggctatgaatacaagccatattttatacatgatacaatatattgatatttctaaaatggtgaattagtaggctgattgatgctttatttgaaaatattctagaagttacaagcactgttaactaaaagaaacacattttcttctctactttctgaccatagagatgtggactgacacccaatattatttgcaactttactcaattttaaaactataacttatttatgaaccaatttctcacaagcaatcttttgattgcctcctttacatctttgttccgcaaactgtagatgatgggattcagcatgggaatcacaatggtataaaatattgacactatcatgtcattgtccgaagtgtagctggaacttggtctcacatacatgaagaggattgtcccatgataaattgtcactccagttaggtgagctccacatgtagagaagacttttctcctcccttcagcagactgcatcttcagaatggccaacagaataaaaccataggagatcaggacaatcaggatagtgactatctcaatagagcccacaaagtagaagaatagaagctggattacgtgagtgtcagaacaagaaatagcaagcagaggaggcatattacaaaagacatgcctaatttcattggatccacagaaggacaggctaaatgtagccactgtatgtatagtagcatgtaaaatgctagcaacataggaagcagtgatgagtggcacatagactctgggtgacatgctcactgaatacaggagagggttgtagatggctacatagcgatcataagccattgcagccaagagaaagcattctgtggttccaaaagtacaagcaagaaacatctgtgttgcacatccaagaaatgaaatagatttattttttgccaggaaattgaccaacatttttggagtgacaactgtagaatagcagacatccaagaatgataaaacaccaagaaaatagtacattgggctgtgaagccagaaatccccaatgatcggtacaaccagccctaaattgcctattagagtgaatagatagattgctaaaaataataaaaataggaagacttgcacatcaaattcttctgtgaagcttattaatataaacatggtgacttcagtaaaattgtttaattgaagcttgtatagatccatatctgaaggcaaccctgacattttagctattgtttatatgtactaaatgcaacagcctgtgaaaattaagtttatccaattatatcctcatgttcgtttcttggaaaagcaagatgaaatccttgtcagcaaatgcacaggtggtgataaaattgggtccaagtggatacattactgtaattaaataaattaaataaattattttattcaatcatgcactaaatttatctttttaacatggatgaagctggaagccatcattctcagcaaactatctcaagaaccgaaaaccaaacaccgcatgttctcacacgtaagtgggagttgaacaatgagaacacatggacataggaaggggaacatcacacgccagggccggtcggagggtgggaggctaggggagggataacgttacgagaaatacctaaggtaggtgtcgggttgatgcgtgcagcaaaccaccgtggcacgtgtatacctatgtaacaaaactgcacattctgcacatgtaccccagaacttaaagtgtaaaaaaagtctatttaatcagtttaatttcctgttcattttccatcaaatgtactaccatctattcttaatattaaattgtttcaaaactcataaagactgagtgctattcctaggttttctaaaaagtccattgaattactttatttttctcattttaaatatggaaacaatcatatctacattataagagtgggttgtatttaaatgggaaaaacagtatgtaagttatttaatatttaaatatgcccagataactagaaaatgcaatgtcaggcttatattaaaatttatcatttgagacagtctttctgaccaaaccatttcaaatcctttttttttttttggcaattatcctgctgttgcattagtacttacagaatggtggtggatacaagagatttgattctggagatagatgcaccttgtttgcaaaccaaaagaatttggtgttcatttttcatttatttttccttttgtgtttcacttttctttcctgaaaaaaatatcaccaatttgttcattttggcctgtgcagtttttttaagcattattatttttcagattttaacttaaaaccaatatcagacgtgtcaatttatatgatcatttggtcattatgcctgtgaagtccttgggtgtatttttgtgacatatttatatcaaaaatgaattatggctatccttttactatgattcttacgtaacttctgaaatttctataaaataaataccatccaataacaagtaatacaattatttttataaactgttgctaaaacaacacacgtattctctcctatgatccttggaaagtatgtgattcaatttgtaatacagcttcacattaaacagaaccctctttcttatatttaaatagtaagaaatatgttttagtcttaaattcaaggtgagagcttcttaatattttacaagtgatcagattccttttctcttacctttggaaatgaactgctcactcaattcaggtatgctatgaatattgtgcatttgaattcttataccaggcccttgagctctagaattccacagggatgcccaaagaagaaaacacactaattctcttctgggataaaacaaattatgatttttttttttttctgtagtgaacaagtaactgatctggaacatgcattacatgattccaatgatcacataagtgtactttctacctaggtccaaaataatcccccagtggaaaaaaatatgcatattactgaaaaagaaagctaataatacaggccatagtgctagctctgattctaattatctacatgctatcaaattaataacttaaattctctaaaattcagtttcttcttgaaattataacctatgaattatctggaagtcctattgtcacatacataatgaaataatatgaaaacataacctatgacaagacatataatcatttaataaaggttactatatttatttaaatttgacagtcctctaattctaaatggtat

SEQ ID NO: 915225 - DNA, 4001 bp, Homo sapiens
gcataggtacagggtcacttatgatctttattttaaaacgtccaagaaaaaaaacaggattacactaataaattaaacatttttattatcgtctagggaaaactcttgctaaccaggtttttcctctactgtcataccacaacaatcatcaacacagaagacttctgtgatcaaatgggtagggatttcttcctcccacaccacgtggtaatcaccaactgggtatcctctaattcagttgcaacactatctacccagagatagtgtcagatcccataggttgagggttcagtccccaaaactgccccctgacaacaccagtcacaaattcgggtctctgaaactttgaccaacctgcttcaagttggatctcccatgaccccctctttgggtttcattaaattactgaagcagctcacaaaactcagggaaacatattactggcttattgaaaaggatattgcaaaggacactggtgaagggatgtgtagggcaaagtataaggaaaggggtgcagagtttccatgccctccctgaccatgccaccctctaggaacttccatttgttctgctccccagaagctcactgaaccctatcctcctaggttctatggaagcttcaaggcatcagcattccctccccgaaggtatagggtgggactctctcatgggagagtcttaagattcacaatcagtaaggcagacattggaacccagccttggtgcaagtgaaaggagggcaggagaaggtaaaaggcctgcccctgaggtataacacccaacattataacaaaagactgtaacaaaggctatgggaattatgagccaggaaccctggatggaaaccaacatatatcataacaccacaatgacacattcttggtattgaggtgcagagtatcaccctcaccttttataatttattttttagtatgaaaatatactttattgataacctgatttttcccaaacatttttttcattgagtcttttacatctttgttcctcaaactgtagatgacgggattcagcaagggaatcacaatggtgtaaaatattgacactatcatgtcatggtccgaagcatagctggaacttggtctcacatacatgaagaggattgtcccataataaattgacactccagttaggtgagctccacatgtggagaagacttttctcctcccttcagcagaatacatcttcagaatggccaacagaatcaaaccataggagatcagaacaatcaggatagtgaccagctcgatagagcccacaaagtagaagagtagaagctggtttgtgtgagtgtcagaataagaaatagcaaggagaggagggatatcacaaaagacacgcctaatttcattggctccacagaaggataggctaaatgtagccactgtatgtatagtagcatgtaaaatgccagcaacataggaagcattgatgagtggcatgtagactctgggtgacatgctcactgaatacaggagagggttgtagatggctacatagcgatcataagccattgcagccaagagaaagcattctgtggttccaaaactacaagcaagaaacacctgtgctacacatccaaggaatgaaatgactttattctttgtcgtaaaatctactaacatatttggggtaataactgaggaatagcaggcatccacagaagacaacatactcagaaaatagtacatgggtttgtggagctgggaatccctaatgaccactaaaatcagtcctaaatttcccatgagagtgaagaggtagattgctagaaacaggaagaagaagatagtctgcagttcaagattgtctgtgaagcccttcagtacaaataaggtaacttcagtgacattcttcatgttgaaatctagaacaaacttgaagatatgcataaagttacagttcatattatgacaaaaagaatgaacaacaccatgactcaaggggatgttaactgtgctcttgtatatactgtacgacatatattcagcagtgcataattctctagtagtgaatcagaagacagtgacaaactggtcagccatgtgttcatgccactcactgcagaatcaaatggaagaaatggacgttcattagttggctggacttattctgtttctaaaatcatcaggtctactggttaatttaccactgaattgtattaagctgtttatatattaaataatattaaaacacacaaaaatgagtggcttaaacaatctttgggcatccaaatacacaagagactgtatcaggggacagagcattggaatacaataccagaattttagaacttgtagcaattgtgcaaaatgatttgctatatctacttgtctatagaatgagaacattaatagtttgttcacaagattggagtaaatattgaaggaaaattgcattaataaaatataatatgtaaaataattttgattatagaatatgctgaattaagttggttctacattctatcaagattaaatccaatgaacagttatgatttttttcatctgctcattcaaatgtctctgaattattctttggagaatgaagaagttttgtgaattacttgatcattttatgccaaaaataaacatgcaaattaccatgattccattttctacattacaattgtcttaattttgctttgtgcaaataagatacttcaaccaaatttcttgtgagacaggcatttctactagatgccaaaataagttatattgggtaaaaattaagttaatattagcacatagtcaaagattcagagttataaagagaaaatcactatgattcttgaagatttaataatatagaatcaactttttaaattaatgcaaatctatttttatgaaacaaattttaatggaagggagaaaactttaaatatcgtgaatgtaataacgaaacactaagtttgctaaataacaggcatttatttagcacttgctgcaagaacagacatttcttgtacattaccttatttcacctttatagcaactttcatagctaacaatttccagagccaagattcaatcccaggtttctctcattgtacatgaaatttttgcattttttcatggcctcataaatggcttcattctgcaactggaacactcttcctcttacccctctgctgacctcagggaaataaaggtaaagcaaaacatgattctcgatgtatttgtattttttaagccattaaatctagagaaacataaaataagtagcaatctgaagtgacttctagattataaagccagaaaataaatttaaaataagtattgattgttttccttattacttcaaaatacaagaccccagataaatgaataagtcaaatgtttttttgccctttgttgatatttattggtaaattcatgacctttgaactatctttatctataagaaaaatacaagcatatactctattaggagcactcttatttatctctataagtacaaatacaatattttctattttttattgttttctagtaagtgttggattttaattcttaggcataactctaaataaatcatattttgatgaatacacttgattcacatatgtaatagtccagaactgaagtgtttagttcttggtgtttagcagctaaaaagtttagtaaaaaaaaacatagttattcttgatattgtaggttctagctgccgaaatattcttcaaattatctgaaattttctcttacctgtggaacagcaaatgcagatttaggtattctatgaatatggctaacttagattgtttatatctttgtaattgactgttgatgaaatccaaggagatgtcccaaggggaatatgccccaattatcttctgtttcaaaatagcaccatgatgatttacttaataataaaaagtaaatgattccggaataaggcactgcatgctcctacttattgaatcaatagagttctttggcttctgtttaaaatgtgtcagatttgaatttccctgatgactactg

SEQ ID NO: 915226 - DNA, 4001 bp, Homo sapiens
aattcacataaaaatatccttggagggacaagtgtgtgttttttgaaaaaacaattaatttccacttttaatgaatcttcaaataaatgttttaacaaaacttactaaagcagaatacgtaaagtaaagccagatgtgagtagaggtaaagcaaaataatttccattctgtgggcttgctcactaggtgtaaattttgtggaaggatgacattgcagtcatttcttacaggtaaagtagatagaagataatggcaggactacgaagtgagcaaggatatgctagtttgtcagaccttagagcagtcatttatacatatgtcatagtttcattcctggggtatagtgtttcctgagccttcagaacactctcaataaatattagcattcacaaccaatatagtttcacaatgactacaatcagcttctgtggttgaaaaggggcaaggaaagcatttaattgtggaaagaatttatgatgtagatataaacacagcaaaaggcatgtttggaagcttgagtagatctcagtttatgaaggcacatttagggaaagtaaagtaaaatttggatatttcttcttagggcttatagattgaggaagtaactccacaatgaatgcaaaaactttttatcagccatgtaagcatttatcaattcccaggattctgtaggattcacttactagttataagtgtgtaactgatttttacttactgtgaaagctgttgttagtagtgtgtggttggtaacaataacaatatatttatatcaaataatatttaatatagatctctgaacaaattaattggcaaatatgtgatgcaatttgtttacatttgaaaaatgctgcattggcaggctgcttaatgcttttttgaaactattctttgatatgcaaatactttaactaaaatatagagatgtgaactctgacactcaacatttttttcaggtttactcaattttaaatatattcttcatttgtaaaccaatttcaacattttcttcactgccttttttacttctttgttcctcaaactatagatgatgggattcaacttgggaatcacaattgtgtaaaatattgacactatgatgtcatggtctgaagcatagctggaacttggtctcatataactgacgagaattgttccatgataaattgtcactccagttaggtgagagccacatgtagagaaggccttttgccttcccttagcagaatgcatcttcagaatggacaacagaatgaaatcacaggaaatgaggacaatcaggatagtgactatctcaatagaacccacaaagtagaagagtagaagctggtttgtgtgagtgtcagaacaagaaatagcaaggagaggaggcatatcacaaaagacatgcctaatttcattggatccacagaaggacaggctaaatgtagccactatatgtatagtagcatgtaaaatgccagcaacgtaggaagcagtgatgagtggcacatagactctgggtgacatgctcactgaatacaggagagggttgtagatggctacatagtgatcataagccattgcagccaagagaaaacattctgtagttccaaaagtaacaaaaagaagcatctgtgttgcacatccgataaatgaaatggatttattttttgccaggaaattgaccaacatttttggagtgacaactgtagaatagcaagcatccaagaatgataaaacactaagaaaataatacatggggttgtggagccaggaatcctcaatgaccaacacaaccagccctaaattgcctatcaaggtaaagagatagattgcaaaaaatagtaaaaataggaagacttgcagctcaaaatcatctgtgaagcctgtcaatataaacatggtgacttcagtcttgttcttcagtggattcctgtatatatccaaacctgatgacaacttgtccatttcagtttttacttgcaggttataaaggttatagcctgtgaaagtggagtccattcaattgtatccttgtttttttcttggggcataataatttccctgatagtaatggaatagacaatgatgaagtaattggagccaaatagatgaatttcactgtataagtaaaaggaaaaaaaatatgtaattaatttcttggctaaatttatcatgtttttaaaaaaccctgctaattaaagtgattttattttccagttaattttcagttgaaatttttactgcttcctctcatattatgtcctaaagctcacaaagattgctgaatgtagaaatatttaaaactaaatatgttatagtggaaagcacacacttgagtacacttttagatttgtgatgaagtacatgaaatgtcttttgtaaatgttcacaattttaaaataagagaaaccacactcacagcacagttgaatttaaatgtttaaaaatatcaaaactatttaatttaaaaggcttccaaatgactagaaaatggggataagtcagacatacatttcaacttgtcgcatgcagcagcctttttaaataaaaccatttcatgtcctctgttctggcaattatcttgttccattacatagaagagcagactgtattctggagatagacgtacctttacaaacattacaatgtgttttattttcaggattttttcttcctgaaatatatatcacctagttggcaaattttggcctctgtaccttgtttatcataactgtttttaaatttcaacttaataacaatgtgagatatatcttactaataattcatatgtttgttatttttgcaaagtccttggatgtattttattttattttattttatatttctgttaaaaataaatcatggccattcttttagtatattatagttgcttttagagtttctaaaattactatgaaataaaaatcaccaataataactaataaaaattatagaatatctggctaaaaaataacattactatatttgcaagaaagtagtgtttgtcctctggacttctttcctgatggtatcattctgtttcacattgacaagtatgaagaaagacaattacacaaccaaaaataaataaataattaaaagaaaaaaggtaacaaggttacagggacttctgtatctagactgaaaacctgttattgaaacggtttagtactacatacactaaatttagaggtaaaattagaggggagatttaagcaaggtgactttgtttttcttttatcatgtcatagattatgaaagttttaaaaggggtgacaactctgtcatatgcaggtccattctgaattcagtgacttacaaatgatttatattcatgatgtgagacataccaaaattttgtcatgttaagatgaccacacattaagaagagaatgaacaaataagactaaaaccacttttagaaagaaaaaaaaaggccaagtgtttatatatattattatagaaatgtcctaacagatccatgtggaagatttttttaatatacaaaataaataccctcataaatgagggactacagaacgaaacaaaaattctcatttgattcttagaaaattctacagcaaaagatataattcagttaaattccactttctgtgtaaatccagactacttacatattactcatgacaacacacacatacacaaatatattaagtaattttgtttgtgttatgtgaataaaatagcttataaagttatcaataaatattttaaatatgaattaatgtatttttgagtcataaaaaatatagttctcttatacaaattcctatcctctctttctcctatattttctcctttctctctctttctctctctttctttctgtgttagaagaatcaatgggatatatacaaacgtttactgacaagagtcaggaacaaacaggaattagccagataagaagaagcacgattcaaaaaaaaaatgccagtgaattttgaaaaatgtgctaataatctaccaaaggagtccattacaaaatacatgtttaccac

SEQ ID NO: 915227 - DNA, 4001 bp, Homo sapiens
agaagggaagagaagcagagtggaaatgaatagagaatatcaactcaactagactttactgcatgtaccactttatccttcaattcttacatgttggacttcctttcctctaaaaaggcattgccctgtccacctcaggatgtctaattttcagcctctctatctagaatcctttcttctctccacccacccattggatctctatgaatttttagatctaaaaccaaatgtccccatttcaaagaatcttttcttttcttcactctagttagacattttgtttatgcttacagtaccctgccttttgacttcatggccttttatagtttattatgaattattggttagtttgattaattaaatgtttccactatattctatgactcactagtacagaatatagtggattcagcatgaaatgcaaagtacacagcaatgtgaaaggcatgtactaaacactcaataagtcttagaaaaattactgcctgtcacgcccgtaatcccaccactttgtggggccaagatgggtggatcgcctgaggtcaggagttcgagaccagcctggtcaaaatgttggaaccccatctctactgaaaacacaaaaattagccgggcctggtggcaggcacctgtaatcccagctactcgggaggctgaagcatgagaatcacttgaaccagggaggcggaggttgcagtgagccgagattgcaccactacactccaacctgggcaatagggtcagattccatcacaaaaaaaaaaagaaaagaaaaaaagaaaaattactctgaaatatatattaaacaaataaaaatttgccccactaactcaaagactggagcatttttcaaatatagagaaattaccttacctaaattgaaaacacattaaaaaaatagcatatttagacaattccagagaattgctagattgtggctgagtaaaatatgtattatattaaattagggtatttgagacaactttatgttataatatataatttgaagaaaacaccagtatgaatatgcatttttgtgtgtataaacatgtatttttactatttccttaaaataaaattttatttttcagttttttcagggcctctttcacatccttgttcctcaggctataaatcagggggttcaacatgggaaccacaagggtgtaaaacaatgaggtcattttatcttgatctagagaataggaagaacttggccggaaatacataaagagcagagttccctggaaaattgcaaccgcagataagtgggaagtgcatgtagagagagctttgaacctcccctcagcagagtgtatctccaagactgataggatgatataacaataagaaatgaaaactcctgaaatggtactcagttcaataaaaccaaagacggtgaataacactaactcattgacctgtgtatctgagcgagagagtaataagagaggagggatatcacagaagaaatgattaatctcattagacccacagaagcataggcggaaggccagtgtcatatgtatcaaagcatctgctattcccaccagataaaccccagtcaagagtagatagcacactctgctagacatgttgactgtatagagcagggggttgatgatggccttgtaccgatcaaaggccatcactgacagcagtagacactcagaatctgcaaagatacagaagaccaagaattgcagagcacagccatagaagggtattgacttgttcttggcaagtagatctaccagcatcttgggcccagttgcagtagaatagcagagatcacagaaagacagatgactgaggaagaaatacattggtgtgtgaagttggtaatccattctgattaaaactatcattccaagatttgctgagaaattaatgatataaacagccaagaatacagcaaatagggtcactttcatctctgggttattggtaattcccaagagaaaaaaatcagttaatgaggagcaattttcccagtccattcttccttgttcttgtttcaaactgctacagaaatcattacgagaatgacagtctagaacttgactttccaagatatcaaaaaaaaaattatctgtaaagtagaacaagatttgtttatgtaaattatcttctttaccctcaaaaagtatcccaggtgagtgtcactttcaaagaggcattattactgtattaaaaaaaaaaaaccctaaaagtgtctgccaaaggaagttgatcaactttgaatctaaacttacatgcaatttctgacatatatcatttgtctttgcttctattgtacaatctaaggcagtcaatttgattaaactgaaagctcagtacagatccaaaaggatgtgaaagaaacaccatagttagagtcacaagggccagaacataccggactaagcatctcatatatttgacaaaaaaggatcatatttattgcattattcaagaaatatatacatttttctaccactgacagtgatattacatgtaagttaataagagaaaattattatggtactgtttttgatgtggtgtcgttagtgcttactggaaaagaaaaatgttttatttaactgttactcatcatcactggtttgtcacagcatttataatccatttggatgacttatctggttctaaaaaacaaaagccaaatgtaagtggtaaaagaagtgtgaacaacagactacttatatttgcttataattgactttttcattaaaatcaaaatgtgaagaacaataagtgtttctgaaatatataggcttctgttgcttgtgttatatgtgcacttactcttgtgtgtgtgtgtgtgcctgtgtgtgtctgttatatgaaaattgaaatgtggggtgggtctgattgttatttcttctagacttaaatattatggcatgtaccttaagaacttgaattttcataaattaatatctgtaatgtgttacctctattattatttgagtaaatctagaacctatcttaaatttacatctaaaataatatcacaggtacagtgattttttaaagtaatgatttacttatgaaggttgattaaaatataaatgggtgaaatctatattatcctcttacaatgacaagtaaggtcagtcaaattcacacagatccaataagaaaatatcattgtttggccattagattccagaggtgcttcaactgagtaagcatctataaaatcattcatttgtaaattccttaatacatgatttcttatttttccaaaatttttcctctgtcctttaaattgatcattcagaaacctacctgagatgagcaagtctttctgtccttacctctggtatgtgaacaataggcagatcacattttatttttactggtgactgttgggacataaatctctcaagcctctgccttcactcctttatgttattcaaacatgattaattagattcctagttctgtattttccccagtgaatgctgcaactagtttaccaaaggctccatttttaatttttcagctttatcaccaaattgaccaatgttagaaatttatcagaattcatttaacagtatgcttcatggttatcatgaaataagacagccaatgaaacttgagtagattttcaacttaatggttttcttgtccttttcattgttcatcctgtttcttccacttctgaaaatctccttcatctcccatttagaaataagataatctaacatgctgctttttttcattaatcattgtctgagtactttttccccaactacagtgacaactaccctcatttcaattattttatggatgtacaacatccgtcacattgaacacactttttcttaatttatattttatttgtctgttggcctaggtgtctctctacattcccacaatctctagcacagagatatgtgtgagtaatgtatgtttttaaatgtgattgtgtgatgttaaatattttctgcttattaggctggtaatgttcaaccaagaataaacataaacaaact

SEQ ID NO: 915228 - DNA, 4001 bp, Homo sapiens
atatttttaggatttgtaatacatattttcaaaatttttttctggcaaggctgagccaatttgtatctctctgcatactagtaaagtatgaggggtttacttcctgcacctgccaaccccacatataggcatgacacacatgccttgcctacatggttccaaactatattcattcattatacatattcatagccatcatgcactagatactgttcctgcccatggtaataaaaggatgtaaaagaaaatctgatcctgtcaccatggtgcttatagtctaatcagggagacagagtattgatgaaacaactgcactcagccactagttcaatgtggacactgaccacagtaaatttgaaaataaacctagaaaccattatgttttgataggtgatatgttcccaaaacaaaaattcctagtttcttatctccttgccttgtaacacacgctagaatgatatctcctgggcctctgctacctaatagagatcttatcaaaaagtcttgtgttgcttttccgtaatgaagcctgtgcttccttgattggaaccttgtctatgcaaattacaaagggacagacaatagtggacccagctctatcctgtattttatggccctgtcctgcagaaatccattttctagcttgcaacctattcctctctctcctcttggactagttaaagaaagtattcctagttccatagtgatgcctttgaaactctggcccccaatttaggccctaagaactccactggacttcatagaacacattgatcccaagtttaatagcattttatcagatttcacacatcccttctatacatttctgctagctttcttggggtcaggatcctggtgctggtacaggtgcagagtacagcatagggctctcttgacctcttgattgcgcaggcagtaaatgatgggattgagcaatggtacaatgacagcatacagtacagagaccaacttgttggtgtcaaaagctgagagtgcctttggccgagcatagatgaagatactggctgcatagaagattatcacaacagtgagatgagaggcacaggtggaaaaggccttatagcgtccagcagccgaaggaatgtgcatcacagcaccagtaatggccacataggaggccccagtgacagagagtggccctagaagaataaaaatggccaggatgaaatctgtaagctctgctgtggacatatcagtgcatgagaggttgagcaatggagagacatcacagaaaaagtggttgatgatgttggggccacagtaagagaggccagaaataagaaaaactttgaccatggagatgccaaaacctccagcccaagagccagcagccatctgcacacacagccggccactgacaatgactgggtagtggagaggatagcagatggccatatagcgatcataggccataacagcgagaaggacacactcagtgcagcccaagccaaggaaaaagtagagctgtgtcatgcatccctcaaaggagattagctgtccatgatcctgtttggatccaacaaagccagcaagcatcttgggaatagtgacagtgacataccagatctccagaaaggacatattagctagaaaaaagtacatgggtttgtggagggtagaatggttcctaattgccataatgatgagtgtgttctcagtcagcaccaacacataggccagcagcaaaagggcaaacaatagtacctgtagtggcgcaggagcagggaagcccagcaacacaaactcactcactctcccactatggttccgccactccatgtcattggtctctcttactgctcttcaggagatgagagtagagagtcttcagtaggccacaacaagaacccagcctttctcttaatgggcttatattggtcgaataccacgtaaggagttcatgtaattaatcactgagctgaggccactgctctcttctttaatctggaaatgagctaaggcaaacatacaaaaataaatgtttttttttttttggaaacaagataggaaggagtctgttctgacctttggagaagcatgcattgagatgcactggggaaaaatgacactattttgtccccaaagaacatagatcaaaaccaaaaaattgaaagagtctcggctgccctaaaatgagagtttgtctttgagttggatcatgactctgttttgaggaaataagttacacaatggaggaataacaatcatatataacacaattgagttattattagcacaggcactgttattattgcatgcactgctgtaaaacatttgcagtattaattcgcttgatcttaacaacaatcttgtgggctagtactactaatagctacaactgtatgcctaaaaaaactgaaatatagatttaagtgactaattctgggttgcagaaatagcaagaggtggaactgggaagtcaggaccttggagcttccaaaatatttaggtgatgtaaaggagggactgtacaatacatcttggatgtacagctgggagagagaatctttgagatcagttacagaaacagttccttcctgccaggaggaaagaaagacaaaagcagaataccagaaggtcacagtacctgtagagtggaagtctgcagaacccagtacttacaaggaagacatgagattcactaggaaatcagattaggaaatggatgctggatggcagaaagactaagaattacaagatgctggaagttgtactaagtatcttgaaatgaggatagagtatcttcctttaacattaaggcccatataaaaacatacatttactaggatactgtttgtttaccttggtatcaaagataaaaatttccctttccctttaaaaacttcaagccatttttgtgtctcatgtagacaagaagttgggatttttacatgggagttgatatgaaggaagggttatttttaccctgttcccctgtacagatatagcattgggagagagtgtggagtttagaaaggagaatggggtagagtcagctgagcatctgggtgcgatttcttctcagatttcttaccttttagtcttaaatctgtccctatgaggttagtgggggcagaatgtgctcacaaattaaaacaacctgctaataattttatgcctgactttctcttctctgtatgctctgctatcattacttgagcattactcagtacttgagcccttgaatttctcttaatactgtaatgcaattacaaaatacctatgaccctggctttcatttcccatcactcctattcttaccattcacacccacaattttatttatttcaaaattgatggttgatcggcaatgctctagaccatgggctaagagttgtggtatataaaggttcacagacacatgctgagtcttcaggatcttataatctagttataggggcatatcttcaccttctcatccctgaaagtttaagctacatgcctgtcccaatgccatacatgtacatacatagataagtgggaacatcaaacctacaattgctgtttatgaccttagccttgatcctttctcctcaatacctacctcataaacccttctttttgcttttgatccttttggcctcggaccttcattcatatcctttggtcacttcaaccttcatgtctgatgctctgcatacttgaaaataatagcctttcacacatggactcccaactgatttttctgcttatagtcttacccttaaaggtgagatcttagctcaaaactgaccattttactctccttaaaacttgtccatagtccctttgtgtacacaataaatgctcaaatcatttagcctacaggtacaaggcctataggcacttcatgattttgccactgcttccacctaaaccttatttcttaccacagtctacactgtattttataccttgcagctctcagcgcacaccatgtgtatcacctcatagctttcctcatgctgcaatctccatgagcatggctacatcctatttag

SEQ ID NO: 915229 - DNA, 4001 bp, Homo sapiens
ttttagtagagacggggtttcaccatgttggccagactagtcttgaactcctgacctcaagtgatctgcctgcgtcagcctcccaaagtgctggtattacaggtgtgagccaccgcgcctggccctgtgttccttttctcatcaaatatctttctttttcactctgtatagctagaggcttggtaccttcctgagtcatacctctttttctctcacttctcacatcatctttacttgatctggccaatagaggttaaaaccaagtctctagaaatattcaagagtgcctaataagaaaatattttttaactttacatgccttactaaaagtagtgatattttattatctattattttatttaaaaatggagagagacattgaggaccggataagttgtagcatggtcaaaatctgtggaaaataagtgaacttagccaggactagaattggagatctctgaatccctgttaggtttctttcatggtatttaaaaacaaaaacaaaaacaaaacaaaacaacagaaaagcgaggtctcactctgccacccaggatggagtgtagtggtgcaatcacagctcattgcagcctcaacttccagggctcaatgaatcctccaatcttggccttccaaaatgttgggattacaggtgtgagccactgcacccagcctcccttcgtggtatatgcaagatacttcatggattgaattttctcccagacatgatcagagttttccttcagtttggcatgatcattgctcatcctggggcaccatctcagtttctggcacaccaaacaccaccatagtcgtgcagaaagaatgtgttgaagataagaaatgtgtgccattgggggagggctgggggttggggagagcattaggaaaaagaactaatgcatgctgggcttagtacatgggtgatggattgataggtgcagcaaaccaccatggcacacgtttaactatgtaacaaacctgcacatcctgcacatgtaccctggaacttaaaaaaaataataaaaaaagaaatgtatttaatgtagtgtataccagtgtcaagttttcctttgtatcaaggtcatgattctgttcactgtctctctcaacacttcctgtaccttctcattcctcaagctgtagataaaagggttcaggagaggggtcaccactgtgatgaggacagcggccaccttgtcataatccagtgaggagttctgattgggtctcacatacacaaagatgttgctcccgtgggcaatggagacaacagtgatgtgagaagcacaggtagaaaaagctttctgacggccctgggtggaggggatacgcaggatggtagaaattatgtacacgtaggacccagtagtgaatgccagggagctcaggatgacaagggcagagaggagaaagtttatcttctcaatgaggtgagtatttatacaggccacctgaagaagaggggcaatgtcacagaagaaatgattaatttctttcctacagtaaggtagccttgtcactacaatggttggaaacaacacagacaggaaggctcccacccagcatcccagaaccagcagaaggcaggccctgctgttcatgatgaccgtgtagtgcagtgggtcgcagatagccatgtagcggtcaaaggacatcaccgccaagaggataaactccaccgtccccagaaagaagtagaaatatgtttggatcatgcaaccagcaaaagatatggttttctcttctcctaggaggcaggccaacaactttggggtaatgacagtggtgtataagatatccagaaaggacaaattactgaggaagaagtacattggagtttgcaggcgatgatcaatccatatcagggagatgatggtgatgtttcctgttgctgttaatgtgtaagttaccacaagaaccacgaagagagatattcgaatctccaggagagctgggaaggcaattagggtgatttcagtcacagtgctccagtttcccatgacaactactatatggtgggcagggtttccctgaagaaacaagaaaaggaaaatcagcttaggtaattttgtaaatatctgctgagaatgtattgcggagagtggcttatattgggagatgtagacctggtatgtagtcctctatctgcaagttaattattgtgccacactgggaaagtcaagatactatttaggtacatggtttttttttgtttgtttgtttgtttttcctgtaaaatgacggaataaggctggataaaaaaaactcaacttccttctagttataaaattctattccttttcattgatgaaatttctaatcttttctattcttttggcttcattttctcagctaaaaatgtgctaatgtactgatgtatacttaatcagaatgcccttctattattctggtttacagttcctgagtggcaaatcctttagaaacgtaaagtcttttctataacaaactttctttcactttggtggttgtcatttaataaaggttgatttagttttttctacatttgtagatatccagagtctccgaattcttaacatctttccctagcatgtatagatctgtgaaaactgtccagagattattaaaaggaacaacagctgacggttcctattaatcattttagatgacacctcaaaaagaaataatgagtgtctcgcccttagattatgcttttgtgtctaaaacctaccttctacaagttctgtgcagtatctaatatgtatcatatatctggctgatcatttgagagcaccgtatatagtgtgataacatcagagaggcacaaattatatacaggaaggcaacatagaggtaattcacctcacttcatttactttgtcagccgacattgtgaaactgtacttcaagatcatctagtttgttctttgtcccacaatgtgagaaatgattattttgcagagacctccccattttaggtaaaaaccagcccatgctttaactctgaccttggtgctttatttatctagatatcacttagcacctccttaataaatccttaatagataagttagcatctcctccactctttgctactgatcgtggccacctctttttctttttccaaactccccctgcactttcctccaagataaaaaatttaccctcttattttatttttctttttattatacaagaaagacatttttagtgcaaagaattaaaaaatgcaagtgcagaaaagaaaattataatctgtaatcgaacttcttagagatacagtgaccttttggtgtatatagttttaggctattttaaagttcaaagtacatacttgtgtatctaaaataaatcatactaggagactattttgtaattagcttttttccttttcctttctttctcttttctttctttcttcctttttcttaaaacaatttagcatctttccatgtcaactcctagaagtcttcacaatcatttttgagaattgtatagtgtttgattctatcagtgggactgtgatatatttagccagttgcttaatgctgaaaatttagatggtttacatttcttgcttgtataaataatgatcaaataaatattcttccacataaattttttgtgcacttgtcttattaattcccgagaatcttttccaatagggtgtttgccctcactatttgttactcagtacaaaaacccaagaaagatttattcttataatattagattttactttactagagcagttgataatgtaaaatcacttacagatctctttcatgggttcttagtctgagggaatagttctatatcatagctgggctggggtagctgatgcctcaatggcatagaaatactgtgctctttttttttttaaataaatcttattttatgctctgaacttcagttttctcatcttagaatgctgggctgcacatttaaaaggtccattaaagtcttagggtcctactatcagtactttttgactccctgacccaccccaaagattgtaactt

SEQ ID NO: 915230 - DNA, 4001 bp, Homo sapiens
ttcatgtcctctacccactttttaatgggattaattgtttttttcttgttgatttaagtcccttatagattctggatattaaacctttgtcagatgcatagtttgcgaatattttcttttatttggtagtttacctgtttgtcatgtcaacagtttattttactgtgcagaagctatttaattaagtcccacttgttaatttttgttttcattgcaattgcttttgagaacttagtaataaattctttcccaagaccaatgtccagaagggtatttcctaggtcttcttccaggatttttttatagtttgaggtcttatatttaagtctttaatccatcttaatttttgaatatggtgataagtagaggttcagtttcagtcttctgcatatggctagccagttttcccagcaccatttattgagtagggaatcttttctccattgcttatttttgtcagctttttcaaagatcagttggtagcaatgtacagttttatttctgggttttctattctgtcccattggtctatgtgtctgtttctgtactagcaccatgctgttttggttactgtagccttatagtatagttttaagtcagataatataatgcctccagatttatttttttggttttttttgcttaggattgctttggcaatttgggctccttttttgctttcatatgaattttagaattgttttttctaattctgtgaaaaatgacattgatagtttgataggaatagcattgaatctgcggattgctttgggcagtgtgaccattttaatgatattgattcttccaatctgtgagcatgggatgttttttcatttgtttgtgtcatctctgatttcttttagcagtgttttgtggttccccttataaatatctttcacttccttggttagttgtattcctaggtattgtattttttgtggctgttataaatggaactgcattcttgatttggtctcagcttaaatgttattgactaacctgtttttaaatatccaaggcaaggaaactgggttcccacctgcctcctcactgtcccttccaaaagttgagagaaaagactcgacccagagctcccttcacttccttgttcctaagactgtagatgagaggattgagcatgggcgtgacaacagagtagaagacagataccaccttgttgaagttgatggaggaggtcaccttggtctggacatacataaagaaaagagtgccatagaagaggctcaccacagtcaggtgagctgcacaggtagagaaggccttccagcgctcagcagctgagcggatgtgcagcagtgtccagacgatgttgccataggacacagcaatgaccatagaggaggccagtagcacagccagagacaccaggaaatccacagtctccttccaagtgacatctgagcacgacaaggctagcaagggtgaggcatcacaggagaaatggtcaatgacatttgggccataaaatgttagctgagacaagaggtagattggcaagatgggtgtgaggaaacctaccagccaacaggcagctgccagacggatgcaggtgccccaggacacaaaagccccatagtggagaggcatacaaatggccacataacgatcataggccatggcagccagtaggaaacactcagttgccccaagaaaggtgaagatgaagagctgggataggcaatcagcataagagatattcttgccaccatccaccccaataaaaccagccagcatcttgggcactgtaacagaagtgtaccagatttcaaggcaggacaagtgtgtcaggaagaaatacatgggtctccgtagtcggtggtccaaacccaccactaaaatgatggccaaattctccaccaaggtgaacaggtacatggtgaggaagagtatgaagaagaggaggtgtgcttcatggatgccagcaaagcccatcatgacaaattcagttacctgggtccagtttttggtatatggttgcatatgtggcagtgagagctcagcaaactcatagcctcatagacaatgagagctcaaagagaacctgtgaggttggaggatgttgtactaaaatgcctttcacttcagaagagaaacatgatgtcaacacactgttcttaccctcaaagaattcacagttcatgagggacatgagaaaacaaataatattagtacaaaatgaaatgcactggctaagaataaggcaggatactatgagcagaaatatcagggaagctcaaccagtcttgagaaatcttcctggagggaagactgtctatagctgaacctgaaaaggaagtataagttagtgagacaaaaggtagagatagagagaagacatcacaagtataaaattccagacatcagagaggagattgtgcattggggaaacttcaagtagagacagtttaccatggagttcaagagcttgatttcccaagcaagcatacctagattcaaataaaagagaacctaacagatttgttgtgaaaatgtaagttagataattcctgtaaagcacttagcatcatgtttgagtcaataaatgtcaagggggaaatctacatgttgacatctcctggaataagatacagagagaaaatgactgtttctgagcctgaggagtaggctgggacaccatgaagggctagcaaccaaattaagggaaaggaaaaagctgagcttcagtctaaaggtcacagggagactttaagaattataagcagagaagcaatgctattctttttaccccttagaaggggcaggtttggaggggaacaagataagagccagaggccgggcccggtggctcatatgtgtaatcccagcactttgggagtctaaggcaggcagctcacctgaggttgggtgttcaagatcagcctggccaacattgtgaaaccctgtctctattaaaagtacaaaagttagcccagcgtggtggtgggcacctgtaatcccagctactcaagaggctgaggcaggagaatcacttgaatccaggaggcagaggttgcagtgagctgagattatgccactgcactctagcctgggcaacagagcaagacttaatgtcaaaaaaaaaaaaaaaaggaggaggcaggaaggctgggttaggaggttgttgcaagtatagcatggagtgatggtgactttaactgcagaaatgccagtaggagactgaatatgactattaagagatagaatcaacataattgggtttgaatccacactgggtttgaatttaagctccaatatcaacttgaaatatgtgaccatgagtgaatcactaaataatcccattttttaaaaaacagataatacaagagttccaaagagattacttcctatctcattttagaattaaatgagaaaatataatatctccatttttgtgccagttttaaaatacagccccaaattcttgaacactcttcccatccaaaagtgaggtctatggctattcccattgaatctgggttctgtgactgcttaacaacagaataagggggaagtgatgctgtgccaggttccaggcccgggacttggaaaccccagtttcctcttcttgcttcttgaaacccagtgacagtagtgtgaggaagcctatccagcctgtggaaaggcctaggtggagaggaactaagtccctcaggcctcagcctggccaagcttccactgacagccagcagcagcgtaccagccggatgaataagctgtctgagaaatagatcattcagcccccagttgagctggccaagctgacaccagccttcccttctgagccctccccaaattaaaaatctgtgagctaaataactgattgctgtttaaaccactaagttttaggctgctttgttatgcagtaacataaataaagcagttataccctagttgtgtaacttgggcaaattattcactatttctgaccctttggagaaaaagaaatagtgttttgctacagtcacagattcctgaactgg

SEQ ID NO: 915231 - DNA, 4001 bp, Homo sapiens
acagatttcaattacacactgatttatgtatttatttattaatattttttgtcagccatcgcccactatactataaattctataaaagaaagggccgtgtttagcttacttaatactgtattctccaagcctagcaccacagcctagatgagggtgcagcaacagaggggcctcatgtcaacaatgagcagacatttactatcgagtttgtacacagcctgaccctgcgctaacactcccctaaaagtgcatgtctctttaaaatttgttctgtagacatcttccttggctcaccctagttggagccttgccatattagagatttaataatatttcttaaaggaatgattaaatgagtgttgccatatttcagtttgttgccatatttgagtttgttagtagagtttgacttaggaattagggctatccaaatatttcactggtcttaacattcttcctttatgagattcctataggagctgctagttacataaggagcaataacaaatgcaaatcagagaaccatttattactgcagccagaatttgattttctaataatacagaggttctggttaattttatttgcagtacccagtctagttggaagacctcagagaccctcttactccccactgagctccaaatctgaatctccatatttcagcatcttctgattggctacatgacacaggagactgaggcagtaagaaaagtgtttaagcacacacgaagagaaggaggagcctccctgtatgcgggtcacgtgctcacacatgctctccaatccaaggattccatcttgaaagaaatttgaccaattggatcagccttctctgtggggaggaggaggcacaaggaaggttgtagggagggaaaatgaaggtttaccaccgtatttcatgttgtatatttatgaagactgttctttcattagctgagaaaagtgaacagtgttgcctacatcccttaaacttcttgcacatttaaaaaattttcaataaacatttaatctcccatttaataagatcatttcctttgacttgtgaccctcagtttcatcacagcagtgagcctgggccaccccaaggcttctctcagtgcttgctgcaccttgtcattgcggagagtgaagatgaatgggttcaagaggggtgtgatgatgcagctcaggacggaggcacctttgttgagcagtttggactgagcctctgacatacgaatgtagagaaagatggaactgccatagatgatgaccaccactgtaagatgcgaggcgcaagtggaaaacgctttccttcgctcagcagctgtaggggccctgagaacagtggcaagaatgcaggcataggaaactgaggtcagagccagtgagcccagtaacaccaacgtagagagcatgaaagccaccagtttcagcaggtgggtgtccccacaagaaagcctgagcaagggccaactgtcacgaaagaagtggtcaataccattggggccacagaaaggcaggctggccatgaggacagtggggcaaaggacccagaggaatccagctagccaggaggccagcactagttgggaacagacatggccattcatcagggtctcatagcggagtggtcggcagattgccaggtaacgatccagagacatgacggccaagaggaagaagtcagtggtgcctagaaagaagtagaggtaggactggatgatgcagctgacaaatgagatggtgtgatcccccgtgaggatgacgacaagcatcttgggaaccacaacagttaccagcaacagctccaggaaggagaaattccgcaggaagaagtacatctgtatgtgcaggcgttggtctatccagctgagcacaataattagcagcttgcctgtggctgttacaatgtaggtcaccattaaccccaggaacaccaggaactgtatgaggtggctactggggaaacccagaaggacaaagcttgttacctgagtccagttttcagggttcatcttcagtcacctgcaggggaaatgaaacagaactctgtaactggtctatagctaccaatcatcatttaaccaatcggtaaaataatattgaacacccaacacttccttacattctgagaatatgttgatctatagtttggtctgcacgtgacttacaaagagagaaacaaattacaatagtaagcagcatggcaatattgaacatcaattatatatctgaaaatttacacggtgcacagtatctcttctcctagctactcttaaaactatgttttactattttcaaagataagaaaaggatgacgaagggagtttaagtgactcttctatgatcaggtaggaaacaggtggtagaggcaggatttcatactgagcttctgtgactccagcacatgctgctgatactgttgagctcaggcagagaaccgtgtgagtagtgtggctttagacgagtccagaggagtagaggggtcagagaagacttcacagaacaaatgcaccatgaacaaattttactggtattaagaactctcattttagtgtttatggtccttctgtgtcctggcttgacataaaataacagaatttaaaaatctgggctctcggtatactcagagatttaattttcattagtcagccatgaagccaaataggaccggattgtgcaaagcccagtcctgtcataaagtgttatttttcttttttcccccaatccagactcctgtagaatgctagaaatccttcttccttgtggaatgcttactagcttctcttaccttcagcttgctcaatattctaatagtataaaatgaggaataagggagaatggtctcaaaggagatggtatatatcaacttgccttctcaacttttgccttaatttggagatatgttcatcttgtccttggagcttttggaatcctgtaaaatgtatccacatgttttgaaggactggatttcattagacaattagatatcttgggttcttttttttttttttaaacatctagcaccaaatactcagaatcacatagatttggcctaatcagggaaaatggaaaatgttctaagacaaaaagaatgaaaatgagcatcaagttacattgtttaattgacaaggaatgaagtgttgagagtttagacagtttaactgaggaatatctattacttcagaccaacagtgttaaagacgaggagcacagatattttctcaattctgtctgaagctactttaacagatagtattgaactgaggcaagaaatccaggtttgaaggatatttctgttctgtttacatcaattttggaaagaataagtctgggatttaagtagctaagtaataataatgcttcattctgctagtctagggcttgtgtctccaaaatcaaagaaataccataataaaacccagcaaaggaggccagagcactgtttcaggataacataatcatttcagataaggaaaacatgctactgtggctatttccaaagctttggttaaatattattaaaagtaacttataaagtccgtcaaacacacaaaatcagtttctggctactgtgataaaatacatgcactaaagtctgttctctagcctctctttgtcaacctgaataactgcttatcagttctggagagcctcatcagttggctggctgtctctcaaaatgccagaccataacactatcatccctgtatacgcatgtttacaattttgtcattttcaacctcaaaataatcttaatgctttaaatcatttgcttaatgtcacacagttagaagttgtttgtactatagttggaaatgtttttttgttcctatgtattttgcactaaaaatactggttaacaagatgagaatcagtgaagggaattagaactttgagggactcacatgcacacatttttcattgacataatgatctaatttacacaattagataactattattattgtccactttataattgagcaaactagaacagtgtgggaaaaaaatac

SEQ ID NO: 915232 - DNA, 4001 bp, Homo sapiens
tcttccttacccctctctaactcctattctccctcccttccactatatataaacctcccaaatttagttggttggggagatggatttgagactctacctcccatttttcttggctgcagcattcagttaaagccttcttccctggcaatgctcagtgactcagtgattgatgttctgtgcagcaaacaccaggacctgactgaaccctgggggttttggtgacaatcctacatgtgagccctgaacttcatgtaaccttggggctgcattttccagtaggaaagtgtttctagatatattggctctgagacttttcctagcttcctaggtacatggtctacttatattggagcccagaaactgctgtaatccatgaactgcaaatggaaattttttacaagatgttctcaagttttggtattatctgaggatgaacacctctaagtttatctaaaaatttgtattatttcaagatggaagtccccttattgagatattatcaaacaaaaagctgattcatttcaaatattttggaaggaccattagaattattagaagtctgtagcgtgcttctctcatgataaagatgataggaactaagaaaatgagatgtggaatgttttatgtttttgacaagaagatgaggcaaagagggtggtcataaaaaaaaagatggtggtcataaataaagagggagacaggattccttatacatttttaaagttgttgacatttgtctctgaccttagtggtttctactttcagtttgcagttgacaagtccagagttctacttcatgcatctgaggatatactgggacttccttgttgaagaattacattgtttcttctcaagaaaaactcctagttcatttacatgtaacaagttctcatgggagaccttaaccatcatggtttgcttttgcatctttatcttactatagcattgaatcagaacttctgggatttggggggagcctgttttaccaaacttctccaaaatcctctctcaactttcattgtttttatctgcattaagctcactttgatgtgttgcatgttttactttgcatgaccagtctttgggcaagtcattgcctttcttaaggctcccttcacctccttgtttctaatagtataaataaagggattcagaaggggggtgaggatagtatttagcacagacaccaccttattaatcttaaaggaggagtgtgctgtgggtcttaggtacatgaacagaacagccccgtagagcagggagacaactgtcaggtgcgaggcacaggtagagaaagtcttttggtggccagtggctgaaggaattcgtaggattgcggacagaatgtagatataagaaatcatattaaagagaagtgaccctgggatcacaaggatggttgctatgacgcccaggagttccaaaatgctggtgtctatgcaggcggctttcaaactgggcccaacatcacagtagaaatgactgataacattattgccacagaatggcaactggatgagcagcatcgtctgacaaaagacaatggtgaagcccaccacccaggagctcagggccagctgcaggcagagtttgctggtcatgatggtggggtggtgaaggggattgcagatggtgaggtagcggtcaaaagacatgatagtgaggatcaagaactcggtggtgcccacgaagaagtggaagaaggcctgcagcaggcagcaggacatgcagattactgttcttgccactacaaaggttcctagcagtttggggatgactgtggtggtgtaccagatttctaagaaagacaagttacaaaggaagaagtacattggaatttgtagcctgggctcagcccacacagtggcaataataagcccattgcctgcaagggttaatatgtaggtgagaaagattgcaataaagagaggtgtttgtaggccttggataacaggaaagcctagcaggatgaattctgtgattactgtgccatttctcatgtcccttgataccctagaaagacaagcaagaaagctccttagaatcttagagcacagttgattatagttgggacaaaaaataaggaggattctgactatgtaaggtccttcgggacctgactctatttcaggtcctccctcacccacatacaaatacgcactggccaccccttctttactgatgatttggctggttcttttgtcagcaaaaccagcttctaatggactttgaatgtattaaaaacacttgatgaatgcaaagtgttttttcacccttatacaactatgagaataatcatgtgaaatgtggttgcttcttgtcaattattcatataactattttcaatgcatagtgtgtataccaacttatgtacgtaaacgtggctgtgagttcataagaaattaatccctattctcagagtctgaaaaagaagttactgattacattacagatacgtttaaggaagccattattgtgtgtgggtgtgagtgtgtgtcttaaaataaccccaaatcattgctattatattagtggtgagataaagttagataacagaagaggtgtttttctgaagaatccacttccacattctagttcagactcctttgctaaaggtatcaaaaataacatttaaaactaaatgaataaaactgtttaggaagtagagaaatattcaactcaaattcaaaatttcagaacaagctgagtcaaagcctgttatatggaagcacctaataaatgtacatgggataaagatctgcagacactaatctacaaaagtgaaaggttagcaaatgctaaggataacaaaatgggaactctgaaaagtacatttttgtcaaaattttttttgtgactaaatgtctttttataccaagtaaagtatttctatttgtatatgcaaattcatgggctgagaacatcctttctgttctaccaaaattcagtagaaaatagtaaaactacttcctttcttattgaggctattcttccatgtgggtttcctttgaaatgggtgagacaaattactgtgaaatgaatttcacatttttcaaagtacataagaagcttagcatgaaagaggcaacttacaggtcattgataggttgtttcattcttccctcatgtgagataactgtaattctctgagggcttgcttagggaagaaaaacacttccattttctcccacctcttttctagaccaggaaaagattctttgtctacaatgtcacaagctctagtgcctttccacaaaacgatgagagacagagaagtatttgaatttgcactaatggccaatataactggccacgaacgtgatctctttatataggatagatatggaattatcttcattccccatgcagagaagagtggcaatctctatagctcaatataacatttccaagggctacacattctaccatttggagaattagacctatgaattccacaagcatttgttgagagcttactatgcttcaagtactgccaggcaattaaagagcttatcagatagatagatagataggtggatagatagatagatagatagatagatagatagatagatagatagatagatagataggtggatactatatatagtataataattgcaacatgactcagtgagggaaagtgtagagctgtgcacagattgttttagaaacacttagaaggggctcttcgcccatctttagcaggggttaaggaagtttttctaaagaaggagaggcctaagctgagtcctagagttcaaaaggaaatgaaagtgaagtaaggagagagggggaatgcattccagacaaggattcagtttttgtgaaatagaaccagagcagagaatttcacttgagctggagctgggagtcaggcttgtcctggcacttatggtaaattaacagttagaacagtttacacgagagattcatgaagcttttggaggacagaatcttgagtcacggagtttgcaagtgtgtgtgtgtgtgtgtgtgtg

SEQ ID NO: 915233 - DNA, 4001 bp, Homo sapiens
acttggactggggtttgaatctcagtgttgttactcctgctccaagttccatatctgtgaaatgagaatagaatagtacctacttgttgtgtagtataattgaaatagaatagaaagcacgtagaagaattgcatggatcagagtcagcatccaaaaacatgttagctgctgttatcattattattagtgttactaagaaaattacataaagagatcaggaaattcttgggcaggggtaagtagagatactttgcctctctttgcctcatttgttcccaagtacaaaaagaaaaaaaattggccaggcgcagtgcctcacacctgtaattccagcactttgggaggccaaggcaggtggctcacttgaggtcaggagttcaagaccagcctggcaaacatggtgaaaccccgtctctactaaaaatacaaaaattagctgggcatggtggcagatgcctataatcccagctactcgggaggctaaggcaggagaatcacttgaacctgggaggcggaggttgcagtgagccgagatcgtgccactgtactccagcctgggctggagtgagactctgtcaccaaaaagaaaaaaaaaaagaaaaaaattgggctgagtaatattttctatatagaagataataagaccatgaatgaccctaaaactcaatgttgaaagtttagcatttaagttaaattacaattaagataggaaacatttattaaagggcttggggtagagggatggatctcaagtgaaagaaaacctgaacctgaagttggctggcttcaaagagaagtgaaaaaagagggagggaaggaagaggaaagaagaggaaggaaggaagaggaaggaagaggaaaggaagagggaaggaagaggaaagaaggaaaaatgcccattcacccagccatgtggagaagtgattattttccatccacagctggccagcattcagaagctgtcactctggtatttataacaattaccactaaattgaaaaggaacaataacatttgcatcaaaacagtttacccctcagcgttttctgcacggcagcctttacttccttgttcctcaggctgtagattaggggattcaacatggggattaccgtggtgtagaacacagaggccacattctcctgggtcaaggaactgattgtggagggttttaagtacatgaatgcagttgatccatagaacattcccacggctgcaaggtgggagctgcaggtgctgaaggctttggatctcccctctgtggtgctgatgccgaggatgctggagagaatgaaggtgtaagaaacaagaactgttaagctcgtgactatgatgttgaatccagccgaaaagaagactgtcatctcaacatcataggtgctagagcaggacagcttcatgagagggaggatgtcacagaagtagtgactgatgaggtgctcacaatagggcagttttaacatgaggccagtttctattgtggagccaatgagtccgatggcgtagaccacagccaccagcagcaggcaggtgtgatgagacataatgatgttgtaaagcaaagggtggcagatggcaacatagcggtcgtaggccatcactgtcagcatgtaacactcagcaatgacaaaaacaaggaagaagtagagctgtgacatgcaccctgcgtaggagatgatgtttttctctgacacaaagttcaccagcatcttaggggtaatgacggaggagtagcagagatccatgagtgacagattgctgagaaagtagtacatgggggtgtgcagctgagagttcagacaaattagagtgatcatgcccaggttccccacgatggtgaccaagtagatcccgaggaagaggagaaagagggggagctggaggtctgctctcttcgttaaacccttgagaatgaactctgtcactgtagagtgatttcctgcagccattctcctctgggtgggaggcctgcagggatgcatgggagacaagaaccccattaaaaggctaatcttggacggctagtcttgagcctttggtgctagtgaaacatcctgggctctctgctgatgcatcctccccgccctcctcccctcgtcctgctatttgctggtcttctttgcaggaagaccagcgtgagtgtttcagggatcatgaagatgggaggaaagcaggccaaggtctggatcttttaccatgcacatttttctaaagcatcctggggcagtgtttctcaaagggtagtccctggaccagcagcactgacattacctggagttttttagagatgcaaattctcaggcctcagctcacacctaattaatcagaaactctggatatggggcccagcaatctatgtattaacaatctttctggtgatggtgttgcatagtaaagtttgagaatctctacattgtagataagtagtatatttcatattttgtagttggggatggattttgctttagaaataaacttcctttgtcatgtatataattcctaaatattcactgaatgtgaacatgtaaatacctatctgaaatttacgcagtgtcagggtgatagggtagttacaagctgtgtcattggctgacacatcaatttctatgtctgaaagatgaagaaattaatattgattccaaaggtggttgtaaaaataacacaggataatgcatatttagaaatcttttttcaaatactcagtgcctataaaaaatgtgaattgtcattaagagtctggaatttgttcttaatttcttacttgacctgaggtcctaaggcagtggttctcagcattggctatacattataatcacacggggcatttacaaaggattgatacctgggttctacccgtagatgttctgatttaattgatctgtggtgcaacatgagcactggcccattgaatgttccatactaagtgctaaatagctaattattattattattattttcagatcataatatcaaacctttgtcctattacatccctgatgacaaagtattcaaattacaggcatatctccaggaagcatgaataatcattgctggatacaatatgtatagacagtcttatctgtgggatgtatttcttaagctataaaacatattacccctattttaattgcttccttatgtaattactaacttttgcataatgctttacagcttacacatttctttcaaaggtcgatctcattaacttctgaagttttcggaaatggggagaaatgtgtttagggaaggatttttattttcatgtttgtattgagaaaactgaggtgccagacactaagtgatttgcccaaggtttactaattattggtgacttggaactcaaacttacctcggctctgtcctgatcatgagtttcctcttttgcctcacatgtgcagccttgtaaatctgcacactcacagctcttagcaatgtatgattaaaataggtttaagcttgatatcttagtatatgcatagcataggaaaaatgctgtattttgtttcgttgtctaggaaattgaagctctaaaagttaaataagtcacccaaggaaacccagctagtaagaggcaaaactgggcctaaaacccaggacttctgaccaccagtgtgttttgtctccactaaactaaattgttttgttttagcgtatctttgtgtagcactttattattatttaataacatttaatttatataatttttgaagatagaggaaagatctattgctaattttggatgcatttaaaaaaattataaaggcaatatataggcattgtagtgaattagaaatgcaaataagcaaaaatttaaaacaaccattttccaccacttggaaccaaacggtggtagtgaatatccttctagacttttcctatgcatatatgtatttacatgtatataaatatatatgtatttttacaaaaacatttgtaatctgctttttaaacatagcattcacaaatgtattgtctcatttgattcctataactggcacta

SEQ ID NO: 915234 - DNA, 4001 bp, Homo sapiens
taataaattatttagatcaaagtgtattgatctggcgtgttctataactatcattatatgttgtgggtttacaacccagtcttggatgaattatcttttaccacatatgtttatatgagtgcagtctgcagtaccttaaaattcaatggaaattgcctcttttaataatcagctgcttagtgctgttttaataactaactagattctcaacattatttacttcgcctcgaaaacttccagacccttagttgattatcctaagccacatatttctccatcacagctcaaacacccaaactaacccttgaaaaagctctacattctgattctttaagttttcaaatgaatgtatgatttctactcagcatctttataacccttaatcctatggaagtcctaattccctagactgggttcctagggttccacacaacctcaatcttaactcaatgtcagtcacattctacaaacttgacacaattctcttctcatttggtgaagaccaacttaagaaaatgtttcatcttctatcctcttgaaaaaaaatgaaatatttaaaaattatttattgagaggtcacattaaattactatgaatagaattaggttttaatgtgttaagttttcttacttttaaaaggatatctgcaagggcagcaatgaagcatgaaaaaatgacataaagaaaaaaaaagcagcctggaattcaaggacctggattccattcccagttgtggcaccaagtagttgtgtgtccttgagcaacatatgtatttctgagtctccaacacatgttaattgaagagactagattaaataatgtgtaaggccaattcacgattaaatggtctatgattatagaaaaatttgcataaaatgaagaaatcctggaataactaggtgaagcagagacagggagaatatgtctgcacttaacactcatccaaatgtaaagatttaaaattctttttctgtacaagacaggaaaaaaatggaacttgaatctcactgaaaacacacactaataagcaaagcattgtatctccttcctccaatactaatcctttcttaagaaaagatttttctgcccaaagttctcctcagggcaactttgacatccttgttcctcaagctatagattaatgggtttaacacggggactattatggtatagaacagggaggacactttcccttgctcgaggggcaggatggaaaggggtttgagatacatgaaagcaccagaaccaaagaaaagagaaactacaattatgtgggaactgcaagtactaaaggctttggacctgccttctgtagaactgttgtgtagaatgctggagaggatgagggcataagaaataaagacagtgacaatgggcattccaacgtcaacagccaccacaataaagaccaccagctcattcatgtaagagctgttgcaggagagctcaaggagaggaaggatgtcacacatgaaatgattgacaaggttgtcagcacagaaggtcaggttcattatgcttcctgtgtgggccatggccccagcaaaccccatcccataggcacccaacaaaaggagcaaacacacctggcaagacatggtgactgtgtacaacagtgggttacagatggccacgtagcggtcatacgccatcgctgacaggatgaaggactcagagacgacaaagaagcagaagaagaagagctgagtcatacaccctgtgaaggaaatgatgttcttccttgagacaaaactcatcagcattttgggagtgatggtagtggagaaacagaaatctattaaagagaggttaaaaaggaagaagtacatgggagtgtgcaggtgagagttcagcccaatcagggttatcaagcccaggttccccaccacggtgaccgtgtagaaacccagaaacaggaagaagagggggatccgcagtcccggctggtgggttaagccttcgaggataaactctgtcacagaagagtttttggctgccattctttttggtcaggcaggagagtcggaggggacaagagaagaggaccacttagaaagaaacatcaccaccacattcttagtctctatctcccattcttagaaaaggaatccaaggagagagatttgaactttggtaggaaggtttttaccactcactgtgggtctatcttcacagtccgagtgattataactcccaaagtgtaatatgagactcaactgtaactgcagaatgagagctggatctgctgaagaaaggggtaccaaaaataatccaaatgtcttttagatccttaggtcagtcccttttctatatctttccctctcctgtctctgcttcacttggtaaaacctggacctcttccctgaagggaatcctgagatgcagaagccacagtggctctgctcagagcttccacctctgggtccacactgtcagattaagtaggtgagctcatgcttttccaagatctcttagctcaagtggctgtacatttaataattttttaaagctgacacttattgagtggttactataagaggttctgtttgaagagccatgtagcaatattattatcttcattttacagatgaaacaagtaagatgacataactagacaaaagtccccaaaccacctgcagccagaaggtgaatttcggcagtatggctcaaatggcttgcacttgaaatcaccatgttacataagtgaccagcatcggggcaggcactcaccttccttccctttagagccataaatgctatactctactgcctctttttcacattctggggaggaagatgaccctagtgaagacaagatgacagatctgagctcaaagccctctcttcccagtacaggtcaaaggatcagaacctctaatgtatctcataacacttcctgcactgaaggacatgacttccaattgttcatttgcccaaaggcctctccagcttccaggaaggagacaaagctttttcctgaccagtgaataacaaaagactaaagagttttattctggattacagacctcaatgatctggccattaagatagagactccctcaagaccacttgcttagcaattagtttccctagagaagaagaaatgtttgtttatctcttggaattgcttgatttggctttctactaacatgtatcctgtactattaagagaaaatcattgtgaaaaaaatgattgtcattaccatttcttgaatacccaataatttagtacctgacatagtacccttattccagctgccaagatccagagtacacatatacaaacatatctttatttatttctcacaatacctattttacaggtaagttgctcacagagacaagatgtttcagagtccacaggtatgcttaggtctgtctgactccaagccccttatgtagctgctagactaaactacctcccaaggacagctactgaaatccataaagcagagcccttgccttcttggatctgacagtctcttggaaaataacaagtaaatattcaatgaatttaagttttaaaaggaagcaattagagcctggaaaggttaacacaaagggctattgtaatttagaataggctattcaataatttattcatattccactcacctcaggaattaattgcactactctagtcccagctcagacaagaacatacttctctcgttcccctcccctgtcctctcatggagtgtatgtttaatggtaacaagaatccctatcaggtaactgctctcaatgtctaccaagaccagcctttctctaaattaataactagtcaaaattccctctggctgtccctgccttccacccacttttctttgagcacttctcccaactgactttccatctgttcagtgccctcaaactgagtcctagtagaccagactcccactgcaggaacacatccacatttgttcttcctctttggtttgcatttgtctttttctgtcttttactccatacctccaagctctgcctggattaaaatcgtc

SEQ ID NO: 915235 - DNA, 4001 bp, Homo sapiens
agttggaggctgcagtaagctatgatcgaatcactgcactcctatctgggtgacaacctttatataaaatgtgtttcatgtcttattggtgagataaagtttaagtaggctcacaaaatatttgtagaaatatagtttattaatattaatatacattccttatgataaaccacactggataaggaaaatgttgtataaaatatttctactaacaatgtgcagtatttacctataatgagtaaaaaataacatttacagtaggaactacatgctttttttcaaaattttcagtgctgttttagacagtaataaatgaagttttataatgtaaactatattcccccttattggaatcctgaggtgcacatgtattatttctctaatcatcctctgttaatgctgcctttggcaataaaaggtggagatacacatattctctgctgtatcaaatggactggaatgatagaggttctcaaaagcaaacggcatgtggtacaaattttgccattctcaaagggaacaagaaaagtcagaataataaaaggcaaaatggtgacaacatagaacaaaaggacaagatcaaggggaactgattctgctttaaattacctaccatttgtagtggatatatttcatcaaatccagctgcctatatctgtaacaatgttgataaaaataagaatgcttctatcatatttggcacttctgtgtttaggtgagaaagctgtgactttgacatttttataattcatgaaatttaccacatttttccaattaagaatagcccaggagagaggaaaggtagaaaatgatgaagaaaaatatcagtgcatatgttccctttacaaatatgccatgacctctttagtaatattgcgagaagtgccagagatgcaaaaacaaaaaagaagacacaagatgatctcataagagaaatgataagacaagtttattaaatcacacataacaccatctgtagaaacaacaaaatctcttcatgaaaaacactaataaaaatttgaagtccttcaattgttttacatcattactgcttctaattagaatatatttctcctctgaattttaatcagagctttcctcagtgcaactttgacatccttgttcctcaaactgtagatgaggggattgagcatgggcaccacattagtgtagaaaacagaagaaacttttccctgctccatagatccagaagaatatttaatatacatgaatgccgctgacccaaaaaacagagacagagcaatgacatgagagctacaagtactgaaggcttttgatcttccttgagtggatttgatatgaagaatgctagtgacaatgaaaacataagaaatgaggatggtacaactgggtaccgtgatattagtacccacaacaatgagaacaaccacctcgttgacataggtgctggtgcaggaaagctggaggagggggagtatgtcacacaagtaatggttgatgatattagcactgcagaaggtgagtctaagcatgcacccggtgtgggccgtggctccagccaatcccattatgtaagcagcaaaagtgagcatagaacagacctgatgggacatggtgaccttatacagcaatggattacagatggccacatagcgatcatatgccattgaagtcaacatgtaacattcagagatgacgaaaaagagaaagaaaaacagccgagtcatgcacccaacattggagataatattcttttttgacacaaagttcattagcattttgggagtgaaaacagaggagtaacagagatcaatgaaggagagattgaagaggaaatagtacattggtgtgtggaggtgagaatttagaccgaaaagagtgatcaagccaaggttgcctaccatggtgacaatgtagatcactagaaacaggaaaaagaggggttgccggaactctggatgatctgttaatccagcaagaataaattcagtcactaaggagttgtttctagccagcattttttgtcttcaaaaatctgggaagacaaaagaaaattctattaggaacacagatttctttttacaaaatctcattaatgaggaggggactcaggctgtaggaatttgggtgagttctttgtttcatgggatctgaatgtactgaatgtactgccactcccactcctcaacatttcagtcagtgtcttttgtctgtacagactgaatgtgacaaacaattgctcctgtccttactagaagacacagaggtggagtagctgaggcacaggcctacctgctgttgagcttgggttatatggatgtgtctcatctccctcacttccatctgtcccttcacttcctagtttctacttatgtttccattattctactagacacttcaatttccctgtgatgaccaccaggtaagggaggattcctttagggcggagaccatactgatattctgtttcctagacaggggtctcctatagggtttctagataccttactataagaatccatgaagtcaccgggtgataaaagaagacccttagtagtcgaggccttatgattcaccacatacaaatcacataagtgtttctacacattctcctctattccatcctagctagacagaggatgaagaaaggaagctgaatgtgctttcacaggtctttgtaggaaggcataagggaaacataattaatttgggtacagttatattagttgttaagtttgtaaaattttaccaaactggtatttttatgacccttaaactcttctatatgtatagcacatgtcaatatatttttaataaagagacaaatctcctttcctggcattcctctgttctggatgtgtcacttggaactgctattgctatcctgataccaggctgagaatgaagccaacagagagaacagtgtgagaaaaatgcaagcccgagagtcagagctccataccactaagtttcttgctattgaataaatacttttccccatttttcagcaacatccaggagagagaaatagaaacttgattaactcaccttccttccactcagagaactcagtgctgaccattgatatgtgtttcacctccactgccctggaggtagaactggtggtgaaggtatctacgttgaccacatgtagtcaaagaatcttcttctcccttacctggcaaaagcattgagcatagatctcagaatctgaatgttctgggaatcattctgaggtgtagatcaaactatttataaatttgccaagagggtttgttagaaaatcagacttcacaccagacccaccatgtccaccgtcatagagacatggcatttgctcaaggctcataattcttagacctgattacataccaacagtaagtctctctcaggacctcccctaccatgacacactctgcagggaagaaattatatgcctgtgtttacagcctaacttgttgttgtagatgtaaacttttcatcagggattatacaatccacagggcataggagaaagagcctctgctgtcatgtataaagatgtaaacataaagattgtcagaatttttgctaattataattatcggcagtgttagctttaacaagtatgtatgtataatttagtaaagtttattgctatgctcatttttaatattgtgagtccttttaaataatccatttttagttttgcatactttataggcaaaaagaaaagaaaaagaataaagaaaaggatacttttaattgatttcagattttttaaataaaattttgtgtaacatagaatgatcctttatttcatcaaaatttaattatcttgggttgctctaactcaacatgtctttgcctttaacaggttaaaatcaaatctgtaagaaaaatcactaatcatgtgccctcattttaagacagtatgacttcagaatttcccggtaggtaggaatttgtgcttgtgagaaggcatctatattttttacctttttattttaaaattattagaatcacaagaagtggcaaaa

SEQ ID NO: 915236 - DNA, 4001 bp, Homo sapiens
aatacatgaacaggaaaagaattcgacaaaataaaggaattatgagaaataacctttatataaaatgtgtttcacgtcttgttggtgagatgataaagtttaagtaggctcacaaaatatttgtagaaatatagtttattaaaattaatatacattttttcatgacaaaccacattggataagtaaccattgtgtaaaatatttctgctaacttaatgtgcagtatttacctataacgagtaaaaaaataacatttacagtaggaactacacgcttttttcaaaattttcaatgctgttttagatagcaatgaatgaaagttttataatgtaaacaatggacccacttattggaatcctgaggtccacatgtattatttctctaatcatcctctgtaaatgctgcctttggcaataaaaggtggagacacacatattctctgctgtatcaaatgcactggactgatagaggttctcagaagcaaacggcatgtggtacaaattttgccattctcaaagggaacaagaaaagtcagaataataaaaggcaaaatggtgacaatatagaacaaaaggacaagatcaaggggtgctcattctgctttaagctacctaccatttgtaatggagacatttcatcaaatccagctgcctatatctgtaacaatgttgataaaaataagaatgcttctatcatatttggcacttctgagtttaggtgagaaagccgtgactttgacatctttataattcatgaaatttaccatatatgtccaattaagaacagcccaggagagaggaaggatataaaatgataatgaaaaatatcagtgcatatgttccttttacaaagatgccatgacctatttagtaaaattgtgagaagtgccagagatgcaaaaccaaaaaaagagacaagatgatttcataagagaaatgataagacaagtttattaaatcacacataacaccatctgtagaaacaacaaaatctcttcatggaacacactaataaaaatttaaagttcttcaatcgttttacattattactgcttctaattagaatatatttcttctctgaattttaatcagagctttcctcagtgcaactttgacatccttgttcctcaaactgtagatgagaggattgagcatgggcaccacattagtgtagaaaacagaagaaacttttccctgctccatagatccagaagaatatttaatatacatgaatgccgctgacccaaaaaacagagacagagcaatgacatgagagctacaagtactgaaggcttttgatcttccttgagtggatttgatatgaagaatgctagtgacaatgaaaacataagaaatgaggatggtacaactgggtaccatgatattaatacccacaacaatgagaacaaccacctcgttgacataggtgctggtgcaggaaagctggaggagggggagtatgtcacacaagtaatggttgatgatattagcactgcagaaggtgagtctaagcatgcacccggtgtgggccgtggctccagccaatcccattatgtaagcagcaaaagtgagcatagaacagacctgatgggacatggtgaccttatacagcaatggattacagatggccacatagcgatcatatgccattgaggtcaacatgtaacattcagagatgacaaaaaagagaaagaaaaacagctgagtcatgcacccaacataggagataatattcttttttgatacaaagttcattagcattttgggagtgaaaacagaggagtaacagagatcaatgaaggagagattgaagaggaaatagtacattggtgtgtggaggtgagaatttagaccgaaaagaatgatcaagccaaggttgcctaccatggtgacaatgtagaccactagaaacaggaaaaagaggggttgctggaactctggatgatctgttaatccagcaagaataaattcagtcactaaggagttgtttctagccagcattttttgtcttcaaaaatctgggaagacaaaagaaaattctattaggaacacagatttctttttacaaaatctcattaatgaggaggggactcaggctgtaggaatttgggtgacttctttgtttcatgggatctgaatgttctgaatgtactgccactcccactcctcaacatttcagtcagtgtcttttgtctgtacagactgaatgtgacaaacaattgctcctgtccttactagaagacagagaggtggagtagctgaggcacaggcctacctgctgttgagcttgggttatgtggatgtgtctcatctccctcgcttccatctggcccttcacttcctagtttcttttttttttttttaagatggagtttcacgcttgttgccctggctggagtgcaatggtgggatctcggctcactgcaacctctgcctcccgggttcaagagattctcctgtccagcctcccaggtagctaggattacaggcacatgccacgatcccagctaatttttgtatttttagtagagacagtgtttcatgatattggtctggctggtctcaaactcctgacctcagatgatccacctgcctcagcctcccaaagtgctggaattacaggtgtgaaccaccgagcctggccacttcctagtttctacttatgtttccattattctactagacacttcagtttccttgtgatgaccaccaggtaagggaggattcctttagggcagagaccataccgatattctgtttcctagacaggggtctcctatagggtttctagataccttactataagaatccatgaagtcaccaggtgataacagaagacccttagtagtcaaagccttatgattcaccacatacaaatcacataagtgtttctacacattctcctctattccatcctagctagacaggatgaagaaaggaagctgaatgtgctttcacaggtctttgtaggaaggcataagagaaacataattaatttgggtacagttatattagttgttaagtttgtaaaattttaccaaactggtatttttatgacccttaaactcttctatatgtatagcacatgtcaatatattttttaataaagagacaaatatcctttcctggcattcctctgttctggatgtgtcacttggaactgctattgctatcttgataccaggctaagaatgaagccaacagagagaacagtgtgagaaaaatgcaagcccaagagtcagagctccataccactaagtttcttgctattgaatagaatacttttccccatttttcagcaacatccaggagagagaaatagaaacttgattaactcaccttccttccactcagagaactcagtgctgaccattgatatgtgtttcacctccactgccctggaggaagaaatggctgtgaaggtatctatgttgatcagatgtagtcacagaatcttcttctcccttgactggcaaaagcattgagcagagatctcagaatctgaatgttctgggaatcattttgtggtgtagatcaaactattatttataaatttgccaagagggtttgttggaaaactgcacttcaaaccagagctaccatgtcatagagcacatggcatttgctcaaggcttacaattcttttggacctgattacatatcccccagtaagtctctctcaggacctcccctaccatgacaaactctgcagggaagaaattgtatgcccttgtttacagcctaatttgttgtagtagaggtaaatttctcatcagggattatacaatccacagggcataggagaaagagcatctgctctcatgtataaagatgtaaatgtaatgattgtcagaatttttgctaattataatcctaggtagtatattagctttaacaggaatgtaagtataatttagtgaagtttatatgctcatttttaatattgtgagtccttttaaataatctttcaaataatccatttttacttttgcatacttcata

SEQ ID NO: 915237 - DNA, 4001 bp, Homo sapiens
aatgtctcctggccacgagctggagcactgaactcttcaatgtagaacagcagaacctttagcagagtaatacagagtggtctttggcactcaaaatccagatcccttccagactccctgagagtgggacgtgtaatatgactcctctttctttccgattctatattgattaactgtaatacacatacagacacacacacacacacacacacacacatataaacatgcacacacgttgtcagaactgtaaaatctaaatccactttaaagaataagcaatcttcctaaaatccagtagtgtgcttagtatctccagagcaaggcagaggccacattttacagatcatgcaaatccgtggagttcttccttgtttcttcttccagcctgagtctccggagcctaagaaattggcccaattacacaggatcacttacccctgattaccattccaaggcccagaagctttagaactttgaaataaaagatttggatttgatttatccttacagagcagatcatagaaaattcttgtgtgagggcttcttttatgtacatacatgtatatgaaaaggagggtttatgatcttcctgaccaagcaacctcctgaagagctggatatataatcatattagcactggcaccaaggtatctaccattgatctttaataagtctgcttatgtaactaaagagaaaacactcctcaacctttataccaccacctgccccttgttccagccagaaacgttcttgctcagaaaaacccatttagcctaccaagaaaagaatggaaggcatggagcctcatcttactcatctcttgggcctaatacagagttcagtaaacaaaaggcatttcatagacactaacttgcaggcagtgagccaatttaattgttgcaaaataatatagtcctcaaggagagtataggaaagagatttccaatttttaaaagtggagaggagaccctctttgaggaaaaatattaaaattcctccgcctataaatagaaagacacttgagtatcatgcttaccgagaatcggttgccagtgatatgaagagacccattagaagagcactctcttcagggttttgcccagggcaagtttatcatccttattcctcaaactgtagatcgaagggttaagcatgggaaccacattggtgtaaaagactgaggcaaatctgccatggttcatagagccaggaaaagatgttgttaagtaggtgaatgtccctgacccaaaaaacagagcaacagcaattatgtgggagccccatgtgctaaaggctttggatctgccctctgcagaaggaatacagaggatgttggagagtatcaaagcgtaagagatgacgatgcttatgctggatagcatggtgattactccaacaacaatgaaaaataccagctcactgacatgggtgctggtgcaggagagctgcaagagggggagaacgtcacacagataatggtcaatgacgttggaatcacagaaggtcagtcgcagcatgcttccagtgtgggccatggccccagcaaaccctaccacataggaaccaaacatcagcagaaagcagacccttggggacatggtgaccatgtagagcagggggttgcagatggccacatagcgatcataggccattgataccaacacatagcactcagaattgacaaagaaacagaagaaaaatagctgagtcatacatcccacataagagatgatactttctgaaacaaagtcattcagcattttgggggtaaacacacaggaataacagagatctataaaggacaagttgaagaggaaaaagtacatgggggtgtgaaggctaggatttatcccaattaaggtgatcaagcccaagttgcccaccacagtgaacacatagatccctaagaatagaaggaaaagagggagctggagctctggctgttctgataatcccacaaggataaactcagtcactgaggagctgtttctcagagtcattctctcttggcgagctgtctggggaagcagagggcaaaacacaaagagtcatgacaggcacaagcatggctaagggaagaagactctagtggaccagccagtgtgcagatgccctctcttccatcctccctcatctacacacctccccaccctgaggtattaacaacgtgtctgtgagaggatctcagctctgctgggccgatcatgaattcaagctagcatctgttaccatgggcagcaagaattccgtctctgcttgagagatgacgagggagacaacacacctgaattggctgcccagggactctcagaaagacaccctgagaaccaagagtacaacctgggccgctgcctcaagagctgagagaccagagctctcaaggtcaccaggatgccctcccattctctgcctccgtctcccaactagatagtggatttccatctggagagaaagccaagagtgttacctgctggctctttacatcccacccgcctcctcgaagaccctccattccatctcacctcagggtcagtgttgagagcagagacgggatccatacttcccagagcccttggttgtgggtttcaaagagaccatcaggaaagacaggattcggaccttcaccttccttctcccgggccccactcagtgctgggccttacgccatctctttttccattagccagaaagagaaaatggtgctgcttgtgcagaaagcacacagccttgcgtattacctcttttgactcccttggtgctgagaatcagagcttttacagaccccaggctccaaggtgctcaaggaatagaccatggtttctgtttgtggattttcccaggtggtcttgacaacttcaggaaaaaaaactaggaactctcattttgaccagaaccccagctgtcatatcacagaggaatttaagctgcttgacgatctcagggacctgattagacacagtttcccctgggaatttctccaagatctgtctctatagggaaggaattgcactgtctttgtttacagcctggataacggtgcttacctagcatcttgggagtgggggttccactcaaactttccctctactccagggatttcatgttattcagtgctgagtttggggactcattttttcctttctcattaactctcagagcctaagcttgaatttaagagtgaatagccccaacctaagccaccatctccaaatcttcacagggagctatgagagtaggacccctcagaaaaggtcagatcagatctacagagagcacctcagataaaaggcttcttggaccatgcgctgctcagaacagaaaccacaccacctccaccacaaacaccacctactcgcagctctaataagggccgcagacaggcctttactatatatgaagagattaaaatatcacaacacatatgctagaaagcacacacacacacacacacacacacacacacacacacacacacccctacacagagttactctctaggcatgcaggcttaaggtataatgggagatggatgtaagggtctaatcctgccattattcagatgacaaagctgctctccatatgatctgctagatgaatattttaagaaaaattcaaagacatgggagcatctgcatttgtaagtttcactaaggctacctaaaataatcccagttcgcctgggacagtcctgacttacactcattatctctgtataattattaatagcataccctttcactctcagaagtgtctggacttggacaacaaattgtgtatactaactaaaagtaagtaggcatatttacctaaagacatgccaagattgtgcactgcagcgttgtccttaacagccacaaactgaaatcaccccatctgtcagccaactgtagaccggataataaatggtaggatgttaataaaatagaattccatatagccatgaaagataatgacatagataaatgtcacaaaccaacagagagtgaaaggagccaagcaca

SEQ ID NO: 915238 - DNA, 4001 bp, Homo sapiens
tcagtggtcattccctccactgactgactgctgtgtggatctcacctgactactgacttgtaacacaaggctctctgtggttctgaaatattctccagatccataactgaccaccctaggcggtggacttctccatcttgaagtttttttgttgttgttgttgtttagatggagtcttgctccattgcccaggctggagtgcagtggcatgatcttggctcgctgcaacctccacctcctgggttcaagcgattttcctccctcagtctcctgagtagctgagagtacatgcatgagccactgcatttggtccccatcttgacttttgaaaacagggcaatgattgtatgtgattgcatgtgaaataattcccaaattctgttcttcataaccttgacattttctataagttcttccacccagcatcactaaaacccttcaagtccaagtccctgaagctccaccccactgtcttaagaggtaccatacatgctgctccctgggtcctaacacacttcccctgcaccttcttcaaaatgcttcaagaatttccctggtcatttggccaaggccatctcaacaaaaaattctatatacttcctacctacttgcaaaaatgcgacatttaaaattagcctttgaaaagttgcatgtaatttctgaggacagaatcagattttaacatcctaggccagctcacatttgaaatgaaatcttccagaggctgagggaggaagaaagtgagccataatgaaaagcagccagtactggaaataaagagcctggattttagtcgcagttccactgctgagcagctgagcgacctcggggaaggtacataagcttgagtctatcctcagaaatagcggggaactgagtgaaatgatcctcaagacttactgtgtgagtattcaaagctcttaagaatgtttgtaaattaaagaacccttaaaatggggatgatgaacctgtttgaggaaaaattatatttcttccatgtaaccagtggagtccaaatcacttatgggagaaacagtgtttctttcctgagcattgcccttttctcaggagaatgcatttttgttcaagattttctttagagcaactttgacgtccttattcctcaggctataaattaatgggttgagcatgggcaccacagtggtatagaatagggaagacaccttgccctggttcatagctaaaagagaaaagggtttgaggtacatgaatgctcctgacccaaagaacagagaaactgcaattatgtgggagctgcaggtgctgaaggctttggacctgccctccgtggaatcaatgtggaagatgctggagagaatgagagcataggaaatgaagatggtgactgtgggcacaccaatatcaatgcccacaacaacaaacactacaagctcattcacataggtgctggtgcaagcacactcaagaaggggaaggatgtcacacatgtagtggttgacaaggttattggcacagaaggtcacacccatcatgcacgctgtgtgggccatggccccagcaaaccccatcccatagacacccaacaaaaggagaaaacacacctggggagacatggtgaccatgtacaacagtgggttacagatggccacatagcggtcatacgccattgctgacaggatgaaggactcagagacaacaaagaaaagaaagaagaagagctgagtcatacaccctgcgtaggagatgctgttcttctttaagacaaagctcatcagcattttgggagtgataacactggaatagcagaaatctatgaaggacaagttatagaggaagaagtacataggggtgtgcaagtgagagttgagccttatcagggttatcaagcccaggttccccaccacagtgaccacgtagaagcctagaaacaggaagaagagggggatctggactcccggttggtcagttaagcctgcgaggataaactgtgtcacgaaggaggaattctcagcagccattgtcatttaaggcattctgtggggacaagggaaaaagttatttagagagagagagagaccactgctgccctcccagtcatccctccttccttcttgagaataggaggcacacagagagattttgaacttcagcagagggggctttgctgcggctccctctggagcaagccccgcctccatggccagggcaggtgctgctggcaaggcctcccatctttactttgatccctttgttgcgccctttcaactccagtttctacttaagtttacagaaactggggccagtctccaggaagagtcctcttagaggccggacccagcccgcctgtgcctggagagttagggttagggtcatcctggacagagcagaagggtagagtggacttcccagagctttagtacctgagactggggactcgggaaaagttcggactgctcatccggattcagcctctcatcctcttcagcccagagtttcagtgatgtgcctttaggtccagctcttatcttcacttgttcagacagattggctgcggagctatcacagatgaaagactaagcaccagcccgctaggccctatcccgatggcagcactggagcctcggctgcctcagaactctttctgagctacagtacgtgacatctgatggaggctgtgccctgaggccttcctccagcttgcagaaaggcgacagcatccttaccattatcagtgacagccaatgacaggagactgagcagttttattctgagtttggatatctggggaactgattagaagtagagcagcagaagttcccctgggatcacagacctggatataacaaagttgtgctcatacccttgataatatttgaatgggcttttagaaacatgaaaatatttgttcaattaacatctactcggaaatatgcaaagcattgtgcaaaaacaataatttaccatttattgagcacttaatgtatacctaatccttttttttcctagcattatgcactgacctcagcatgccaggatccaataccatttttcatataatttttcattttaattctaccccaaattctatgagctgggttttatcaccctcattttagagatgaagtaactccccaaatgttaagttacaaaggccatattaaaactaggtgcatcttactccagatttggtgttcttaataactgagtttaacacctctctatagaagataatgaagtatgtaaagcccagttcttgccttcaagactctgaccatgtcttgaaaaagacactagaacacacataactaagcaaaagcatgtgataagatccagaaaaggcaaaaacaaaatgttatgccactctgatggaggacattcaacctatcacttatatttcagttcattgctgagctgcacaatacccagtccagaagacaaaccaatctgtcttttcttggaatttgagcttgacagtaaaaatcaatctcgattggttaagagttttttccaaaattgctaacttgttgggattcccctagatggcccctgtcctctatcgttgttctttccagtgttattttcagctttcctcatcgtgagcctgaaggccttgtagcttgattctccttcttcccacgggatatttgctttctcgttttgcttgctttgttcttttcataactcccctctctcgtgacaaaagtcatcccttctgtgttctagcctctcagagccttgcttgagctcagtgacagctagttatcattcttggagccccataaatttgaatcaatatttaaaaatcatctaatcctgtggttcataaacctggctgtgcaaatgaattagataactatatgcttattaaaagtacagatcctgctgccccaagccaggcatcataaattagaatctccaggggtgggattttataacttatatttctcaccctattgatctggatatttagacaggtttcaccctattgatctggatgtttaggcaggtttgggattcaa

SEQ ID NO: 915239 - DNA, 4001 bp, Homo sapiens
gaaaactaacttgatatggaagttaaaatgctagaaattcaatggaatattcctgggaagaagagaaaacagctgagggatgcagaacagtagaggcatcttattactacccagcaacatacaaaagctaaaaacaaaaacagaaggaaatgttacatgagacctaagacctgtgaaaacccaagaaaagcattgtatacagagctcttggtacctacttttactgtaaggtcacatgctcaaaaacatggaccacagcttcagttcaggaatctgcagaggacagttctccaactgaaacaaatgtgggggttatatcttccctatgaggaaggtttttcaaccttaggcaactccattgcaatagatagtgaaaacacatggtcagaggtcccttagtgtagaactgtggtgttaaagtagatatacaaatacaaaaaaaacaaaaccagatccatgaagaacaacaaggaaatgaaaataaagagatttttaatatactgagtagaaaaaaaaatagtaaaagcgattcgaataagacctgctgactagaattgccattcttgttcttaactttttcttttcttttctattctttccttttcttttcttttttcttttcttttctgttcttttcccttgtgtatttgtctaattccctgaagaattaatagatatctgggatcaggctaacatacctcttagcattcatatcagtggacaactcagtacctcccacatagcaagtattcaacaagcaaacatgggatattaggaagagaggactaacattggagaaaatctgaattctcatgtcttttctatcacaattggtaaaagaaattaaaactacctagaccttagttttcctatcaaaagataagaatgttaatacctgctttacacaattcttttattttgttgagaaagttgaatcaatcatagatgggaaagtatttttaaaatctagatattatgtatgttacaacagaagaacatgaaaatagaaaaaaggaatatatgttcattggaactattcatttttcccatctataaatcccccaaatcaggactcattttcctactaagaccttccttaatgctttcttcacatccttattcctcagactgtatattaaagggttcagcatggggatcaccgtggtgtagaacacagaggacaccttctcctggtccagggagttacttgaagggggcttgaaatacatgaaggtaatggacccaaagaagatcaccacagccatgagatgagagctgcatgttccaaaagctttggaccggccctctgaggagcggatgtgaaggatgctgtagaggatgaaggcataggagacagcaacagctagggtgggcaccaaggtgttaaaccccgcaatgataaaaagtagaagctcattgaggtgtgtgttggagcaggagagattgaggaggggaagaacatcacagaagtaatggttgataatgtgggatttgcaaaaggacagtttcatcatggcacttgtatgagtcaaggcagagagaaagcccaagaagaaggcagccagcactagcagtgagcagacccatgaggacatgatcgcattataaagcagtgggctacagatggcaacatagcgatcatatgccatggcagtcaggaggtaaccctcagccaccacaaagaccacaaagaaaaagagctggaccatgcactcagagtaaaggattgtattcttctttcctaggaagttcaccagcattttgggagtaatgacagaggaatagcagaaatcgacgaaggacaagctgctgaggaaatagtacatgggggtgtgaagtagagggctgactgcaatcaggagaatcatgcccaggttgcccactactgtgaccacatagattcccaggaacaggaggaagaggggcagctggagctctgcttgctgtgttaaaccatctaagacaaactgagctgccatagaataattttccatggtcattcttctttaggcatttctgtgaaaatagaaagtatgaattaccttaacatggaccctcactgctcttccaaacaaaaccaaattgcataagggaggttgacagcagctaacagactgagtcatagttttcattgtctctaaacttgatacctctgctttgtctccctaaagttccctgggccttctccaagttggtccagaatttaagttacaaaaaagtacttcctgactgactcagtaacatttgcctcctgaatttggtagaaaaaaagcaaatgtttactttgtggggagaatttctgatagccaatttgtcacagttaaacagtagaagagattgaaggaagattcaatcactttttcaatttccccagttttctcctactcaaaggcctgcacatatttctcacaatatctgaaaacaaggagaggatgacgcctcagcctcggagaattgaaagtgtctattacttccaactggagtgatggtgggcatggggttgggtgtaaggcatctactcattatgctgaataaaaatacctccagtgtaaaaatactgcagaagtgggagtctccacataatacctctggccctctgctaagctggagaagggtgggggaggcaaaagcttcatcattggaatcactgatgagaacaatctcttgtaacccaggtgttcatctataaagttcacagagtcttatcggacctcaactattgccagaagagttggctggctggaatcctagcagtgaactacttcccccctgacttacgagatccgcacaccccacagaacagaccttacggtggcaggaaaaggtgcttctgaaggtgtctgagaagaatgttgctatgggtgtaaatcttgaactttccaaagcgtggtacccttggtggtttgggccctggatacaaagaaataaaagagaatgctgtacttttcccagaagaagcactagaatctagttggtccacccttttcaacatgaactggctccctggtggagccatttcagaggagtgtgtgtgttgtcaggtgccagttattcatttaaggctccaaatagtccagctagaaagaaacctgttcagttttgcaaactcagcacttccaatgtctatttgacaacagaaatattgaatgagcttaatgaggtgaactatagtctactcagcaatgaatggaaaggtttgggtatcaaagtaggtgtatttcaagggttgactttactgcagaccagtttgtaacactgggcaagtcatttcatgtaaacttcattgttctaatctgtgaagtgggatacctgtttcaaaggtaaaatggtaaatgtaaagattcattatctaaaaacacttgtcaacatttcatgtggcacatattgttaaatacaattgaacagagaaaagtacataacatcaggagatgaaaatacactacctttgtatgaagaaaagacagacacatgtgtttctttgccctaggtccttcactttggtaagaataaccaaaatgttttaaacatttggtgctggttaggttttaaaatgtttgttttcagatttggaaattttgagagggatttaaagtgtttggccttttttgaaggagttgggggcactgaagtgttttcatctccaagggacatgtgcttatgaggccaggaggaaacacagcagagctatgcaagctgaatggactcttgatccatctcctagtgacctcagaacatttttctttctttctttctttttttttttttttttgagatagagttttgctctgtcgcccaggctggagtgcaatggcgccatctcggctcattgcaacctctgcctcccagattcaagcaattctcctgtctaagcctcctgagtaggtgggattacaggcatgcaccaccaagctcaggtaatttttgtatttttagtaaagacaaggtttcaccatgttggccaggctggtctcaaactcctgacctcaggtgatccacccacc

SEQ ID NO: 915240 - DNA, 4001 bp, Homo sapiens
tatgtgtaacttaattatcctctaatatctgtgagcaatttctatcctcttggctttattttctaagacattttatgatctgagattctatgatgtatttttctccctgtttattgcctttctttcaggctaaaacctaaatctaatgaaggcaaggagtttgtgacttttgttcatctctttatcaccagtatgaggaatagtgacaggtatgtagtgggcattcaatgagtattccttaaatgaatgacccaaagaataaacaaatcaatgaatgtgtgatttcaagttgcttcatcatggccatgcgtctcagaatatatttcagaatgccagtggcctcttaaatagtaatatcaacaaagtaaattactttcaagtggacacagtctaattgctgttgtgcaagtgataactagaatgttcctcattctaaatactaaaatgtagctaatgcagacaaggtaacagtaactttctaggtagttatgctttttacttatattgtcaaaaatccttaattctctggagttaaataaagtttttcccactctctccatttttatagaagtatagaatcttatattacccatgtacatttttaaaatctcattaaatgcgactatcactccagcctttaaaagtctttgtgaatcatgctctgtcatccattaaatcaactatttcaaggctgaggatcgtgactcaggcttctaattccagcacattgggaggccaagtttggaggattacttgaggccagaagttcaagaccagcctgggctttcaaaagtaatatgttcaataaattgtttttaatgtttatttgcccttcctcttctgtcatctcccatttctctaatacattttcgaagattatattgaccatcagaaaattttgtttcataatctccaaaaatgtcttaatcattctctaatataaaatatacatttttaagtgatgataatttttctctctccgagagagacagaaacttacaaagatcctataacaactttttatatggtttattttttctggctgccaatgagaaccctctttgtcaggatgactgccttcccctagtcatcttcttcagtgcatttttcacatccttgttcctcaggctatagattagaggattcagcatggggattattgtgatgtagaacacagaagacaccttctctttttccatagtagtgctggaagggggcttgaaatacatgaatgttatagacccaaaaaagatgcccacagccaagagatgggagctacaagtgccaaaggctttggattgcccctcagtggaatgaataccaaggatactagagaaaatgaaagcataagagataaggaccgccagtgtagttgctaaggtattaactcctccaataatgaacagcagaatctcattgatgtgggtgctggagcaagacagagtcaataaggggagaatatcacaaaaataatgactgaccgtatgagacctacagaatgacaacactgacatgcgggtagtatggactgtggcccacagaaaacccagtgagtataccacagccatcattatggaacagaccctgtgggacatgacaatattgtaaagcagtgggcgacagatagcaacataacggtcatattccatggctgtcagaaggtagccttctgcaattacaaaaataaggaagaaataaagttgagtaatgcattccagaaaggagataatgttctcctctggaacaaagttcaccagcatcttaggggtaatgacagaggagtagcagagatcaatgaaagacaaatgactgagaaaataatacactggagggtaaagttgagaactgagagcaattaagaagatcatgcccaggttccccaccactgtgaccacatatattccaaggaacaggaggaagagtggcagttgaagttctgggcgttgtgtcaagcctgccaggataaactcagcccctgaagaatggtttgaagtagccatgtcttttaaggtattatgtgtaataagaaataagagaaaagagagacattagatttattttctgattcccaaagcagaatgacatgccccatgttggttgcttccattcctgagagcctcatctgtcccatgattgcctcttttcagggacctcttacaagatcaagggcaaatattatgagtataaccaagaaccttgatttcacccaaaaccctgttgaatgctcctcttttagtaagagtcctcccattttgtttccaggcttatgcccataattacctcactgctggaggaagcacaaactttccaaatctaattagtttgtcattgctaccattaaaacaacactgcttaccttctttatctgagcatatgccaatagaaccttcagactttgttacaacatggcttctaatccagctctgatgatataaaagtagtccatttcagtttccttacccatcaacatgaatcaacataattagcatttgctaaaactaggaaataagaaacataaaagacgtctataaagagaccttagtacaaaaaaaaaaagtatggaaatggttctaatcaattctgaccctcattagctcacttctgttctttgaatggaaaacttgagtgggccaggagattcttgtactcagtgtggatgtggttgacagaaatgttgtgccaagggctatcctgagattctagtttagatctttcctgttccagaaacagcaaagaagcaaagaagtaaggctgactttcaggtgtaagacctgaaccatcagcaactcagcgcttccctccttggccctttcctgctatccattattcatggccaaactctcactgacctttctctttcaaagctgtgagatctgaactggagatttcttattccctgacttcgtttcccctaaagtttaagcaaaggattcagggtgtgttgctttcagctgaaacactgtatattacctaagacatcaggtttcataatttttttccaaagtgagaaaaaatgtcaagggaggaaaaactccatacatagagtgagatgttgtttgcttttattttgcataaaaacatatttttatgatcacaaacaaaaatttataaaaatttgcttctacagtgttttaagggtactcaatatgtatatcgatttaaaagctgacaggtggggtgttatctccaagagcacttgagaagacagccatgtttctgaattaggggaattagagaatactctaagagaaagagaatcagagttaccagaatgcaactctaacaagccctgttacgggaagttcaggaattctagatttttagccttacttggaaaaatattctaccaaatgactgaattagccaaaaagagaatttgttgaagaaaaatagcagagagcttatttagagagagacagtacactctggaaaggtgagacagagctggctgctgaaggggagtgagccagcagcagcttgagagttctgcactgggtttttgagatgatgtccgacactttcttgaagttcccacctctgtcgtgagcctctgccttttcctttgtccaggttcctgcttctgccttaagtccccttctcttccctgcctagttcccatgccaggcttgtggaaccctcccttactattggctgatgtgcatgcatggaccctgtgttggatatgaatcctgcctaacagccgcattgccacccaagggaggctgcttaataataggtctagtgattgaagcacattctttcctatatccgtaacatttctatattgatatattcccaaattattttcatcacagaactatcacaaataatgcctagagtatttcttttagaaaagactatctcaataaagtagaaaggttaagaatttaaaattacgtgctatggaatgagaactttaccctctttattactcattaagctaagcataatgatatataacatactactttttttactttaaattctggtgtacatgtgca

SEQ ID NO: 915241 - DNA, 4001 bp, Homo sapiens
aggttcattcttaaaaatcataagctttttcattatctttatctcaaaacatgtggaggaaattaaagacacctagttacagcttacaaagaaaataccaactcaaaagaaacaaacagaaagttacaaaatactgcacatatactggtcatgctgaaaaaaaacaagacattttaataaggttataaacatcatctcttcatctagtcattgttaaatcttatttttggatcaacagctgccaaatactgagaccatattagcttagtcctttgttgaatcttcttcattgcattacactgtaagacaatactggctttcaagaagccctttataagaaacaatcaagaaaaattctcccacagttattacaaaattgttgtaataatttccatcacgctgctcaattttttttgaaattaggtgtggttttcttctgatatgactatgcagtacaccatgatgatgatttccttttgggcttggattcaggaaactaaagataaaaattgttgttcaatcccagcaaaggtattaactttaaatttaaaatattttttacttttcactttcatatatgttgttttacatgttattaatgtaattatctgtgcatatatttactaatctaaatatatataatttcatctgatttcaaattacttttttttttttttttttttttgagacagactttcactcttgtcacccaggctggagtgcaatggtgtgatctcggctcactgcaacctccgccacccgagttcaagcaattcttctgcctcagcctcccaagtaggtgggattacaggtgcccaccaccatgccctgctaatttttttgtaattttaatagtgatggggtttcatcatcttggccaggctggtcttgaacaccggacctcgtgatccacccaactcggcctcccaaagtgctgggattacaggcgtaagtcaccgtacctggacctcaaattacttttaaatagtcaaggtataaatatatacatataatcatgattatgaatacagaaatagatcttaataaagagcatatttatcctggagataaagatatttttcttcttaaaagtttcatcagagcatttcttacttcattgttcctcagactatatatcaagggattcaacatgagaatcacagtggtataaaatactgaggatactttctcctgggtgagtgaactgctagaagcaggtttgagatacatggacatcagagacccataaaacataagaacagctgtcaggtgggagctacaggtgctaaacgctttgcacctgccctttttagagtggatgcgcaggatgctggtgaggataaaagcatatgaaataatgattgttaggcttgtggccaccatgttaaatccaccaatgacaaaaatcaaaagctcatcaatataagtgctggagcaggagagtttaataagagggacaatgtcacagaaataatgtttaatgatgtttgatccacagaaagacaacctgagtatacaacctccatggatcacagcatcagtgaaacctactgagaagacagcagccaccagcagagaacagaccctaggggacatgatgaccctgtagagcagtgggctgcagatggccacgtagcgatcgcaggccatggctgccagcatgtagcattcagaaataacacaaacacagaaaaaaaacagctgaatcatgcatccagaataggagatggatctatctctgcataaaaaccctgatagcattttaggggtaatgacagaagaatagcagaaatctaaaaaagacaaactactcaggaaatagtacatgggggtatgaagttgacgattcagcctaataattgagatcatgctgaggtttcccaccacagtaactgtgtaaattcctaagaagaggcagaagaggggcagctgaagctctgcttgttcagttaatcctgaaagaagaaactcagtcactgtggaatggttttttacacccattcttctctgagaaatctgtggagatgagagagaaaaagtcaaattctatcagtgtttgtttctatagaaaacaaatatcagtgttttctctctatgaaaacactgactttgtgttacgaaaaccaaaaagtgaacactcagatgaaatggagtcggtaagcatctacctacctatagattttaggaaccagaaacacacttttccataccctccagtggaacaaattctcttagcaaacgacagaaccttttactccagagttagagacaaaactaatgcttaaaaccaggggatttctgttgtggagaaatgccagccactggagtaaaagaatttagcaagacagttgtaggtaaaggaagacagactaattagagaaagtaggaaaatacgttgccagggagacaacgagctactcagcagaagctgactgcaaagatacaaagccttgctgaaaattttataggatgatatttatgctgtttgttgaagagggctttgtgcagtactgataacaccaaggttgcagggagctaatttgcaggtgtctggtgatagttggatgcaggaagactgtgagttatttgtgcaggagggctgtgtgtcctgggccatgaagaaaggcagacttgtagctcatctgctttctctttttgcttttccctgctcccaccagcctgactccccttccctaattaggactccacagtttcttaaagcaaattagttaagtaggtgcataaactagaggctgaggactatgagaatacttttgctagtgacacatttgccaaaggctgactcttcctccaggatttcctatagagaaggtatctactgttaaggtgaattataattttctacatcaaggtttccaagggtgttcagcaaaagaataattccagggagatgttaaaaggtgttacattaaataagtatctgaggatcatatgacttcagacatcctgaattacatagttaaactggttttgtaactggaggatgcctcagtcctcctgaaggactatataaatacaatatttatcaaacttacttggtgataggccaacttcacactttttaaaaacattttatagcacaagcatggctcagaatgtattttagaaaactatattttcatttgtgtgtttgttctatttttaatctaatcatacattgatttccaggtgggaaattaattcgtacacttgagtaaaaagctggatgatagtagaatggcagacttcccaaaactgtttctaccttctggatctctggccatcctccaggctaaggctacatctctcgccaaggccatggagtccaatataacacactagtgctgccactactggcaatgcaagcaacccagatgtttttgttgccacttggaggctcccacatagcacacatcttggaatcgtctattctggggtcaatcatggccttatctctgagaaagctgaccctttatttagtgttgggcctctcccagagctcactccagactctcatatttgcccaaatggctcaattgtctagggttgcattttctcattctgcccagctacctggctatttaataagctgttcatgtcttcttgtttccaatatattactgctgtaataggacaagccaaacttccgtaggcagcttgagttcccaggatgcaggtgactccttatttcccaaatccttctcacagtttaaaacaaataagctgcatgagcactgaacagctattctctgagcaggcttccccattcttcagaacctgtgtcttttgtatctgctcctctctcatcctaaatgatggagatggaagatcacgtgcaaaagtgagtgtccaattgctctttgcctgttacagaaatacccggagtcttcctttcccattactccttaccagttagcattcatgtgtgtagtctagtcacagaggcttatcgaagtaatgttcaaaaaacctatatgctcagttttttgtctttaatatca

SEQ ID NO: 915242 - DNA, 4001 bp, Homo sapiens
ttttttaaccttcctgtgccacatgtttgaaaagaaagaaaaaataagtattgctttagggactccttggttgttgagagggtttaatgacttaaaaaatcaggtgttaacaagttatcatatctgcattgggatttttcacagaacaaatacacatacatcttagcatagaataggtcagaatgttaccagttatattatagattcttgaagaaccttctaaagtaaattttaatcaacttgaaatataaattaaattagattagatttaaaaacatatgtagctcttcgagagataaatagataaagtaagtatgacatacatatggctttcctatacttagcttaaatgaggaaataataaaaaagctttcaaggacctaaggtggcaagaactatgatagacgctggagacgtggcaataaaccacatgtacgggggaatcttcatgaagactgaagtccagtgtaggttgaaggcaagtacaaactagaataggaaaatgcaaagcagatgatatattggattgcacaattataacacatacacggatatgtaacttatattctgaaattttgattatgttgctaaagaagaaatacagcagacaaatgaggtaaatagatgaataaggcagaaaagagattgctgcaggctaaaattacagctatcatattgcaataatttatgttgttattgaaaagacagaataagggagattggtatcacttttggaagatggtattttcattatggttgagaactgagctgaattttatcaattgtgtaaaagaaaagaggtaagaacatggggctggcattaatgagtctatgtactcatgtcgattttagtatttatattaatttgtgtctcattgatacatatgagttaaaaccccacatgggaaatgacatcaaagggtcatgaaatgaaaaaataatggtaatataatctcaccaaatggtaaaaattattgacagatgcattaaagtgaaagacatccattcatacaatgtaacagtccactacttaggattaatatatcatcttcttattattactgtttacaataatgttcttctctgtagcattttcttcagggaaacatggacatctttattcctcaggctataaatcagagggttcaacatgggcacaataatagtataaaacacagaggatactttcccctggtccatggagctgattgaagatggctgcaagtacatgaatgctgcagatccaaaaaagattacaaccgccaacatgtgggagctacaagtgctgaaggctttggacctgccctcagtggagcgaatgtggaggatgctggcaataataaagatgtaagagcaaaggatggtcaggctggggacaaggatgttaaatgcaccaacacatagaataagtagtttgttgacatagatactagagcaagagagctttaggaggggaagaagatcacagaaataatggttaatcaaatcaaatttgcagaattgaaccctaaacatacagcctgtatgaactgatgcacaaaccaggcctattatatacacccctaaaatcagagaaaagcaagccttattggatatgatgacactgtacagcaaggggctacagatggccatgtaacggtcatacgccattgcagccaacatgtgacactctgcaatagcaaaaacgaggaagaagtagagctgagtcatgcattcagggtaggagatgatgttcttctctgtcacaaagttcaccagcatcttaggggtaatgacagtggaatggcagaagtcaatgaaggacagactgctgaggaaatagtacataggggtgtgcaggtgagaactgagccaaatcagtgtggtcatgcccaggttgcccaccactgtgaccacatagattcctaagaacaggaggaagaggggcagctggagctctggctgttctgagagcccagccagaatgaactcagtcactgaggaattattttctcctgacatctcctccagtcagtttctgcaggaagagaaaaaacaaaacaaaaaaaccccatggttgtgggagggactttattattcttcattgagaaaaggttcccagatattcatgctttaggtatcccctttgagtaagtaaagtttacctcaaataatatttatttaatcttattttcaaatataataaatgtgtttcatgtaaaatattttagccatttttatcattgaacactttctaagtatccctttcttcttttaaatatttcagtgattttaagccaatatttctaagtttagactcactaacttaaatattaatataagccaatataaatgagttgaactcatgacaacttggagagaacaaaccttgcctaaggatggtaaactttaattacctgaaactaatttctgggaggggtgaacagagatattactgtcagatttttccatttttaatgtaattatcaagaaatctcgatttatacataaaattttcatattttaaaatattattactatgaaacaatctctataacaataattgtataaatttaacacgagctggactggcccacagttatctggtttatggtctctggaccaagcacttctgccattatttgagggaagctgtgttagtagtggttaaatggacaggccttaaactcaaagtgcctatgtttgctttctgactctatcatttactaatgatacccgtggataagttaaataacccgtttgtgtcttgactccaaatctgtgaaagataaataaaaatattacctacctattaataaaattggcagacttattaatcagaaagtaagcaagatcatcattgtatttgttacctattcatatcctgtcaattggaaaataagccattttactcattcaaattacagaaacagataaaaatacctccattttttttctcttcttttaacttttgtgaattaggaagaagtacaaaaaacaggcatacatttagaatatatggaatttaaaatatagttatttattctgttaaactatgatcaggcaaattactcattgcatgtgccaaagtaaaattccaaatggcttagagttaaattacaaagaatattatatatggaaaacctaaaaatgtatatcttacttctataaaaaaactaaaatacagatataaacagaaaggctaaactataaaatatctggaagaaaatgctagagaaattctttgagattttaaaatttaagctttcttagaaaggatacacacacacacacagacacacataaacaaaacccaaagcaaacaaacaaaaaaccatacaaatacttaatttgtatgtcatcaaaattaaaagctgttcttcaaaagatagtattaagaaaatgagaaggcaattctatggaaatacatatatctgaaaaagggcttttattcaaaatatagaaataatatttacaattaatatgaaggcaagaaaattttaaaaacaggaaaatatccgaacaaattccttacaaaaatatgtatgaatagtccttaagtatatgaaaatatgctcaatgtcagtcatcaaagaaatgaaagttaaaaccatagtgatacagctctgcacacctgtattggaatgggttaaatgaaacaactccaacaataccaaatgttggtgtgaagtaactggacttataaaatttgggggaggtgtaaaattgtccaaccactttggaaaagatgttggcaatttagtataaatttaaacagacactgtgcaatataataattctgctcctcagtacttacccaagaaaaatgtaaacgtttgtctacatgaagatttatacaaaaatgttcatgacagccttattcataagagccccaaactggaaaaaaccaaaacattatcaacagatgaatacataaatgagatgtagtatacacctatactacaattctctctccctctctctcttcctctctctgtcttatatgcacacacacataaaat

SEQ ID NO: 915243 - DNA, 4001 bp, Homo sapiens
ataaaatgacaatggtttgtaaattataaggcaaaaaagtatgaaccacatggaaacaatgcaacttagaagaatttacggctgtcatgagttgcctcataaacagccaaagcattactgacataaagatgaggcaatgttgtgtgggttgtttttatacaaaattgttgctatcaagtataataatattataaatatctatagtgtatgtctataataaaaccataataattttctggttttgatctatttttcattgatcaatacaaatttggaagactttgattatgtttattatagcaaatgaaacaaaagtaaattatcctggagctatccagaggacagcgatgcagtcatgttgggaactggggaagcttgatgtttggaagggatttctcaggagtccttacacctatccacaagtagctggaccaagtatcactttgaatagtatcacaagtccttaagccaaactttctactctcaatgacttcttaggtttggggctctgagcattcactcaaaaaataagccttatttacttattgggaaataatactacagcttcccctgaaggaatactgtaaatattaaataaaattatccacttaaatgttaggacacagtgcttgctatttcatcacatctgaatgatatatgccactactagcatcttcattatcatcttattgtgattatcattgttgtgcgcattgttatttttattattaatgaaatgataaaaatatggcttctttaaacctcaagagttttgattttatttttagtatttctccacacatactcattggaatatacgttcaatggaagtagactgaaggaatattttggaggtgtgttacataaaagagcatcactatattttgataaatttgcacaataaatctaacatattacatatctaatcaaactgaaagcctgttttgatatgacaacatggcaataattggattcatgaacatgctttgctgtccagatttttcttcagggcaaatttgacatccttatttcttaggctatagattgggggttcagcatgggcacaatagtagtataaaacacagaggacactttcctctggtccatggagctgacagatgatggctgcaggtacatgaatgctgcagacccaaagaaaacagcaacagccaagatgtgggagctgcaagtgctgaaggctttggacctgccctcagtggagcgaatgcggaggatgctggcaatgataaagatgtaagaagcaaggatggttaaggcaggcgtcaggatgttaaatgcactcaagaccagaaccagtaattcattgatgtaggtgctggagcaggagagccccaagagagggaagagatcacaaaaataatggttaatcacattagtcttgcacaaaaagagtctcaacataaagccggtgtgaattgtagatccaaggatgcctaaaacgtaaactcccactgtgagccagaagcagtggtgataggacatgatgacattgtacagcaaggggctgcagatggcaacatagcggtcatatgccgttacagccaacatgtgacactctgcaatagcaaaaatgaggaagaagtaaagctgagtcatgcattcagggtaggagatgatgttcttctctgtcacaaagttcaccagcattttgggggtaatgatagtggaatggcagagatcaatgaaggacagaccactgaggaaatagtacatgggggtatgcaggtgagaactgagcccaatcagtgtgatcatgctcaagttgcccaccactgtgaccacatagattcctaagaacaggaggaagaggcgcagctggagctctggctgttctgagagcccagccagaatgaactcagtcactgaggaatggtttcctgctgacattttcctttggtcagtttctacggaggaaagaaaaaccatggtgtttgtagggattgagttgctattctacttttggaggagggtatcccatgctgaggattcatgatttagatgactttggtttatatataataatttaactctgggtaaattagctaagtaatatttttattaattaaatattttatagcttaatatcaaatagttgttttttatataaaatatttcagccataattattatcatttaagaattttaattgctactctctgggttgaacattccaaagatttcaagtcaacttttctgagctgtttttcgcacacttaaaaacttacaagggctaatgaaaatgatggaagctggctgagctgccactgggagagagcagacctgcattcagtacggtgtcctttattaacgagcagagaagttctgccaagggtaacagaggtgcattatggctacatctttggaggattttaatgataatcaggcaatttaggtttctattaaaaattatcagattttcagtattattattaaaatgaaatggcaccaacaagattcatgatacagatctaccagtggaattgtcccactgcagcagtgttatggctcttggaccaaatattacacctctgcctttgttggaggaaaacagtgggagtagcggctaaataaaaaatccttaatatcaaagtgcctgtgttcatattctgatcctctcatttaccagttgataagtgtggacaattaaattaacatcatcatctaattagcagatatttagcactctgaaaatgacaacaataattgttttcgttgttgttccaccatccatcaattggaaaatgagggatatttatatacttcaaaatacaaaaatagtaaacatgatgttcacacattttcattaatctctttcctctttctttaattaggagtgtgccaaagatggagttataaaattaggaaatatataaatgtagcctctgttatgcactaaacaaaagattttgtcatttgatacattaatgtaaaattccaaataagtcatacttgaattttaaataaagtagaaacagaaaatctaaaatcttctatctcacacccatgcaaacaagaatattgaaataaatcttaaatttaagcataaacaataaactattaaactttaggaaaaaacactagaggaaaatttcaatatagtggagtaatccaattagattccttaggacatatatgcacacatgaattagccatataacattgataaatccttttttatcctaattaaaagcacatctccaaaggtaccattaaaaaagcacaagattatgtccattgcagggacatgaatgtattatccttagcaaaccgacacaggaacagaaaaccaaataccatatgttctcacttctaagtgggagctaaatgatttgaacacatgaccacttggacacatagagggggacaacacacactggggcctatcagagccagtggaaggtgggaggagggaaaagatcaggaaaagtaactcacgggtactgggtttaatacctgggtgataaaataatctgtacaacaaactcccctgacacagtttacctatgtaacaaacctgcacatatacctctaaacttaaaataaaagttaaaaaaagaaaattaagagtaagccacaaaaaatacgtatatctgactatggccttttatgtaaatatatacaaataatatcaacatgtcaatgatacaaagacaatagaccaaattaaaatataagaaaagtatttgtatagatgatatatgacagaagatatgtaaatagttgataagcacgtaaaaagataccaaattcattattcatcaggaaaattacataccactacacagccacatggaaatggctaaaaattataaaagaaagaaaaaacaaaataaacaaaaacttacagttccaaagtttgccaaggatatgggataactcaagctctcacacatagctggtgaggagaggtgtaaaaccgtacaactacttcggaaaactgcttggcaatatcttagaaagttaatcatatacttagatta

SEQ ID NO: 915244 - DNA, 4001 bp, Homo sapiens
tactaaaaatacaaaaattagctgggcgtggtggtgtgctcctgtagtcccagctacttgggaggctgaggcaggagaattgcttgaacccggaaggcagaggttgcagtgagctaagattgtgccactgcactccaacctagtgagaaagcgagactccatctcaaaaaaaaaaaaagaaagaaaaattcaaaggcctaatatgtagcaggcactcaactatgaattggagatgtagcagtgaaccatatgtccaagggatttctttcatggaggttactgtccagtacaggatttaaaaacgagtaggcaattaacaactagaataatagatggcatagcaagggtatactagattgggaacaattaactgcatgtacatggatctgtgattcagattttaaagttctgattagattttgcctttaagcaggagagagaggaaataacctcaaagaaacatatatgggatgggataatgtgtaataggcttttctaggctaaacatgtgcaaacactaaagattacaggcctaccattgctatggcttatgctgtttttgagtggatagaaaaaaaacagattgctagtcatcaccgcatgatagtattttatcaccagaagatagtgtttttattatgttgaggagtatgttttaatcaattacatgaaagaaaagggggaagggaatgtaactggcattatcaggttatgccactatttcactatgtcaatcttattatttcttctaagaaaatatcatgtcttcgtaatccttatgagagaaaaaatgagagggaaatggcatgaaatagaccatgtgcataagacataacgtcagtaaaatccccccaaattagaaagaatgttgacagatgcactaaagtgaaagacatcatttcatacaatatcatagccaaaaacttagatctaatgcaatctttttcattgtacttctgttcataagaatgttcttttccctagcgttttcttcagggcaacgtggacatctttattcctcaggctgtagatcagggggttcagcatgggcacaacaatagtataaaacacagaggacactttcccctggtccatggagctgacagatgatggctgcaggtacatgaatgctgcagacccaaagaaaacagaaacagccgagatgtgggagctgcaagtgctgaaggctttggacctgccctcagtgtagcgaatgcggaggatgctggcaatgatgaagatgtaagagctgaggatggtcaggctggggacaaggatgttaattccactaaagattaaaatcagtaactcattaatgtaagtactagaacaggagagcttcaagatagaaataagatcacagaaataatggttgatcacatcaaatttgcagaattgaaccctaaacatacagcctatatgagctgacgcacaaatcaggcctattacatacaccactaaaatcagagaaaagcaagccttattggatatgatgatgctgtacagcaaggggctacagatggccacgtagccgtcatatgccattgcagccaacatgtgacactctgcaatagcaaaaacgaggaagaagtagagctgagtcatgcattcagggtaggagatgatgttcttctctgtcacaaagttcaccagcatcttaggggtaatgacagtggaatggcagaagtcaatgaaggacagactgctgaggaaacagtacataggtgtgtgcaggtgagaactgagcccaatcagtgtgatcatgcccaggttccccagcactgtgactacatagattcccaggaagacgaggaagaggggcagctgtagctctgacttctctgttagcccaaccagaataaacttagtcacaaaagaatggttttctgctgccattctttgatgagtttctgcaggggagagaaaaaacatggtatttaggtgaattgtattgttattctccttttgtaggaaagtgatcccttgtttatatatgatcatttaactccggttcaattaactgaatcataatttatcccaatttagcatgtagtaatctttattttctagtaactggtattctatatgataatattttacctatgtttataataattaaaaactttgagtgtctattttgtattttgaatatttcaatgatcttcaagtcagtatttttaagctaatacttgcaaacttaaattcttagagaagccagtgtaaataagtaaaaatggctgagtgacaacttggggagaacaatccctgtctacagacagtaacctctaataacctgaaactaatttctgtcagggatgaacagaaatcttattattgtcagacttcaatgttttatgtaattatcaagaaatccagatttgtacatcaaacattcatattttcagacattattaaaatgaaacaacatttacaatgatcattgtgaatatctatctgctgcagtggccataattatacagtttgtcatctctgagctacagggaagtatctctgacatcccttgagggaaacagaatgagtagttgttgaatggacaggctctaaagtcaaagtgcttgtattcaaattctgaccccgtcatttactagccaatacccttgagcatgtaaaatagcctctttgtgtcatgactttcaaatctgtaaaagagaacattattaacctattaataataacattttcagactcataaatcagtaagtgaagaaggtcaatcttatgttgttaatgtctattaagcgtgtaaaaatgggaagatagtaagaaattactgatttcaatgtacagaaacagcaatcttactacctcagtatttcctttgattttcttcaacttttgtgaattagaagggagtaaaaagtagagacacacaattaaaaaacagaattacaagtgtgatcccctttctgttaaacagtgaatagatgatgtagctattccattcactaaagttacatttcaaatgaatgagtcaaattatttaaaaaaatacaaaatttagaaaatctatacatttcttaacacatttctacaccaaaataaatctgaaataaatcagacctgagcataaaactaactataaaacttctggaaaaacaactgataaaatccttgatatcttggaaaagtttatgatttcttagaaagaacatggattaagctggaaaccatcattctcagcaaactatcgcaaggacaaaaaaccaaacactgcatgttctcactcataggtgggaactgaacaatgagaacacatggacacaggaaggggaacatcacacaccagggcctgttgtggggtggggggaggggggagggatagcattaggagatatacctaatgttaaatgacaagttaatgggtgcagcacaccaacatggcacatgtacacatatgtaacaaacctgcacattgtgcacacgtaccctaaagcttaaagtataataaaaaataaaatattttttaaaaagcaaaagaaccaaaaactaacaatgtttcgattatatttcatcaaaatgaaaacaaaattaatgacattaagaaaatgaaatggcaagctcaaggtaacacatatgcctgacagaggacttttatctaaaatacgtaaataacatatgcaaataatagtacacagacaaccaaatattaactactagtgaaatatcagaagagctatctcacagaaaagatatatgactggtcagtaagtttatgaaaatatatccaatgtttttagtaatcaaggaaatgaaaattaacaccataatgagacactacaaaccatgatagaatagaaaaaacaaaacaaaacaaaaacacctgaatatatcaagtgtcaggagcatctctacttgtcatacaaagctggcagggagtgtgaaattgttcaactgttttggaaaagagtttgccaatttcttataaacttaaacagacattaaataaatccagaattctgcctcttagtatttacccaaga

SEQ ID NO: 915245 - DNA, 4001 bp, Homo sapiens
tttttcctttttagttgcttgtgtgcctgtaaattaaattaaccaaaagtaatttgtaaaacacaagtgaatatccttcacaaaaggcattgtgctggaatgcaagtcttctaatgagaataggcagcattgattattgtcaccttaaatactttacagctactctctgatcaaatttggagttattatttatcttgtgcacttaaggaaagagagttttaaattttaggtaacatattctgggttgtatagctgaaaatgtagcatatttagaatctaactcttggaaaactttatttcaaaacagtactcctaaagactctgttataattcttccccatataataaatgaaataacttctgagactgttatcactgtgccccaaatcgttgttttccataataaatttacctacaactgaagtatgcataggaatttgtgtaatataattttaaaggacaaccatattttcttattttccacatcagttgcttctaaaaacatatatttagactgtaaatatgacacacatattattattttttgttttgttttgttttgttctgttttgttttgagacggagtttcgctcttgttgcccaggctggagtccaatggcacgatctcggctcactgcaacctctgcctcccagattgaagcgattctcctacctcagccccgcaagtagctgggattacaggcatgcaccaccacacccagctaattttttgtatttttactacagaccacatttcatcatggctaggctggtcttgaacttctgacctcatgtgatccacccacctcggcctcccagagtgctgggattataggcatgagccaccgtgcccggccaacacatattatgatttctaattacaatctggatttctgaaaacatacaccttgaaatgttcaagatcacgtttagtcaagcaaaggttagcacaacagaaatgcaaacatgaaggattcaattgtttttatagggagaccaaggacataccaaatagaaaagaaagaaaagatgagtttaaatgttcagcattcctgctattttaattacctggagtcctgtcttctctgcatgactctaatgagagcatttttaacttctttgtttctaagactataaatgagtggattcagcatgggaatcacaatagtataaaaaacagaagccacttgatcccttcccaaagaataagactttcttggttttaaataagtaaaaatcatagttccataaaagatggtgactcccaagagatgagaggcacaagtagacaaagctttctgctttcctgaagtggaattaattttcaggatggtagagagaatggacacataggatgcagatattgtgataagggacaccatcagggtggaaccagctaaaatgtgtatcatgatttcaatgtcgtatgtgtccatgcaggacagagctaaaattggagacgtgtcgcagaaaaagtgacgaactacatttgagtcgcagaaatgcagtctgctcatccaaaccacattgacaaaggagttgataaagctaatcacatagggcccagtgacaagagcgcaacacagccttttggacataataactgggtaacgtagaggactgcagatagctacgtagcgatcataggccattgatgagagaagaaaacattcagcagctcccaagaagacaaaaaagaacatctgggcaaagcagcccatgaaggaaatatagttggaagtcagtaagttcgctaaggttttaggtgtgatgacagttgagtaactgaggtcaataaatgacaagtgagtaaggaaaaaatacatgggagtgtgaagctggaggtccaggcggattatcaatatcatccccacattgcccagcatagtaattaggtatatcaggagaaatagtataaagagggccatctggacctcttcagaatctgacagtcccgtaaggatgaagtcaggcacatttgtgttatttcttctacccatgatgttcaattgctttaaactgctgagaaatcaaagttgatacttaacatgaatgacttcaaaaggtttctgattatacaataacctagcatttaattcatttagtgtttctataaattgctaatacatttatagaatgtgaccttaaaacggaattatattgccaatgtagataaaagtgtaaattaacatttagatgtgatataataaaatgtaacatattgcataattagaatgaacctgaccttgttctgaatgccttcctttattaatacatttaatccacaagaaaatactatgccatagatactactattatcgacatattttagccgagaaaaaaagagtatggaaggtttgagtaacttatccaaagtcagaacaattaaatgttgacgctgattctgccaacatatgttgacttcagagagaaggcttataatactatactcctgtttataaataatttcagaaaacctgagaaagagctaaacatgtaataaacaatgagaggaaacagtttttaatagattatttactgcccctttgtttctaatattatttaatggtaattttaaataaatttcacacttaaggattttagcaggatacattaaaattatagaccatatataagtattaatttatacaaatatgatgttttagtaacttaaccaatcaaaatcaaatttcttccaaaaattatatgatcaaaatatgtactttgcttgtagactctgattccatcaactctacatatctcttttcacaaacccggacattactcagggtaaggactagatgacatgtatatgtatattcttatgataaagtcctgaattaatttcatctgaaataaaatcttccaattttgagaataatacttaccgtgtctgagccaaagttggtgaaaaagctttcttctcatattatctgtctagaaatttgtcaacctcaatttttcttataaataaaatatgaaaaccatttaaggagataaaattttctccgatataatatttgttttccttgagataagttgtttttacatttttgtgcattcattttgttttattctgtgtcaaaaaaccaacctagaaatttcgtttaggtcctggtcaaatggaaagattaccaggaagttgtgtgtcaaaagaacactgggaatctctgtgactataggtagattattctttacctctcactctgataattccagagtacctaatatatgaggggctgatgataatgcaccttttggtagtccctgtggaccaatttccaatgaagaattgcttggtatgtttccaaggataaaggtgcaaggaataaaacagccacgatagattttgagcaaaggttttcctttttaccttacaagccacacaaatgaaggaaattatggattggtcttttcttgtgatgttttcaatattttactgggatggtggagaagccatttccagaaaaataattattctctgacaccatcaaagatggaataacacatttttttcaattaaaattttgtatatttaaatgtatgatactatcatagaagtaaacatgttaattagaaaagaatcggccgggcgcggtggctcacgcctgtaatcccagcactttgggaggcgaaggcgggcggatcacgaggtcagtagatcgagaccatactggctaacacggtgaaaccccgtctctactaaaaatacaaaaaattagctgggcaccgtggcgggcgcctgtagtcccagctactcaggaggctgaggcaggagaatggcgtgaaccctggaggcggagcttgcagtgagccgagacagtgccactgcagtccggcctgggcaaaagagcgagactctgtctcaaaaaaaaaaaaaaaaaaaaaaaaaagaatcagaatataacaaaattcaaaaaagaaaatgaaaataattctaaactgttaacattttgtaaacagtataatttttactaattattttcttttgtgcacttaat

SEQ ID NO: 915246 - DNA, 4001 bp, Homo sapiens
gaaaatcagtacatggaaagtgatacaaattttgtttatatgtgttatatacatgcacatatttgaaactattgatctagaagaacatgcacaaaactcaatatttgtttttctaaaactgaaaatgggtttattagagaagtaaagaaaagaataatggctacccccacatcaagagcagccaaaactcaatatttgtagaggatttctattttcttcaatattttgtaatatttttcaaattttctccaacattatcttaatataggctatttttctataacttaattctactgaaatattttgcttctgaaatccaaaattgtgagctgctgatttttgttctttttagttctgtcaattaaattaaccaaaaataatttgttaaacacaagtttacattcttgaaaaaaggctttgtgcagtaatgtaggtcttctaatgataatgggaagcattaattattattgctttaaatactctacaactaccctctgatcagatttggagttattatttatcttgtgcacttagggaagggaggcttaagctttaggtaacgtattactggctatacagctaaaaatgtagcatatttagaatctaattcttgggaagttttattccaaaataggtactcctacccactctgctataattcttccccatataataaatggaataacatctaaaactattatcattgtgtcccaaatagttctttccataataaatttatctacaattgaagtatacataagaatttgaataatataattaaaaatgacaaccatattttcttattttccacatcagttgcttcaaacacatatatgtagactgaaaacatgacacacatattatgatttctaattaccatttggatttctaaaaacatatgccttgaaatgtttaaaatcatgtttagtgaagcaaagggtagcacaacagaaatgcaaacaaattaaaagattcaattgtttttatagagagactaagaaaatacccaacaggaatgaaagaaaagatgagtttaaatgttcagcattcctgctatattaattacctggagtcctgtcttctctgcatgactctgatgacagcatttttcacctctttgtttctaagactataaatgagtggattcagcacgggaatcacaatagtataaaaaacagaagccacttgatctcttcccaaggaataagactttcttggttttaaataagtaaaaatcagagtgctataaaagatggtgactcccaagagatgagagacgcaagtagagaaagctttctgctttcctgaagtggaattaattttcaggatggtaaagagaatgaacacataggatgcagatattgtgaaaagggacaccatcagggtggaaccaacaataatgaatatcaggatttcggtgttgtatgtatcagtgcaggacagagctaaaattggggaagtgtcacagaaaaagtgatgaattacgtttgagtcgtagaaatgcaatctgctcatggaaaccacgttgacaaaggagtctataaagccaatcacataaggcccagtgatgagagcgaggcagagccttttggacataataactgtgtagtgtagaggactgcagatcgctgcatagcgatcatgggccattgaggagagaaggtaacattcagcagtacccaagaaggcaaaaaagaacatctgggcaaagcagcccgtaaaggaaatatagttggaagtcagtaagttcgctaaggttttaggtgtgacgacagttgagtaactgaggtcaataaatgacaggtgagtaaggaaaaaatacatgggagtgtgaagctggaggtccaggcggattatcaatatcatccccacattccccagcatagtaattaggtatatcaggagaaatagcataaacagagccatctggatctcttcagaaagtgtcagtcccataaggatgaagtcagccacatttgtgttattccttctacccatcatgttcacctgctctaaactgctgagaaatcaaagctgatacgtagcaggggcgcctgtaatcccagctactggagaagctgaggcaggagaattgcttgaacgcgggaggcggaggttgcagtgagccgggatcgcaccattgcattccagccctggcgactgtgccagactctgactcaaaaaacaaaaaacaaacaaaaaaaaactttctgtttatatgaatggcatatcatttaaaaattagcttagccttctataagttgctaataaatttatagaatatgactaaagaaactaattttattgccaatattgatgtaagtacaaattaacatttgcatatgttacaataaagtgtagcatgtagcatattgcataattagaatgaacctgacattgttctgaatgacttcctttattaacacattgaatccacctgaaaatagtataccttagatactactattatccacatagtttaggtgaggaaaaaaagagtatggaaggttggagtaacttattcaaagtcggatctattcaatgttgacactgattctaccaagatatattaacttcagagagacggcttataatactatactcttgtttataaataatttcagaaaacttgagaaaagagctagacatgtaataaaaaatgacaggaaaccgttttattatatcatttactccccttttgtttccaatattatttaataataatttccaataaatttcacccttggggattttagttagctacattaaaattatagacaatatataagcattaatttataaaatacgtaatgttttcctgacttaactaatcaaaatctaatttcttccaaaaattatattttcaaagtatatactttgcttgtagactctgattctgtcaactctacatttgtttcaaaaaccttgacattacttagggtaaagactaaatgatatgtgtatgtattaatatattattctgataaagtctgcattttattccatctgaaataaaatctggaacaatatcttccaattttgagaataatacttactgtgtgtgagtcaacattcattaaaaaggtttcttcttatattatctgtctggaaatttgtcaacctcaaatttttgttataaataaaatatgaaaactgaggaaatgaattttttataatatttattttacttgagataagttgtttttacattttggtgtattcattatgttttattctgagttaaaataaaccaatctagaaattttgtttaggttctggtctaatggaaagattaccaagaagttatttgtcaaagaagaccagcagctactgtgaccacaaggagattattctttccctctcacttggataattccagaggatctcatataccagaggctgatgacaatgcaccttttggtaggccctggggaccatttgccaaggcagattgtttggcatgtttccaagcacaaaagttcaaggactaaatgtagcctatcttggtgttttcttgtgatgttctcaatattttacaggggtggtggagaaggcatttccagaaaaaatagttactctatgactgacaccatcaaagatggaataatacatttttcacaattaaatttttaaatatttaattgtgcaattttaatttcacaattattaaaaataattaaaaatcataatcataaataataaattattttgatttatttttaataaatactgaaaaataataaattaaaaaataaattttaacagtatgatactattatagaagtaaaacaattaattagaaaagaatcagaaggtaacaagattcataaaagtaaatgaacacaattcaaaactgtcgttattttaaaattataatttttcctaattattttcctttgttcatttattgcttatttgtacatgtactgaaagattgcataacaattattgtactatatattcagtgtcttttgctcatttaataaccaaaattttatgct

SEQ ID NO: 915247 - DNA, 4001 bp, Homo sapiens
aaacttgtaaatgaatacagaaagctgaaaatcagtatgtagaaagtgatagaaatttttgtttatatgcgttatatatgtgcacgtatttgaaactattgatctagaagaacatgcacaaaactcaatatttgtttttctaaaactgaaaacgagtttattagagaagtaaataaacaaaagaatggctactccacaggaagagcagccaaaactcaatatttgtagaggatttctattttcttcaatattttataatattttcaaattttctctaacattatattaatataggctattttttctataacataattctactgaaatattttacttctgaaatccaaaattgtgagctgctgatttttgttctttttagttctgtcaattaaattaaccaaaagtaatttgtgaaacacgagtttacattcttgaaaaaacgcactgtgcagtaatgtaggtcttctaatgataatgggaagcattaattattatcgctttaaatactctacaactaccctctgatcagatttggagttatttatcttgcgcacttagggaaaggaggcttaagctttaggtaacatattaatggctacacagctaaaagtgtagcatatttagaatctaactcttggaaaattttattccaaagtaagtactcctacccactctgctatgattcttccccacataataaatggaataacatctaaaactattatcaccgtgtctcaaatattctttccataataaatttatctacagttgaagcatacataagaatttgaataatataattaaaaatgacaaccttattttcttattttccacatcagttgcttcaaaacatgacacacatattatgattctaattaccatttggatttctaaaaacatatgccttgaaatgttttaaatcatgtttagtcaagcaaagagtagcacaacagaaatgcaaataaattaaaggattcaattgtttttatagagagactaagaaaatacccaataggaatgaaagaaaagatgagattaaatgttccatttctgctattttaactacctggagtcctgtcttctctgcatgactctaatgagagcatttttcacttctctgtttctaagactataaatgagtggattcagcatgggaatcacaatagtataaaacacaggagccacttgatctcttcccaaggaataagactttcttggctttaagtaagtaaaaatcatagttccatagaagatggtgactcccaagagatgagagacgcaagtagagaaagctttctgctttcctgaagtggaattaattttcaggatggtagagagaatggacacataggatgcagatattgtgataagggacaccatcagggtggaaccagcgataatgaatatcagcatttcagtgttgtctgtgtcagtgcaggacagagctaaaattggggaagtgtcacagaaaaagtgatgaattatgtttgagtcacagaaatgcaatctgctcatggaaaccacattgacaaaggagtccataaagccaatcacataaggcccagtgatgagagcgaggcagagccttttgggcataataactgtgtagtgtagaggactgcagatcgctgcatagcgatcataggccattgaggagagaagataacattcagcagtacccaagaagacaaaacagaacatctgggcaaagcagcccgtgaaggaaatatagttggaagtcagtaagttcgctaaggttttaggtgtgacgacagttgagtaactgaggtcaataaatgacaggtgagtaaggaaaaaatacatgggagtgtgaagctggaggtccaggcggattatcaatagcatccccacattccccagcatagtaattaggtatatgaggagaaatagcataaacagagccatctggacctcttcagagtctgacagtcccgtaaggatgaagtcagccacatttgtgtcattccttctacccatcatgttcacctgctctaaactgctgagaaatcaaagttgatacgtagcaggggcgcctgtactcccagctactggagaagctgaggcaggagaatcgcttgaacatgggagccggaggttgcagtgagccagaggttgcagtgagctgggatcacactattgcattgcagccccagcaactgtgccagactccgactcaaaaaaaataaacaaaacaatcaaaaaaaatttctgtttatatgaatgacctagcatttaataattagtttaacattctacaaattgctaataaatttatagaatatgactaaagagactaattttattgccaatatagatataagttcaaattaacatttgcatatgttataataaaatgtagcatattgcataattagaatgaacctgacattgttctgaatggcttcctttattaatatatttaatccacctgaaaatattataccatagatactactattatccacatagtttaggtgagggaaaaaaagagtatggaaggttggagtaacttatccaaagtcagatcaattcaatgttgacactgattctacaaagatatattccttcagagagaaggcttataatactacaatcttgtttataaataatttcagaaaacttgagaaaagaggtggacatgtaataaaaaatgagaggaaacagttttattatataatttactgcccttttgtttccaatattatttaataataattttcaataaatttcacccttggggtttttagtcaggtacattaaaattatagacaatatataagtattaatttataaaagatgtgatgttttcctgacataactaatcaaaatctaatttcttccaaaaaattatattttcaaaatgtatactttgcttgtagactctgattctggcaactctacatttgtctcacaaaccctgacattacttagggtagagagtaaatgatatgtgtatatattaatatatacattaatatatattaatatattattctgcgaaagtccccattttatttcatctgaagtaaaatgtgaaacaaaatcttccaattttgagaataatacttactgtgtgtaagtcaacattcatgaaaaaactttcttcttatattatctgtatggaaatttgtcaacttcaaatttttgttataaataaaataagaaaactatttaaggagatgaaaatttttataatatttgttttccttgagataagttgtttttacattttggtgcattcattatgttttattctgagttatgataaaccaatctagaaattttgtttaggttctggtctaatggaaagattaccaagaagttatgtgtcaaagaagaccggcagccactgtgaccataaggagattattctttccctctcactcggataattccagaggatctcatataccagaggctgatgacaatgcaccttttggtaggccctgggggccatttgccaaggcagattgtttggcatgtttccaagcacaaaagttcaaggactaaatgtagccatgttaggctttgtgcaaagattttcctttttaccttagaagccacacaaatgaaggaaattatgaattggtcttttcttgtgatgttctcaatattttacaggcgtggtggagaaggcatttccagaaaaaatagttactctgtgactgacatcatcaaagatggaataatacatttttcacaattaaatttcttaatatttaaaagtgcgatactatcgtatatgtaaaccatgttaattggaaaagaatcagaagataacaaaattcaaaaaaagtaaatgaaaacaattcaaaactgtcgttaacattttgttaacattataatttttcctaattattttcctttgtgccttatttgtacatgtacttatagatggcataacaattattgtactatacagtcagtgtcttttgctcatttaataaccaaaattttatgctatgccatgagctatctta

SEQ ID NO: 915248 - DNA, 4001 bp, Homo sapiens
gtataaatccaaaatgatctagggattatgcctcagctagtgagacattctatgagaaattaaactctgctgtttttattagaaaaaaatgccataaactgatcacttttctatgtaaaaaaaattgtgttcatacatacatgatcaagaacttaaccgttaggggcaaatgactccatattatcaagagatttctccatactgcctggtgtctgttgttccattagtgtttgcactgaaattacttcaatcgtttatttttccctgtggctaatattgcttttttatttttgtttgtttctttagttccagactctttgctttcgggtgatcagcattttatattttttgtaaaatttaactgttcttatctcttaatcttccaatttcttattctcaatttactagtagctgagaaaacagtgtaagtttatattgccaatttaatatttttttttactttttaaggtttttttatttttaatttttgtgggtacatagtagatgtctatatttattgagtacgtgagatattttgaaacagacatgcaatgtgaaataagcacataatggagaatgggttatccttgttatcaagcatttatccatcgagttattatgttggtgcaaagtaattgatgtttttgctgttttcttttttaatgacaaaaaactacaattacttttgcaacaatctaatacaaacaatccagttatgtgatataagctgggcacagaatgacaaaaattgcatgttcttaatgtaataattttaaacatgtttcagtgtgatggcatgcttatatatgcatgttcaggtgcctcttatttccttgtacatgtctatgtctgaataatttatatgccgaattgacctccaaatacagtgagttagtggtccatataaacaaatgaaataataattcaattcacaaacttcaagactctaagttctcatttagtttgtgttatgctttttgaggttactctactattttcctagttgttggcataactgaattcctgaagccatccacctttgttttaattgtaacatacataaatttgtcatggaaaaagttttctatgtatgactctcagaagagcatttttcacatctttgttcctcagactgtagatgagtggattcagcatgggaatgacaatcgtatagaatacagatgccacctgcgcctgggtcagcgatgatgtgttatcaggttgcaaataggtgaaaatcagagacccataaaagatagttacagccatgaggtgggatgcgcaggtggagaaggccttctgcctgcctgctgctgactggatcctcaggatggctgagatgatgatgatataagtgactgtgatgataaggagagagctaagaagagtgaatccagctaagacaaagctcaccatttctgtgccgaatgtatctacacaggagagtgctaaaagagctgtggtgtcacaaaaaaaatgattgatgctggaatcacagaacgccaaactgcttatcacccagacagatatcagcgagcttgtgaagcctatcacatatggcattactcccagccagttggacactttttgggacatgactactgaatacagtaagggattgcagattgctatgtagcgattgtaggccattgatcccagaaggaaacactcacaacacaccaatccaacaaaaaagtacatttgaacaaagcagccaacaaaggagatggatctccgattggattggaaattcaccaatgccttaggtgttacagtagaggagtaaaatatgtcaataaatgctaaattgctcaggaaaaagtacataggggtgtgaagctgagaatccattctgattaacgtgatcagtcccaggtttcccaaaacagtgaatagataaatgaagagaaacatcaagaaaagactgacttgtaattcagggtgatttgcaaatccagagaggatgaagacggtaacctcagtgaaattgttgccagccatttacatcaactcaggcctttgacttacctgctgaataacaataaggaaagttagagaaggattcaaatctaaaggccctataatcaaatttgacttagactccaatcatgaaagttttacaaatggaaagtaaaatttaatgacctgaagttagctagagatttacggataatttttattttttataaaactgaaaacttacagacattaatacagaaaaaaactcaaattcacgattgtgtagactaaaaaatacatgtctggaaagatgtgtagaaattcctcctaagatgtaccattctctacccctgtctgtcattgggtctggcaatttatctaatgaaatcaattgtatctaacaaatatagcaaattatcaaatgaaattaattgtatctaatgaatatagcaacttatctaatgaaatcaatctgtatctaataaatatagcaagttatctaacaaaatgaattgtatctaatgaatagagcagtttatctaataaaaaattcagtgagataagaccaaatgagggccttcatctataacatagtttaaattctttcatgtatgtttgttcaaacaacatgattgtttctagatatattgcatatattaatctatgacatcaggtgctagccaattcattgctgaacagcagtttttaagacaatgatataaataaatgttaaaaacagtaaaacaaacctgatttgttacatttaaaaataagaattaaattataaggtgggcatgctagaaactaaagaactttattgcctaattaacttaacataaatatatgacgaataaatgcatttgaaactagcccgccaagcaaagttaaataatcacctttgtttagacatttagcactctccttgagtaaccaaatgggacttgataataattattatcaataataataatataacatattattcttattatatatcacatgtacttaatcatttaatgtgttccatggtcacagtgttcctatttatccattcatttacttgacaagcatttattcaatgaaggcattttgtcttgcctgtcatgaagggcatttttcttaaagcctaatgtaagatgcagacattaaaaaaataacaagtttcccaatgtgagaaacatgcaaactatactcacagacagacagacacacaaattttaggaaaaagcagatgagaaaattagatgtacctgggattcagtcacccagaggaaacatcctatgtttcagcaatctttcacttattttcaagttcattatttttgcctcatctacaatgctaaatatcaaataacaaaagttgttatttagtatagagctctatttcctgtataatggaccctaaatgttatgatgttgatgaaaaaatgttgatggttttgatgatagtattaggtactgtatatattacctttcattgataggctagaaataagagccaaattaacttcttgttaacttgttttttgtgcacattcttgagaattaaaaatttatattttttgctcaagtctggattcctatttagaattgtttttgtcttagtgtatttctaaagcaatcccatgacaaaagattttcttttgaaagctcatgtgttaagcagtattcttatacctgcaacttttcctcaaactcacctaataaaaatgttgttcaattagcatctttgatctcttgagattcatattttaatcatactccagggtctattcttaatttgcctagggtatatctctaatggaagcattaggaaatatatattcctcatttttgtgtttttcagttaaacggcagcagacacattgaaaaaatcaattgatttcgttttaaaaatcatgttattttaatgttattggtagatatatagacgtgaaacatgtatgaaacactaaattattatgaaactaaaggagacatatgatattagggaatctcagatagcatttgtctgtttcccagataaccctcccatgaaatgg

SEQ ID NO: 915249 - DNA, 4001 bp, Homo sapiens
gttctatgtcaaaaattccccatgaagcttattaacatataaatttattgacctttatcttatgattctgatttgataattctgaaatttagctgtgtcccctcatatgcaaagctgtgcaagaaatttaaatgtacgctcagtgaacaagagttatcagaaagcagaaaaaaatttttataaaatgaattttttatttccaattatgtaagaaactttcattaatatgtttcactcaatgtataataatatcataacacaaggcattcattttgtacactaaagaagaataatacttagagtaaggagaaagggacatttgtacagaatccgtggagtttataaatcaaatccagactgaaagcatattaaatatgatactctgtctctcattaaaaaatcgtataaattatattaagtggaataaaattattttaatcttattctggttagcattcaaaatataaattcattgatagtattcatttcattcttagagcaaaattaagaaatcattagaaaattttattttaaatatgattgttagtttaattttgataacttagatgaagaaaaggatcttttaatcaaatttcagtttttcaagatgaattgattgactatacccaactatacctggagggcagtgaaagaagacaaagaataagaaagtcaattttacttctctcatcgtaatattttgcctcattcaaacttatttaactttttttaatttttttttctaactgctggaaaccatttttatttcaaactgtctacctgcttaatcccaggcagaattggtaaataacattttttttttctaacttaacctcacaactcaaagggtttcagtttattttttaattcaaagctccctaaattgtatcttgttgtaattcttatgattgcttacgaacctgtaactcggctacctaccttttctttttcctacattttcttttacataatggcagcttatattaactctctcctcatttacctgtactgtttaaaattacattgttttaaaggaatagcacagatttgtcatgaatctctgtagagcagtcttcacatccttattcctcaggctgtagatcaagggattcagcataggaattaccaacgtgtaaaacacagaagccatcttatcatcagtatccagtgaatggttacttcggggctgcacatacatgaatagcaatgtcccataaaaaattgtgactgccatcatatgtgaagcacaggtagaaaaggcttttttccttccttctgatgaacatatttttaaaatagacaaaacaatattgaaataagatactagaactataatcaaggaaccaaccacatttgttgctgcagatataaagacaactgtttctggtaagtaagtatcagagcaagataatgctaacagaggaacattatcacagtaaaaatgattgattatattagaagagcaataagacacagagaatacataagatgaaaccacaatagctgtagaaaagccatagaggtatgtgagggagaccagcaggaggcagagccgccgagacaccaccaccatgtacagcagagggttacaaatagccacatagcggtcataggccatcaaagccagcatgattacctccgatacaataaagaacaagaaccctcccagttgggtggcacattcatagaatgaggtagttttcttctttactaaaaagttaatcagcattttaggggcaatgacagtagagttaccaagattaatgagagccagatgttgcaggaaaaagtacatgggggtttgaagtcgagagtcaacactggtgagggtgatgatgcccaggttccctgccatggtcagcccatagagcaccagaaagaccaggaagaggggaatctggagctctggacagctagagacacctgtaagaataaactcagtgactctggtgaaattttcaggagccatgtcagagtttggaaattcatctgtttgggggaaaagagaggttaaaaactttaaagaattatttgcaggactgcccttatatggctaggacaattccctgataacatttctttgaattgtttattactctaactcagttattaaactcaagcttctaggtctaataagtaaacttggtaattatttcagagacagaaagatcaagtatggaaacgtatagtaaattaaatagatgatccagcatcatgaaacattttgaggatttacttcctcacagtcttattgaattatgagtacattcttagtttgcaaacatttgaagccacaattaatattttatatcatttgcattaggcatgagaaaggcttgaggtcattttatgtctgcaaataatccaatttctaaatttgagacttcttgctttttcttaggaatgggtgattctaggtactatcctaacccattttctttattcatttcatccttgtataatgtgtattatgcacatttaactcatacattttaccatccatgtctgtttgctttttctctcttttttaaattaactctgactaaaatacatggagatatgccctcacatttatttttcaggtgacaattttttttagctttcaatgtataatattggtgaaaattgtattagttttgtaatttcttggcattatgctttactggatactactttctgttccttctttctcatgtctttttgttggttctgtttcacaagtttttacagctcctcatagttttcactttgtattttatgtttaatcacaatttttatttatataattagatattatttttaccacttataaagtatatctgctctttcagttgatttttattcatcttttttatatttttatatttttatcactgtaatgagtaaatattgttattttatagactttctgtgataactacaatgctcatatttgacatagaatttaaatgctattttaatatggctaaatatttcccttgagttctttatatttaggataatcttctacccctaactaagccaactggagtctctgctacaatttatagttcccctgttgtggacacctggcccaaagaaatcctgtcatagtcacttatttaaaaatgtggagttaagttacagagagttaacactatatcatttaaaatgcctgaattttaaaatcccagcgttgtttaaattttgtctccttgtaaaaaaaaagatacaatgaaaagaaaaatagaaaactatcctgcagtgtgaaaaaagaatgaaatgaaccaaaataattcctaacattgttaatatccgatctcagtttgattctcaaaccaaacatcacactttttcttgtttttcaaaataatcttcttatttatttatttaccacctgtttattgaattcttactctggtaacgtgcaaacttcacataaactagttatcccttgttttatggacctactattccaatgaaaggaaacatacaaaaatctggtaaagaaatgtagaaacaagattattgcacatttcaataataaataaggaaattaaatatgaagatacattatgacaacttgggagaatattttcacatggtatgttatgggaaggtcttttttaattttagcagtttctttttagttttaatttctttttcttcaacttttattttaagatgggaagcccttcttgagaaggtgacatctgtattgagacctaaaggatctgaaagaaccagatgtttaatgaatcataggaagaacattcaaggattctagtggagaatgtatatgctgaaaatactggtatgaggtagaaaataagttaaagcatttagtttttgagggggtagggggtcttaatggaggacagtgtgaatagattataataaggaagaattaggtcacagtgattatttgaattttatttatttcttaattttttttagttgctgttcataagtttattgtctttatctgaaaaatcctcatagaaaattgtttggtttagctt

SEQ ID NO: 915250 - DNA, 4001 bp, Homo sapiens
gaatgtcaacataatcttccatatgtatctttcagtctagttctttatttgtaggatatattcctaagtttcaatgccagaatccccattggcacttttaatatgagttttttgacttttgccttatgatttttatttgataagtctgggatatatcctataagtctgattactcctatatattataagttgtacaataggtgtaagtgtacacttactgatcaaaaactatcagaaaaaaagaacaaaaattcaaaaaatatttctgatgatgtaagaaactcccatgaacaagtttttttaaagtttattaatatacaaaaatagaacatttgttttacctatgaaggatgaatgatatttagaggaaggagaaaaggaaatttttataaaatctgatgtttacaaagcaaacccagtataaaagcatattcagtgatagtagtctgagcattttatttaaaaattgcagaaaatatattagttggaataaaatattttcaattatataatgaggatttaaaatatgtattaattgatagtatgtctttattgtatattcaaacaatattaagagttaaagagctttattttaaatattattgtcagttcaaatttgttaactttgttgtaaaaatgattttagtcatctgtagttacagtttttcaagatgcaggcatccactctaccaatcatacccagaaagaaaaaaaggagtccacagaatgaaaaatattcactttaattctcttgttcctattttgttgctctgttaaaacttaaccttttaaaaactgatatgctccttactcctgaaaatattttattcaaactggttacctgattatttctgggcaaagttaataaataatatttttgttttgtattactctcataactcaaaatgtttccatgtattttttttaattcaatgatctttaaatcttacctcttggtaattcttaggattgcttgtaaacttacttttatttctcttacataatggcaggttacatgaactatctcttcatttatttatagagctctaaaattacattgatttaaaggagtaacatggattttccatgaatttctttaaggcaacatttacatcattattcctcaggctgtagatcaagggattcagcataggaatcaccaatgtgtaaaacacagaagccatcttatcagtatccagtgagtggttggtttggggctgcaaatacataaatagcattgtcccatagaaaaccgtgactgctatcatatgcgaagcgcaggtggaaaaggcttttttccttccttctggtgaacgtatccttagaatggacaaaacaatattgaaataagatactagaactgtaatcatggaaaaaaccaaatttgttgctgcagatataaagactattgtttctggtatgtaagtatcagagcaagataatgctaacagaggtgcaatatcacagtaaaaatgattgattatattagaagagcaataagacacagagaatatacaaggtgaaaccacaatagctgtagaaaagccatagaggtatgtgagggacaccagcaggaggcagagccgccgagacaccaccaccatgtagagcagagggttacaaatggccacatagcggtcataggccatcacagccagcatcattacctccgatacaataaagaacaagaaccctcccagttgggtggcacattcatagaatgaggtagttttcttctttactaaaaagttcatcagcattttaggggcaatgacagtagagttgccaagattgatgatagctagatgtctcaggaaaaagtacatggggttttgaagtcgagagtcaacactggtgagggtgatgatgcccaggttccctgccatggtcagcacatagagcactaggaagaccaggaagaggggaatctggagctctggacagctagagacacctgtgagaataaactcagtgaccctggtgaaattttcaggagccatgtcagagtttggaaattcatctgtttgaggaagaaaataagtggttatagacgttaaggaatcattttctaggatttccactagatggcaaggacaattcctgggtgtgatcttcttgtcatgtattaatctaattcagttattaaactcagtattctcagtctaataaatcagctttgcaatcacttgggagagagtaaagcaagtatggtaaatttagtatggcaaagtaaatagttgtttcagcatcctgcaacactttgagggtttactgccttgcagtgtaattgaattaagaatatgttcttagcttacaaacatttgaagctgggatgtatctgatgatttttgcactgatcatgagaaaggcttaagaaattgtatatcgccaaataatccaatggctacttgcaatttcctaatctgataattcttcctttgcctcaagactaggtactatactcttcattttaagaattatatccttttataacatgtattagatctatattgagcttgcaaattacaacatgcatgtttgtttactactttttctctttccattttattaactcaaacaaaaatacatggataaatctcttcagatctatttttcaggtagctgtttctcttcttaggtttccataaataatatcagtaaaattttgtgcaggcgtggtggctcaaaccggtaatcccagcactttgggaggccgaggcgggcagatcatgaggtcaggagatggagaccaccctggctaacacagtgaaacccctttctacaaacaaacaaacaaaaaaaaataattagccgtgcgtcgtggcgggcgcctgtagtcccagctactcgggaggctgaggcaggagaatggcgtggaccctggaggcggagcttgcagtgagccgagattgcgccagtgagccgagattgcgccactgcactccagcctgggcgacagagcgagactccgtctcaaaaaaaaaaaaaaatcagtaagatttttatcatttttgtaattcctcaacattatgctttcctgggtactactttctatttcttccctctcatgactattcttttccttgtgctaaaagttcgtacaatactccgtgtttttttcatgatttttcttttaattcaattttttgtttataaaatgttatatttcttaaatttacacaatacacctgctcttaattttagctgatctgttttttttacgttttttgatatttatattattgtaacaggaataaacaccttcattttgagggtttttatgataattatgttgcatgtatttgccatagattcagcgtgctattttagtatggatgaacactttcctagagttgtatattttaatcatgattatttgcccctaactaagtgaattcatgtcctgttggagtcacaattgatagttccagtggtgggcacctggtccaaataagtcttatcatatagttctttattttaaagttcacaattaagttccagaaagttaagaatatattatcacacagatctgaattttaaaagcccagagctattcagtttctctccttctaaaagagatagaatagaaagagaaacaaatgattattctacagtgagaaaaaataaagaagtgactacttaaaaaaagaaaacagagaaataacaccaaaatgactcctaacgttgttggatatctggtaccagtttgtttgatgataccaagcataaatttttcctgtgggttctgtgaattatcctcttattttccacatatttattaaaattctactttgttccaggctatgttcgagcttcagataaattacctgaccctcagatcgtgaatatgttattgtaatgatagggaagagaaaaatctgttaagaaggcatataaacacaataattgcagatttaaataagcataataggtaaaacaaacaagataatatactaggataacctgggagagtactatcacatagaatattaatattaata

SEQ ID NO: 915251 - DNA, 4001 bp, Homo sapiens
taaccctcgagtgtgtaagtttttttaatctgtgttattatctccatacatttttcaaaattctatattgctaccattacagtagatgacgagataacttatttatcttcaggttgccaattctaaatcagcttatcaggaagttctcataaaccagtgtttgcaatagtgctagaatctgtcaaggaggatctagaataatccaatatttttctcatcattcctaatcaaaaacctactttatccctaagatatacaatactaacttcatctgattgaaaaacctcattctgagatagcatactttattgtgttcttagctttaatgtttacacagccttttcttttctttcttttcttttttttttttttttgagatggagtcaggctctgtcgcccaggctggagagtgcagtggcgtgatctcagctcactgcaacctccgcctcccgggttcaagcaattctcctgtctcagtctcccgaatagctgggactataggtgaatgctactgtgcctggctaatttttgtattttcagtagagacggggtttcaccaagttggtcaggctaaataaacagccttttcatgttatgttataatcacatatttacttactttcttgcttcctatctagcctacatgttctctatggttcaatcttatttacatttaatacctagtgcctgctgggaaatatctattactaattttccggttatttttactctgtttgaactatataagcttttcattttaactctgcaactctaagtttgacataatttgccttatttataaatagtagcggttccagtatgatttcgaaaattgcttaggacatatattacctgaatatagtatttatttattccattgaggtggcaaagagtacaggttgctctaagaggacatgttttgtccagaaaaagaggaaaatctaagcagatagagtatttctactttttttatgttataattggtttgacagagtactaaacagattattgtacccaactatgcaactgagtattaagatattaaatgggaattttgaatcgattggttaaagttctctttagagcatcttttacttctttgttccttaggctgtagatcaacggattcagcataggaatcaacagggtataaaacactgaggccattttatcaatagccaaagtatgactggacttgggttgcaagtaaataaataacaatgtcccatagaacatgatcaccactgtcagatgagagctacaggtggagaaggctttgtacctccctttccttgagttcattctgagaatggccactagaataaacatgtaggatatgagaacaattgagagggagaagagcaaattacagcctgagaagatcaaaattattaattctaattcatttgtgtcagaacagagtatggacatcagagggatacagtcacagtaaaaatagctgattatgtttgagccacagaaggacagtttaaataacttaattgtgagaaatagtgacacaaacgtgctatagagatagggaacaattaccagcacccaaagtactttctctgccatgatgatcacgtacagaagaggtttacagatggctacgtagcgatcataggccattgctgatagaataaagagctcagagatgatgaaaatctcaaagaatgctagctgagtggcataccaattgtaagaaattgtgtttttgtgcactatgaagtttactaacatcttcggggcaatgacagtggagtaaccaagatcagtgattgacaaatgtctaaggaaaaagtacatgggggtgtgtagcttggagtccaagtaggtcaagataaccatgcccagattgcctatcactgtgaccagatatatgatgaggaagagtccaaacagtggagcctgcagcccagggttgtctgtaatccccatgagaataaattcagtcaccttggtcactgccgtgtgattgtgttttaccacatgattcatcttggtaactgtgcaaactagaaaatcaatatttattatatttgaaacattatcttctaagaaaattaacaatttgatgtatgagcaatagaggtatttcctttatttcaaattctaaatagagtctcctcttcccatcaggtcaaaaccacacaaagctacagtcacattcattaaaactgtggtaaagtataattaaaaggggcaagatattttgaagttgttgttttgatgtagctactatgacctactttttggacccagagtcattttaattatgtaaaaatagctaccacttttgtttctgcttaccacaattttcaggtaatttgtaaaacaaacatctatacattaaactttacatttttgctgatcattgaaagaagcaagacaagattttcaaaactatagatggagtaatgaatagggcagtaggaaatctctgatcattatatacatgtcaatacttctgtctataaattcaacttgtttaccaaaaacaaaattttatgccataatttgagaattttgttaataatatcttaatctgcatttgaactttttgcctattgaattgctgcttctagtgagcaattggggggatgtataatcccccaattatacatccttctgcaggaaaaaaaaaatctggctgttcttacaattcatgaacatttaagagagaatcataaaaaagggctcagtggatagagaaacacaaatgaatatcaagaacctaagcaaatccatagcatgctaggcaattttgcaagtgctttacacatattaactcatatgatctacacaataactttaggaagtaggcagtaatatcatccccatttaaaagaaaaagaaactgaggcacaaagagttggataatttaacaaagatctttcacattataagttgtagtgtaaggattcaagtaaagccattctgccttcagaatatgttctcataaacactctaacacaccacttctccattagggatacccttcattgttaggaagtgagaatgagacaggaaagacacaaggtaaataatgataaagatctttgttaaaatagatgactgaagcatgaagtaatttgaaagctaaggtggcataaataatgaccagcctcgagtattggagactgtataacaggtctgtctgcacatctgtcctattgatgacagaacagtatattgcaagggaggcaacagttttgcagagaatgggacccttccagatttttggtgacaacctgctttaaggatgtacccttagaaattttctaagaccaatgtttccgcttacctcaatggagaatttgctttgctttctactgctttaggcctcataggtggctaccgaatggatttaaattttttctcctcccttgagactcattgtgttgaaatgttaatctgacccaaggttaaacaaattctacgtaattacctgagggaaagtgccttgaatatctgttgattattctccgaatgttccattaagaaaaagtcgtaaatacttatgcctttgtctaactgaaaaaataaattatgcaatatcactaaagactggaaatcacaaatgccattttcagcattgcatgcaaatattacatatataatccccaacaagtcacaagtaagtgaaataatgactttcttgaaaaaagttatataatatttgataatacatccattgaccacatatattttgttgaatatatgattataaactgacataaaacaatttcttataaactatattaagctgagagaagataatattttattaattgtattgtttatgtcaagaaatcagtggcaaataatttcttcatttgtttatgatgtatcatttatctctggctgtttttaagaatttttctttgttattggttttcagaaatttgactataatgcattttagcataatttcctttcaatttaccctacttggaattattttagctttttgtatgtctaggattttggtttttttt

SEQ ID NO: 915252 - DNA, 4001 bp, Homo sapiens
gtatggtgtagtgcattttattacttttatttgctttgtacaagtagaaaaatcaactgatgcaatcaaacagtgaagtaaatgaaaatatagtgcattcgatatagtgcatattgataaaaattatggattgtcaactcagtgagagactacaaagttaattcatcatagaatggtccccctcctcaaagatgtaaaaacaactggaacacaaattttaaccacagtttattacttttttttagataaataacgggaaaatctgtgaaaaaggcagttattaagcaagaacaactagagagaaagaataaacctgagaatttctatggatgtcttctaaacttaagcataattgatatatctactcatgtaaacagaatgggctaactgaaacaaaatcaggtgctaatcagaatttaccgattattgagctacaaagtatgttcggttaacagacttctatgtggaaataaaaacattgataaggaaatagtaggatcctaatattcggaatagtaattattcgagcacatctgtaagacttaaaatcatcacatatcatctaaacaaccagtattaaatgcaatgtcagaatatacaagcaaaaagtatgaaggctaaaacagaaggaaaatgcttatatacacaaaaacacacaaacagaaacatacagaagcacacacactgtaaattttattccagtagcagataaaaaacactggaatcctcgtaactcccttctgtaatgaccactgtttcctactgccacccagcatactagctttccttgtctcccttttttctttgtctatatccatcgtgcacattctactgttatataaaatggacttattgtgaatacaattcatctatccatcaaggaaggcaaagatttctactattttgtttattaatctatgtatagcaattagaagagcctatcatgtatgagacatatgtaaatatatgttgaatcagttatgcttgttatgtcttctggaagtatgcagagcaaaaattcatgcccataacctaatttataggaatcatattgtacaaaatttaaacaaaaatattacataagttattccatgtccttcgtagggcatattttacatctttgtttcgtaaactatagatcaagggattcaacatggggataaccagggtgtaaaatatggaagccactttatcagtgtcaaaggaatgactggacttgggctgcacgtacatgaaaagcaaagtcccatagaacactatgaccactgtcaggtgggctccacaggtagaaaaagccttttgtctgccagcagaattcatcctgagaatggctacaaggatgagcaggtaagataaaagaactatcagaagagatgaaatcaaatcaatagctgcaaagatcagaattatcaattcaatttcatgtgtatttgaacaaagcaaaggtaacaaagggagactgtcacagtagaaatgactaatgacgttgtagccacagaaggataaagtaaaaatctttatggtgactagaagagaaatgaatgtgcaatagaggtaagggattgctaccagcacctgacatacccttcgtgacatgattactgtgtatagcagagggttacagatggccacatagaggtcgtaggacatggctgagagaataaaaagttcactaccaatgaacacaagaaagaaagctagctgtgttgcacaaaaataataagaaattatattcttatccacaacaaaatttactaacattttgggtcccacagttgttgaataaccaagatccatgaaagccagatgtctgagaaaaaagtacataggggtttgcaacctggagtccaacttggtgaggacaatcatgcccaaattgcccatcactgagatcacatagatcatgaggaacaatgcaaataatggtgcctgcagctcagcgatatctgtgattcccgtaagaatgaattcattcaccgttgttagattgtgttgttccatccaggttcatcagaaaacctattctgatagagacatcggcattgtcaatagctttcctctatcatcacctgagaaattttttagtatgcaaagctaacagaagatatacctaaatttcacaatttgcgacatttgaaaacatacctctcacaaataaaaacatgtttaaataatttaagaaagagataaggcagatcagcagttttcagttgcttttgattttactcacccaaaaacattttctaatgtctagagacattttatttatcacaatttggaggtgggccactgttgcatctaaaggttagaagccagtaagctgctaaacattccactataatcaatactcagcccatcgcaatacccaaccccaaatatcaatagtgctaaggttgagaaactctgatgagatacatgaatagacagatgatagatagatagttaatgggtagatagatagattatggatgaacagatagaatcatatgagagagagagaaagagatacagatattcatgtctgtatagatatataaagaaaaattttaaagttaaaaacattgttaataccgtggatatctgatatatgaacaattattgtactatgtttttagagcttggtcatatttatagattaaaattgtgacataatacaattttagttatataaaaaatttctgtcacagattccaaaaatgcataaaaccacctgcttcaaaacatcatcctgtgaatacccttatctcttcgggtggtacagctgagactttaatagagttgacagatattaggcatatgagtaagagcagcataacagatgacagtggcaattatttatatttacaaagcaaaaaatatcaggaaatatatggatatagatatattctacactatatcttaatttatgtcatatttgaaaggttattttaggcaaatagtgtaagttatctaaaactgtttgttctaatatccagaaccaacatgtcattgcagaattgttgggaaggatgactgaagattaagtgattcaatgtgtctttgctgcctagaagtagttctaaaacatcaagtacattgtgagttttcttcttcttgttatttgttttaattgtgacaatgccttacttgaaagaggttttttttacatgtgtacacatacattattctgactatgaattaacttctttgttaggaccataatgatgcctaggggagtcacaggtcaagtaggatgtaatacttgcaacttagggcagttcttctcccctcccccaattcatgactaaacttgggtaattggtatgctattgttttggattacttatctatttttcacaacgaatttaataacattttaaataaattatttttatataaactttattaaaacattaatcttcccatagttttattctcaatataattgagaaatgctaacttgaatgtgaacgttaagtttgttttatcatacaaaatcttaggggagtttgaggaaatctgaacaaattgggagaaaatgtggtccttcatattggttttgtataatgaaaattagtaaaagctactttttgggtaaaaggatactgtagattaaagaaatgattaaaagtcaccttgttacacaataacatagagacaaaatgaatacactaaacatgagatatacgtggatttctggctgtgatttaaaacttttctgaacatgcaagccacagaaactaggaaatatggtatagcacataatacaaattaacatatgtataatcgaataaatatatatctaaatatcccccaataacccacagatttaaaatatagtagagcaggagatggagggcatgataacctaagataatcattattagttaaaaaaaatcgtaagccccaatgttttttgaaaaaagaaaagaaagaaaatagtttttacaatgaaaattatagtgacagcaatctcagagtgagctatgaaaaaataaagacaagcaattgtgttacattaa

SEQ ID NO: 915253 - DNA, 4001 bp, Homo sapiens
gcaagaatgaccataatttaaaaataaaaaaaaagtgttggcatgaatgtggtgaaaagggaacactttcacactgctggtaggagtgtaaactggtacaaccactttggaaaacagtatggagattttttaaataagtaaaagtagaactttcacttgatccagcaatcccactcctgggtatctacccagtggaaaagaagtcattatgtgaaaaagacacttgcacatccatgtttagagcagggaaattagcaattgcagtagtatgtaaccagcctaaatgtccatcaaccaactagtggataaagaaaatgtgagatctatatatatatatatacacacacacacacacacacatatatatctcatgaaatccgaaaatctgattactcattgaaaatctgatatatataaagaaaatgtgatatatatatgacaaaaagtggactcatataaccagaatatgatatacatatcacattttctttatatataccatatatatatcaaatgatatatatagatatcacgttttctttatctatatatatgtgtgtgtgtgtgtatatatatatatatgtatatatatatatgatggaatactactcacttataaaaaggaacaaaataatggcattcacagcaacctggatggagctggagacctttattctaagtgaagtaactcaggaatggaaaaccaaatatcatatgttctcacttataagtgggagctaaactatgaggatacaaataggtaagaatgacataatgtattttggggacacagggaaaagtgtgcagtgtgggcgagggataaaaggctacacattgagtacagtgtacactgctcaggtgatgagtgcaccaaaacctcagaaattaccccaatgaacttattcacataaccagaaacctcctacttcccaaaaattattgaaataaaaaacaattaaaaaaatttgaaaattggaaaatttatatacacatgaaaaattatcaagtgacattaatctatattatatatttattataacaatattacaaattgattattaaacacaaagttgacatcaattctcaaagagcttatagaaggcatttttcacctcttcgtttcttaagctgtaaatcaaagggttaagcatggggattactaaagtgtaaaacacagaagccattttatcagtatcaaagaagtgagtggaattgggctgcatgtacatgaagagtagagacccatagaacacaaccaccactgtcaaatgggaaccacatgtggagaaagcctttttcctgccctctgcagaatgcatttgacatatagctaacaaaatcaacatgtaggacactaagactatcagaaaggaggagatcaaattaaatacagaaaatagtatgctcaacaattctatttcctgtgcatttgagcaaagcataggtagcaaaggaacatcatcacagtaaaaatgactgatgacattagagccacagaaggtcaatgtaaaaatcttaatagtgaacatcagagcctgaaatgtgctgtagagatattgaatgcccaccagtacatgacacagtcgctgagacataataacataatagagcagagggttacaaatggccacatagcggtcataggccatggctgacaggatgaaaaattcactgataatgaacataaggaagaatgccagctgtgcagcacatgcataataggaaatagtatttcgatccacaacaaaatttgccagcaccttgggacaaatgacagtagaattaccaagatcaacaaaagccaaatgtctgatagaaaagtacataggtgtatgtaagtgggagtccagtttggtcaaaatgatcatagttaggttgcccaccactgtgattaggtagatgacgaggaagactccaaaaaggggaatctgcagctcaggccgccttgtgagttccatcagaatgaattcagttagcactgttagattgtgttggcccatttagtccagttatctcttctaggaagaaacagttgggttattagctgttccatgtagtgctatttaaacaaattataatatttgtagacagaatagattgttattcacaatagataatagaaacattatttctacatttgattcagaaatgaaatataaagcaaaattttctactttcctaaaagaggaattcatgtaaaatacatgcactgaaacaacatagattaaatagtttcatcaatatttgaagtatatcggttaataacacagccatataggtattattacaaaaagattatgctcttttcatctgcacaatggtatcatgattttcttttgttcacttccacttttgttgtaaaacttttctgtaattttgatattctcaaagacagaggtagagatggcaataagataatgaaggttaagatttggggtccctcatttgcacttccagggtcttgtgtggggacttacgaatgcacgcaaaaatgatatatctttgtaaaatttcaaatgtaagatataataatcatgatcaattaaggctgctttctgttttcattccaacttctagtatatcacacttcaactaatatcatagtgacttgacatttctgcaagcattgtgggatctagctaaagaaggattgagttaataatagtttatttgatgttcaatggatatgtttatatcattcagacactatgatatttatcactgaataatactacctattctgacttaagaatgtcttctaaggatactcttgccacctgtatgctgagatgcatttggcatttgattaattaacatactatattaataaattttatatagtttgtggccatgggtttgtttactaattacaatttaaagctaattttctattctaaataaatattcccatttatctttcaacttgtatgtgtaattttatctaaaaagtcaaattcttctaagcttcaagacacataatctggatccacttctgcaaaaacatgatttaaatcaatattcagtgatgactatttaattatatgtactttattttctgtaataaaacactgtgaagatggtaggttctataaatcatttaaataatttgagaatttaggacatcatatattagtgaatgactttttttctggaattgtacagtggagtattcatggagatataatactgtaattaaaactatttcaatgaaaagtacttctccctttatttaaaaaatacacgggaagtcaataaaagaaagtggaacgtccctgatacagatagtgaagatgtcttagcctattccacttaaattcccctctccttcagtttccactcattgaaaatctggaactctgtgagagtgactttcaattggaatagtaacggaattttccacagatctaatgtagaatagatttattataatgtaatggaatgtcagctttagcctgcacatccctcaggtagaaaactctgaaaacccacctaaagatccaaaactacagtttggagcaggtgcagtccacagccacactgtggcatttggcaacacttctaggtatctgctcattagtgggagacattttgccaacttcatctatggactacagatgtgggaagggggcaacagtggaggttagtgaccctcttccattccttctccctaaatgaagctgtctgctgtttctccattgaacttcacccctcttttaggtctttcttttcccacagataagaaccatgactattctatttctaaaactttatcttaaatttgcagtattgcaggaattgctcacatagggttttatggtagaatagaagatgcactgaattgcaaaggaaattcagaattccaacatcaatcccaccaatctgaagtcaatactttgcttaaaatggttttagtttttattcagtctatttccattgtcactgtcaattattatctccctctgaagatttctcaattttgtatcctacctgtttttcttatg

SEQ ID NO: 915254 - DNA, 4001 bp, Homo sapiens
accatgaattattacccctttccatattgcttagtcctataaaagtctctaaactgagtaacattattctcatttatctgatgagtaaactcataagagcatacctagagcacaatgacatgtttgggatctaaccacatactttgactataaggcatgtgcttattcactcggctacattgcctactgggttcattgagttataagctataccttaataaataatgaccagcttacctgagctttgctgtgcacaactgtatataatccttgttactggaaaaatgatttatgatgtttcaatgactgtgaatatatttgtttgaattataatgccctcccctcctccctccagaattctatccctgagttacattatttacattttgggaaaaagtataatgagatcttgtaggcataagaaaagcagttctcttagagagttagtcttcagagacagaacaagacttccaggaagtagaaggtacattcagtcagtaacataggtgaggttagaaagcagtactctttgtattaataaagacaatatgttaaatgcataaatataggacatttttatattgtcatgtattttttcaaaaaattaggaattgagaaagaaaatgtttagactatgtgtctttatttttcacgtgggatattgtaaatacagcttcagaatcctgaactggggatggacggggagaggagttaacttttgtctgtgctctgcacataactaattatatatcttgatgatgactttttatgcattcttcatttgagaaataggaaaattggtataaaatattatgcaagaaaattaataattttaatatattttccacttgaaaaataagagaagtgttgtaaattcttatagttacttttatacctaacgttctaagagaaattctctagaaaattgtattacacagcgaaaatatatgtatacatcacatattgagaaacaaggatcctgataacttatactgggaaaaaaatcataccatgaaagaagtccatttttccttactcaagttactttcttaattttataaacacaaaactctagtttttattgataatgattttcttcagagcttctttcacctccttattctggaggctatagattaagggattcaacatgggaatgatcactgtgtagaagacagaggccatcttgtctgtgtccagggcatggctagagctaggctgtaagtacataaaaatgagggtcccatagaatatggtgactgccagcatgtgagagccacacgtcgagaaagccttctgtcttccctcagctgaatgcatcctcaggatggcagaaatgatgaacatgtaggagacaaagacaatcagaagggaggaaatgaacatgataccagcacaggcaaagatccagagctgtttgaagcgagtgtctgagcaagttagcctgaggagaggcatgtcatcacaatagaaatggttgacaatgttggagtggcaataggagaggcggaaggtgaggatggtgtgaaatagtgccattaggaagctatagctataaggaactgctacaagttgaatgcagattcctggagtcattacaaccatatacaatagagggttacaaatggccacatatcggtcataggccatggaagccagtagcaaggattctgatatcatgaaggtgagaaagcagcccagttgagtagcacatgcatcaaaggatataacattttgtttgtacaagaaattcccaagcattttgggtgtaatgacagaagagtaacagaaatccacaaaagctaggttgctaagaaagaagtacattggtgtgttgagacttgtatccgctctaatgagtaggatcaaacccaagttgcctaccactgtgaagaggtagatggataagaatagcacaaagaggggcatcttcaactcctgatggtctgtgaggcccacaagaataaactctgtcgcctgggtgcaattgatgtgagccatatcttttctggccatctaaatgtggaagtagagaaaagagttaagtctaagtcatattttaatactgtaaatcctatatgtggtgtttttatatttattgtattgtaaagagtttaattaattagatttatttattaatttatttaactaatataatgattgttagcatactggaattctggaaatgtgatggagagcaaaaagaatataacaccgtataaacatctttatatctaaagcatgaacttacatgaatgtagggaatgaatcctcacataatcttatcctgtaaattagagtaaaattgatatttgctttctaagagatttggaagtttatgtttctttacattcagtttatgtctgcttttttatcttttattaaaaaactgatttaattacattttttgcattaatttttgttttcctactctatttaatgttgtgtatcatcattttcttattcattttggataattttaaaattgaattattgaatacccaaatagtatcaaatatcatgtctctcaactcctctttcttctctctcccaccattatatctagtaatggaaaatagagctttccttaaaaacttataaatttcacgctttgaaaattactatgcaaataaatatataaataaaataagagcctgtgtttcttcactgttcttcagagtttactaatagctcttgagtatttacttctgctcaattaatcaaagaatccatttcagttatttgtgttttgtattaataaacatatttattgagcaacataatgtggtaagtagtaactttcaaaaaatacttatttaccttaattttattctaaataaattatatttattatatgtataagatacatattagatatgcaatatgtaagtatatactagatatcctaaaaccctaatacagatggaacattaatgtctaattatagcaacatggaaattgatggataaggacataggaacccataaattccaaatctctaattgcatgttaaaaactgaacgtcaattttgagttaaaataggaaaaagaaaagagaaaagggaggtaagtaaaaagagaatttttggtctttgcactgctcagaccaaacccttctcaagaagactaactttcagactcaaacttttttatgacaaactatagaaataaatacttgttataagatggcatggaactaatagatatattgagaataatacttttgcttccctgacatccgcttgtattacatattctttcgttttctagcgtaatctgttccattctatttaattcaaacaatgcttcttgggatcctaaaaagtggatttaagatctactagtagttacaagcacagtttcaaaacctacacactagtccccacacactgaaccattttcactaacatgagtagataagcaacttacctttaacagttcctagctataccacccactgtaatctgtaaccaagactgaacattctatccttaacattttcctggattttgtctaactgctactcttgtagaaggttatttcaattcattcagttctttattcaataatatatagtggggactattaattttcagagcgtgcatagagtctgaagatagagcagtgaaagaatagatagtagtccaggctggaaagaaagcaagcgttatccaactttaccctatatttctggtctcttttcttatcattcgtttttctccacctgtaaaacacaaaaccctgaaacgtgtgcacacaaactattttactttgaatccaaaggagagcatgcattatatttgaaaggacatgtgactttttatagtatcatctctgaatatttttattatcccggttccactcaactctccagtcagcaggagcatccattgtttcaattaatgattggtctcaatttgtcaataacaaaatgcctttccatacttctctatttttaatcttgccattcctagtttctttctttacagaaaaatagacag

SEQ ID NO: 915255 - DNA, 4001 bp, Homo sapiens; identical to SEQ ID NO: 915254

SEQ ID NO: 915256 - DNA, 4001 bp, Homo sapiens
tataggtatgttgaggagatatctgtgctttcatgttcattgcagtattattcacaatagctaacaattagaaacaacgtaagtgcccatcaacagataaatcgataaaagaaaaagtggcatatagtacacaatggaataataatcagccttacaagaaatgtaattctgtcacctacaacaacgtgaataaacctagaagacattatgctaagtgaaatatccttttgttgaatcacacctgtacatacatattctctctataaaatatctattaaaaataaaaataaaatatctgttgatcaatgtgtactcatagacttttatttttgaaattgtttcacttagccaaaataataattattttttaaatgatgataattgccctttgatgctcagaaggtcacaattttaatgtaaaagtccttgtaagttcacccctgtaaaataaagaggagctctgggagttatacagtgaattacaaaaatcatatatatggcatcttgatgaattttttcttcatcaagaaacttatgtaagaggcatagcaaggtcatgcctttctgggtctcatttgtactgagttatttcttgggtgcctctggatctttgtgctaattcttcttgtggggggaaagcatgtagaacaatgtttaagatattctgttcagggaatggaaagtgatgaatttcatccagttaaacataggaaaatattaaaaattgagcacaattcttcctagttctaggaactatatagatactcttctatatgtatcagttagccaaatcttaggctaatgaggtaggctgttcctcactttatgaaggtataggagaggttttgggcttaaggtttatgtttgtttttaataagagagataggaaattcaattcaaattcttatatattcagatgtttttgtccgaaattttcctaattttcttattgtacatgtctgtaactctcacgtgtcaagaaggggactgatcacgataaagcacaatggtaactctgtttgaaatacacaacactccatctaaggtcgtctttgtttctcctctggtggagataatcttgatttatgggagaagttttttcagagcctctttcacatccttattccttaggctgtagatcatgagattcaacatggggaataccacagtgtaaaatgtagaaactattttgtccatatcaaaagaatagctagatctggggagagcgtagatgtagagaatggagccatagtataaagtgacagaggtcaggtgggaggagcatgtggagaaggctttgaggtagcccttggaggaggagatcctcaagacactggtgatgataaagaggtaggaggccaggatgagcactgcggggcagatgacattggaggccagcaggaagtacatcataattttatagccgcccttctcgccacaggccagctccaccaagggaagcaaatcacagaaaaagtcatcaatgatgttttcacggcagaagttaaaggaaaacgttttcttggtgatgattgaagagttaataaagccaccacaatatgagactgctaccagcaatgcacacagctttatggacatggcctgggcataaagcaggggcttggagatggccacgtagcggtcataagccacggcagccagcaggtagcactcactataggccagccctgcagagaagaagaactgacacaggcagccagcaaaggagatgcttttgtcttcagagatgcaggtcactaggatctttggggtgtagacagaagaataccagagatccagaaacgacagatttccagtgaaaaaatacatgggtgtgtggaggcaggagtcattacagatcaacacgatgagggtgctatttcctaccacagtgagagagtacacgcccaggaacaccacgaagaggcccagctgcattcctgggtctgtggtgaagcccagcagtataaactcagtcactgtatgattgctcctctgcatggctgtaaggaatctcacctatggggaaagaaaatgagctcagtttgcattactgtcatgaatatgtagaattatgttacataagatcacatttgcagtgtttcgtgaagtctagaaccaacaatctaattgtttgttttagaaagtcttcattttgcaacaatcaggctttgcaattatgtattcaattctaaatttcttaagttgtttaattatgtttttcctttaggaatgactgttcaagtgaagaaaagatgtacttataattgctatttttcttatactttgatcctcttccttttgtcaattttctcttttgctaaatgtgtacatttctatttttaagtatcacttgtttgtctttaaaatactgggcatccctcttttaaatatagtttaaaaagaataaagtatttttcctctagtttctatgcattgaaacattatgaaagcattataaattcatatctcataatattatatataggcctaagaaaatactaagaaaagtataaagggaaaagagaatagatacaatgttttggggaaaatgtgtacagaagaatgatatacaatgatgaaattacgaagtacacagtatttactatattttacacatattctataataaacacaataataacaataattgaaacaccagttttaaatgtaatttatgtatactacagtatttcttatgatgacttgaaaatctacccactctcttcaggattctcttcatatagaactacaaatgttctattgaaatgggtagagcaaaatatatctagcatacatctgtcttacactgtaaagacaattcttgacagactaacttctcattaacctaagtcattttgtaggtaaataagttaaaattcaagtgtacatgatttgtatttgtatgatcttcctcttgggacctaggaaaaacactcagttcacactcaactctcaatattagcattaataaacatcaatgttagtaaacagtgttatttctgagtaaatatagaacaatataagattgttccacttgagcttttgctacctctactccattcaagttgcaatgatctcacatgattaaaccgaatgatgaagttctcttctgattagatctacctgcagcgtttgtcatagtttctcactccttctctgctggaaaatctttacttggttttcaggttgtcatacctgtctggtttgcttctacttctcttgctgcatgtgtctcagtgctacagaacagacttttgaactttggagtgtccccagaatcagcgcttgaaccactggtcttctccatctgccatcagtttctggtaatctcatccaatctgatgactttaaatgcttccatatgcacatgactccaatgttacctcccctgactatgcctcctccctgaagtgagactcatggattccaatgcccaattaatatttcttccctaatgtctcctgggcatcttaagaaaattgagttcacagggaatactgttttatcattgtattctaagagctatattatttgcttaagtgttatcattaagaaaaaaattttactaacaatcctccctaacctgatcctcattcagtcttctccactgcagtaaatggcattattccatgttagggagagtcgttttatattattcttgaccactctctttcttacactctgtcgcttattaattagcaacatctcctagattctaccttcaaaatgcatctagaacatgactagtttctcccagctccagtgttttcactctacatggggccatgattggcctctaattggtcttcctgcttttattcttatcccacttgagtctttccacatggcagccaaaatggtcctgttaaaatgccagttagatcatgttagttttctcttctaagaactccatccaatgacttttccacttattcagagtaaaagttagactcttacaaagatgtgcaagatctttgtgcttttgccctctttactca

SEQ ID NO: 915257 - DNA, 4001 bp, Homo sapiens
ctaaaggctactaaatgaaatatcaacccaacctgccatcacaagggggttcagttatggagtttatatcagggtttagggaattgggctcgaggccaaggctagtttccatgtggttagcaacatgtttgatttttcagggtttcaggcatcgatctaaacaagtttaccagttcttaggaatgttcaaggcccaggctaggttcaggccagggacaaacatgcagcttatgtcttttggtcaggacaaaggaaagagaaaggtaactagggaacagtggttactattgttgttcatttgttttatttcgtttgatgttgtcacatcgctgtgtgacctgagagagagtactgcggagtactcactccttgtaagagagaagactgttaggatgatatgcaattctaaagacacatatttattcattaattttgagatagttttttgttgtcattgttgtttgtaatctgaacaactcttaaacatcttcctaatattctctttatgtagaaggcatgagttttacaaagatactccctatatgctcaattagagctttctgaagaaattttgaggaaatgattttcttaaaataaatatttgtaaaatcttgagcatatttccagaagcctcaccctttcagatattcttgtcacctagtaaagattgcttaccaaacttcaaagtcaaactatattcattaacccacgtaatttattttgttccccaagatctcccaaagggagcaaacacaatgaaatctatgaaagatttaatgctgccaaggcaaaataccatattgcagaatgccaaacaacccaatattataagttttaaatattactttgttttgtttacatcataacaaacgaataacaaggagtcatgtggtcaatattttaatgttttaaatatgacttattgaacttaattgaactacagaaatgcaaatgaacacatttataagccaataatctggaaaattcaataacagcatttgcaaagagaataaccttcatgtttgtggttgtatagtctgtgttgctttcctgaaggcctctttgatatctttgtttctcaggctatagatgagagggttgagcagtgggttgatcacggtgtagaacagagcagctactttgtccctctctagggagtaggtggaactaggccttgaatacataaacaacaatgatccatagaagagcatgactgagatgaggtgggaagcacaggtggagaatgccttgtgtcttcctgaagctgagtggattctcaggatagccaggaggatgttgacataggaaatcaggatagcaagaatgctggagagtactgtgaagcccaccacaccaagcaggactttttcgtagaccctggtgtttgtacaggacatttttaccaatggtggtgcatcacagaaaaagtggtcaatgatatttttaccacaaaaatgcaggcggaatgtattggcagtatgggctatggcattcaaaaatcctcctatgtaggagccagcaacaagcccagtacagagggcggtggacatggtacctgaataaagcaatgggttacaaattgctgcatggcggtcatatgccatggctgccaggagatagcattcagtgtaggctacaacacaggaaaaaaacagctgagccccacatccagccaaggaaatgcgcttatcttctgagacacaactggccaggattttgggggtatacacagaggtataccagaaatccaaaaaagacagattgccaatgaaaaagtacataggtgtatgcaagtgggaatcagttcggattaagataaccaaggtcatgtttcctgacaaggttatcaaatagagcatcagaaacactccaaatagaatcggctgccactgggaatctgctgagaaacccaacaagatgaattcagtcaggatggtgcaatttcccacttccatgtccacggaggtgaaagcctgactatcatgagaagggaaaatcatcacttagtgttttttctattcacacaagttgacaagggtatcaattaaatcaacaattactaagaagcttgtagatttttctcccttactatctagaattataggacttcagtccatgatttggaaaaattactggaattggagtcaaaaataatttgaaaattaggaattttatttattaactatttaatgcaggacaagacccatattctcatcaaacatgaaaaaaaaatgaaactcacaaggataactaattacttcttcttttttttttgagatggaatctcactctgtcacccatgctggaatacagtggcgtgatctccattcactgcaacttctgcctcctaggttcaagcaattctcctgcctcagcctcctgagtagctgggattacgggcacctaccaccacaccaactctactaaaaatggtgttttaccatgttggccatgctcgtctcaaactcctgaccttaggtgatccacccgcctcagcctcccaaagtgctgggattacaggcgtgagccatcgcacctggccgactagtaacttcttgacagactgtctgattgaataaataaaacatacataaaaataacacagcccaatattgggtacattagtgggcactcaaaaaatttcactatctttctataagttattgaaaacttcttacgtgtcaagtatttgtattgttaagtattagattattaaagttgctatttatattacaaatataaatacattatgaccatgtaccagttactattctaagtcttatacctaaccccttgagtcttggatggcttggtggtttgctttggccaatagattgaaagataggcagctccatgtggattcaaagcctggatttcaagaagctttttatgtttctcttctcacttttaaaatcctaccaccaccatgtaaataagcctgggttagtttgctggataagacatctggctgcgctcactctgtcaccccagctgactgcaagttgtcccccaaacatgcaggtggggcccttctatatgatccagcctacagtggcgctaagagctacccacagacatgagcacgcccaggtgagaaaagacaggtctggcataggcagaattgcccaagtgatatggcatctgagttcaaacccagaccttcttacttggtagttccataatcttggaaaagtatcttaacaattccccacctacgtgtatttacctccaaaagggcgagaaaacatccatgttaagaaaacagcccattttctggacagaacatcaatctacaaaattttaactatcattattctgaatgggaggataattatctaacttaattataaattctgagcttgcaaaacataaataaatagactaagtttatacaaataagcaatttcagccagaatagtggtatcgtccagtatcttgctaaaatcctagaatttaatatttttgtcaactatttccatgtaacttggcaaaggagttatagggtttaggattgtggggtccaatatttggtacatatccctgacactaatcactgtatgatttaggaaagtaatacctcatctcaggaacacaattcacccatctgaaaattttggttgatcctattctcagcaccaaacttccatgattccaatttgctaaaatctcttatagaaattgttacgtgccaggtgcggtggctcacacctgtaatcccagcactttaggaggctgaggcaggaggatcactcaaggccaggagttcagaaccagcctgaccaacatagcaaaatcctgtctctactaaaaatcagccaggcgtggtggtacacggctgtaatcccagctacttgggaggctgaggcaggagaatcgcttgaacccaggaggcagaggttgcagtgagctgagattgcaccattgcactccagcaagggtgacagagagatacgctgtctcaaaacaaaaaaaaaaaaagaaggaaaaactttcatgaaaca

SEQ ID NO: 915258 - DNA, 4001 bp, Homo sapiens; identical to SEQ ID NO: 915256

SEQ ID NO: 915259 - DNA, 4001 bp, Homo sapiens
ttgccatagagttgccagaaggctcaaataggaacaagcatgtaccatacaaattctttcaaaaggctttggactcaatagtgaagaaaacattctgttctcaagggttttacagtctggtacaggagtcatgattacttcccctctcaccagatcttcattagagaaggtaatatggggttcagttgtctttctatttatctgttggtgctctctgatttgctcttcctggaaatgggttgcttggtaggagagaactgttcctgagacacgcaatagggtgaggaggagaagcaatgtaccatggccttcagaaatgagagagcttgaggagacattcccaaaggtaggatggttcatttcatcttgaagataccaaagtaacattaaaaaaaggaacaacaaaaccagtaaggtaccaagtgataaggaaaatttcaagttctattgttctggcctgagcaagaaggaagacactctaagcgggtgacacaagtctcttctgaagagagaagttcatttctcaaacttccttcccttggccagttggagactgagtttttccttatacaatactccctgcttagtgaggtgatcagtccttcatattaaaagaaaaaaaggccaatttgtgcaattcgcagaggtccccagatataatctttgacacagagataaaagtgggattgatgggagcaaaaacaagagggaaaggatggcaagcccaggcatgagttgagagagtattgggttggaatgaaataaactcaagactcctgggatctgagattctataagttgtgacattagagaatattaagagactgcccagtgctaaggaatggattgaaagtggaagaaggggataagaagaaagaacatggaattgctggaaactaatttcaccacaattgtagtttttcctgtgtgcctggtggtacctatcttctgtcttctctgtttgtgggtataggttgcatatagtaatggtgcctattaggatatattcatatgggaagaaagtggactaaaacaagaattcctcttacttagatctacatgctcagggacacctggagtctcctagcgacctttctgaaggcgtcttttacatctttgtttcttaagctgtagatcagagggttcagcatggggatgaccactgtatagaagacagacacgactttgtcttcctccagagatttgcctgagccactttgcagatacatgaagataagggctccaaagaaaagggccacagcagtgatgtgagaggcacatgtggagaaagtcttggccctgccacctgaagacttcactttcaaaatggtcttgatgatgagcagataggaaatcaggatgacggaggcattggccaaaatcacaaaattgccaaagaagatgatgacaatctcgatgtttgctgtgtcactgcaggcaagcttcagcaggggtgggaggtcacagaagaagaagtttatttgattgtccttacagaaggagagggtgaaggtgcaagtggtacgcaggatggctcctgacaccccacagacataggctcctaccaccaggctccagcagagcctgggattcatggccacggtatagagcagtgggttgcgaatggcagcatagcgatcataggccatcactgccagcagaaagcactctgtgcctgcacagatggtgaataaaaagaactgggcagcacagtggccgtaggagatgaccgttttgcctgtggccaatgtggctaggatctgaggggtgatgactgaggtgtaacaggcatccagcagggagaggtggctcaggaagaagtacattggggtgtagagtttgacatctacttggattaacataatcatccccacattcccaagaagggtgactaggtagaaactcagaaacaccagaaagaggggaatctccaatttggggtggtccataaagcccatgagaatgaattcggttactctggtgagattattcttggccatggagacaatgtggactgttggtctgaggatgataatgaaataaaaagaatctcagaattgaaggacagaatctttccctctatggtggaagttttggttttaattctgggtctatttgtagagtttgtttttaagaaattctgaaactggctgattttccttgggcatctcttgcattttatggaactgagccttaagctggtatttctgattcaaactaatcctagtttacatttggaaatttctgtaaagataagaggcatacaattcttaggtttggaagagacctagacagtatctgttccagtcccatctggggctggagtctcacttaccatatacccaccacacggtcactcagttgccgtatgagcctccatctgcaaacagttccacctgttgattctctttttggacctagggtttctccttctgtacctttcacacactggccttagttttaccccttctagatacagcaattttaatcacttcttcttatgaaagcctttcacaagttggaactgatgaatctgctcttcctgcccaccattcccttatagtacacattgatatattttccgtcttactatataattattcaatgggcagtaaaaaaattgcctagtcgaatagtattagctgataacaaaaagtctttctttctactttaatcatcaccaccccagctcaggggccatcatcttcaacatattgcattttatattttttagttacttatacatcatgattataaataatatgttcaaactcgtggacttgctacttttttatgaccttgggtaagttaactaacccctttgtgcctcaacttttcataaaatcaaagttgggtagagtttatacattgtccaaaatcaaagttcatacattcataaaataacatattcacctatttgtaacatagaaaaatatgcttatgtcataggggtcttttaatttttttaaggaaaagaaaatttattatctttttttgaatttgaatatgtttttattttttattttcataggtttttggggaacagttgatatttggttcatgaatgagttctttagtggtgatttgtgagatttttggtatatccatcacccgagcagtatacactgaactcaatttgtagccttttaagtattaataagttaatacctgtaagaagtgtagatcagtacccagcacataaagctaaataatgttggctacttttgttgttgctattatcatcaattttagttggtagctattgattttctgtactgaaacataatccatttaacccgcatgaactttgttaatattgctatctttgtgtaatatatttgtatctttatttcaataccatatatatatatatatatatatatacatatattcttgttttttgactgagtaaatttgaccttcactaagtaagatgaagaaattattcccttgttcttttctctcttctcccttccacccccttaacaaaaaaatcagtcttttatcccattcatatgggaatgcttgctaatttaagtcttctctatattttgactacgggttgattctactatcagtaatttgtgtttctctattatgactatgtacatgccatacacaaaaagactaaatattgtgattggatacacagaaaaggaaatgtcattaaacttctgcttctgggagaatctttcaaacatcaagtcaaataaatgctcctttcttttgatctaacaaattggttaaaataattatgtttagtttgctttatatttgagtcatggaaattttgcatttcctaagatttcctgttgccatatggtacagatttgagtcacctcgtaatactgcataataccatgttccaagtccatccaggatactcattaaaatgcctaaagccttccttgggagagtgtgcatggaagcctaggttcccatctcttttttttcccaaagtcatctctactctcccaggacctgccagaaacctggcaaca

SEQ ID NO: 915260 - DNA, 4001 bp, Homo sapiens
gccaggggagagacaggtggaagtaggtaatatgcccagaggaattgttagaagaggttgtgaggtccacggagagagtcaggagagcacagtggttaaggctacattcaggcattagaccacctgatgccttcaaatctcagctccaccaccttctaactgaaatcaaatgaaagcaacctagatgggaggcaatgcctaacccaacggaatgaatatctgatggaatcattgaagtcatcagagacaagtctaatgagaaactctttctgagcgagagttccagagcatccaaattctactcctcttcccccctgccccaacacgtcttcgggtcatgtgttggtaggaagatgagcttctctccaaaaagggagaaaggaggccgggcgcagtggctcacgcctgcaatcccaacaccttgggaggctgagcgggcggatcacaaggtcaagaaatcaagaccatcctggccaacacggtgaaaccccgtctctaccaaaaatacaaaaagtagctggtcatggtggcgtgcgcctgtaggacacaccctatagtagcacggcgggcaccccagctactcaggaggctgaggcaggagaatctcttgaacccgggaggcggaggttgcagtgagctgagatcgcgccactgcactccagcctggcgacagggcaagactccgtctcaaaaagaaagggtcatttacggagcccctcccatgggctagattctgatgggctgataccatctggcttaatccccacaatattgtactatgatcctatgaactattcttgatatagaggtgttatttgtcttggttttcacgcaattgaaatcactgaaggctcagagagacagtaagtaaacttgggcaagatcaaagaactacatggcacagagaagagccaaaccccagagcttctgacaaaaaaagcctccacaccgtgccattttcctctgccatctcatttcacccaatgacaacgtgcctgcaaccctggctccctgccctgactctgaggttaatttccctgcagctcggagccccgccaaggctggaggaatatcccacaggctccagtgagctgcaaagcacagtcacactcccagggctattaacagcatccgcttcctctccaaggttcagggaactttatccaccaagtgccatgcaggaaaaaagaggtcagccagagaggagagggtcacacggggcaatcactaaataaggagaaaggccgcacaggaacttggcccaatttggtgtcctcaaaagacggtgctccctggccaagattttccctaacaaatatggaaaaacagtttgaggcccatgcacgaaaattgaaacttggttcctgtagctatttgcttgtgtagctacgtgacaagcctggtgagaaacgctggatttctccctctttcagttctctccacctggcatctgggggcctagtcccaaaaagtgaaaggaactggaaaataaacttactaagatccaggaaatgatttcaaaaaaaaacagccaacaaaccgaggtgagcaggcgcagtgggtgggtgttatgagacagacagcggggctaggagatgcccaggatgaagcccggagacctgctctctgattcctcttgggtctagctcatcacagcctgcttccccactcccactgcaacgtgacagcaacagcacatctcactttccaacatgcagacagccccctgtgttaacagcaccgtctctgaaatcagtggagctgcatttgaccctacctccgtcaggccgtagctgtgagtttgggaaaggcgtttgatctttctgagcctcagtgtcttcatcttcaaacgggaaggataacatgtacattgctgggctggactaaagatggaaggagacatcattaagggaaagttagggcctttgctcctttcgctccctctaccatctctgtgtggcatcctcctgcacttcttcaattccctgcacaagggccaccttaacagagaggccctttctgaccacctatctgaaaacgcagttcctttcactctctgaccctcttctcagtttgattttttgggtcacagcttcattgccatctggtagatatttatttgtttgtctataacatcacgcacacacacacacacacacacacaaaaggaagctccttgaagatagtgcctttgtttgtttgttcattactgtgttgctaatgccaaagtcactgacatgtagtctacatgcaataaatatatactgatgtaataaaagggtggctgcatgctcctgattgtacgttggcagcgtacttagtttcctttccatttctagctacctgtttttaaggaaatttaaggaaaaggaagttcaacaatacttacagaaaagtcaatcaatttgggtgttgtccatgcaattactgtcaacggactacaagactgacaatgcctgcaggaatgatgtcttgtatatctggagcagcctgctctcatggccttgggtgggaggcaaattgaattgatttctacatataatttctttttcttagctacagaatttaattctaaatttcccggaaagctgtactctatcagctgttttcaaactctgttccaccaagccctaggtttgcttagttgccaggtagctgggaagaggaaaggacctagtatgtggggctctcaaaatccctgcttcaaccagctagtaagtgacagagtccagatgagaatccagcccagtctgactccagagcccaccatctttccatcataccacctccccagggagggtgatattcctaaaataaaatctgatcaattaactgggcgcttctctcattattccaggacttcaatactgagcagatacaatctgttcctcaaagctactgacatatagtctgcctatgatgggaacaaatgggaaactgaggtataagaaaataagtgggaggcttctccagccatatatgtgacagagaccccagacccaaaccaagccagagagtccactatagcagacaggaaccaaggtgagaatcaagctttctgagcttctagctcttaatctctaggcagcaataatatctattcttgttgtctctcagaacattctgtgaattgatgagatagtggatgtgcgggttctttgaaactttaaaggtacactctggtaaaacctgcttactcttttgcttctattgcttatggactatgcgatgaccacagaatttcaataaagggacagcatgggaatggccatctggtgggactctgggaatggtcatgaagctgccctggaataacaaaagcaaattgattttgtttagattgtaggtttgaggtggcttgaggaggcagatggagatgaaggagaactaaaaccccacaaagtccctcggcacccctactctataagagcttaagcaaatcagttgaattctgtgtgcctccattttctcacttgaaaactgaattgatatttaaaaccacaatgactctgtaaaagagcttttgggccgggtgtggtggctcatacctgtaaccccagcactttgggaggccgaggtgggtggatcacttgaggtcaggagttcgagaccagcctggccaacatggtgaaaccctgtctctactaaaaataccaaaactagccaggcatgatggcatacacatggtaatcccagctactcaggaggctgaggcagaattgcttgaacccaggaggtggaggttgcagtgagccgatatcacaccactgcactccagcctgggtgacagaatgagactctgactcaaaaataaataaaataaataattttttttaaaaaaaaaaaagaggttttgaacaacaaaaaatgagattacaaactgggaaaactctgaagaaaagattgggctataccaaagtcaggaatcatacctctagatttggtatccatttgattgataacattccttccatacaccacgccttgcatgctctttggat

SEQ ID NO: 915261 - DNA, 4001 bp, Homo sapiens
cggttgagtgattatatagaataggcaatagattacagctagcaacagtgtgtgtgtccgataggagctcaggcctagctgggtggaagccccacccaactacttgcttgccgaccttgagaatattactcaacatctctaagcctcaagtgcctcacctacctataaagcagagataataatagaacctacctcatagggatgtcctgtaaattaaatcaaataattcctgtagcaaacttattgtaagtcctggaagataataatgcctaataagtgtaacttgctattattattattattattattattattattttcctcattgttattcaaaaatcacagaaacaagaagataaaaaaagaaagaataaatgaataaatgacaaaatttggaaaatacctttggatcaaaacagcagttgtatttgtagactgctttataattttccaaatattcttgcttcactcatcaagtatttattgtgttgggcaatgcactgtgttctgcagatactagtgaataagacagaggcgatccttgtccatttatgcattggatcctcaaaaccatagtcctataaggtagataaatctacttgacagataagaaaactgatgactgaagaaattacaacttaaaagtagacaatggaacctgagattcattcactcaacaaatatttattgagtgcctttcacatgctaggtgctttgctaggaactggacatatagaaatgaagctcagataaaaaagtatttgctctcatgttgcttactttctagttgtgagcattagaaaatgtcaaacacatataacatctaatatgtcagatgatgataagtattacatggaataataaatcagaaagtggaggtgggaagttcaggtgcgattttgcatagggttatttaggaaagtctctccagaaggtgctattgagaaaagacagaaaagatggggaaactaaggaatgatatatttcacaagggtccatttagggtcttctagcaggctttgatttgctcagggctttcctagtggcctcttttacctccttgtttctcaggctatagataaggggattcagcattggggtcaccaccgtgtagagcacagacaccactcggtctccctcggaggactggcctgtgttgtctcgcaggtacatgaagatgagggtgccaaagaaaagagcgacggcagtgaggtgggaggcgcaggtggagaaggtcttggcccggcctccagcagagtggatctgcaggatggccacaatgataaacaggtaggataccaagatcaccaagatacaggcaggcatgacgaaaagagcaaacacaataatcaccacttcctgagtgtagctgtccccacaggagagttttaatagaggagggaggtcacagaaaatgaagttgatctcattgtttccacaaaaggagagagtgaaggctgtgaccgttcgaacaaaggcactgaaaaaaccagcaacgtaagccccagtgactaggccccagcgggccttctcggttatgatggtgacataaagcaggggctggcacacggccgtgtagcggtcataggccatgatggccagaaggtagcagtcgatggaggcaaagaaggtgaagaggaagaactgagctgcacagcgagcctgggagatggttgtgccgtgctcccacagcacagccagcatctgagggatgatggcggacgagtagcagatgtccaccaaggaaaggtggctgaggaagaagtacatcggggtgtggagccgacgatcgccacggatcaggaggatcatgcctgtgttccctaacatagtggcaagatagaaactcaaaaatatgaggaagagaggaaccctccactggagatgttcagtaaatgcagtaaggaagaactccgtcactacggtgtaattcctttcagccatccatccagtggttcacctgcaacggctaagacaagagccagatgaggggacagctcaagaggagttcaaatgatttcaagtaacaaagctttaaattgaatgtcttacatgtcggcactcaacttcaacacacttttcagtcgaagatagatatagacagatattgagctcactgtaatataagataaaaagtgatgaatgcttctattatagaaagaacagagagcaagtgattcctgacttacaagtcagcgcttgtatttgcaactctgtccccaattagctgtttgatcttacacaaggcacttaacctctctgaacctcaatttcctcctctgccaaaagaggatcataatgcttgccctgcttatgagataagattaatgcgtaggttaaaacagaggcaaaagcacattggaaagctaaaagcactccacatatataaggtggctattaaaattttaaatgaatgttttaaggaaggaaaatttatattctctgaacaaaaacatataaacaaaaaaatctattagcaatcagcaatgggctctgcttgtaggaatattactattctcagtctaacaacatgcaagtttaacaaacagctgttatcctaattagagtaggctggcttattaagggtgtgtatacacacacataaacacacactcaagcattgaccttgaaatcaaaagagcaaacataagtttttttgggcacctaacaaagctccataagctttgtttggttgttctcaaagcccctaataaacacagtagcttgaaaataaacagcatccaaatttgaaagcagaaatatttttgtagtcttgtgttgtctgagtgctgttggagaaattcggattaataaatttgggggtccttagtggagttctagaacagggctgtaaaggagggctttgatagtgtttgagtacctgttgtaccagcagccagaccaatactgagctgacccattgaggagaataacaaagaaaacaaattagatctgaaagtcatgagctggacacaaactgtcctcacctgaattctactttgctaatgccctcctcttttgtttagtgtgttgtctgcccatcacctgccaagccaaaggacacctggcttctagttcacccacactgcatgtaagaccctgggcaagtcacgtttcctctctgggcttcagttaccttgcctttgttccctttccgtaaataaaattgcagataaccccataatcatagcaacctgatgagatggggtcacttccaatacttctgtgttttagtctcacttctaggagtctctctctttcctctaccccttgacaaaacaatatatccctgacactagtgtttccttagatttttctagacttactttgagataacaagactaggggaccagcctttctccctgagcttccaatctatcatgaaaccttgctgatgtgcttcttatattcgctgtcccagtattacaccctaattggttcctgaggtgattctccaggggaaggagacttatcttcatatgacttcctaacaaggtgtctaattaatacctttgaaagtttctctttaatttcaaacttccaaagccccatccctcagcaaggtctgatggagctggctcctagtcttgcgttcttcctgccttgtaccaaaagaaatgtacttctttgaaggtttcctatatctcaattgggagttttgtcaggggttttacacaatgccaccatagccagctatgaactgatccccaaaggaggctttttataagcataagcttttgctccccattgccaaaacatgctgtaattgatgacttcgaaagttcatcatttggcagaagtagagaatggtgcaggtggggagtcataagataaaatgttggagaggccaatgtgggtgggctgtgaacagacttccaccaggcaagctgagcaaattcttgatggtaaccaacccctccaccatagcactagttctcaaacttcagtgtgtgtaagaatttatccagagaacttgtttaaaatgtgaatagcagtgtccc

SEQ ID NO: 915262 - DNA, 4001 bp, Homo sapiens
ttacccggacccagtaagacaaaccagagtaaaggaggaaaagcctaaaattcaagtcagaagacacagattccagtcccagatctaccacttcctatttgcctctggaagtcactgtacctcttgtagcccagtttcttcatctacaacaaagggctaaattagggattcccaaacctgatagggtactagaaacacacaaggaaaattcaaagatattaactcaaaagcctcacccccagagattcagtacgtctggagcaaggccctggaatctacttttctttcttccttttttttttttttttttttgagacagggtctctgttgccctgcctggagtgcagtggtatgatcacagctcactatagcctcaaactcctgggctcaagcgatcctccagctttggccgctccaagtgttgggattacaagtgagggccaccgcacctggcctgcaatccacttttcttttcttgagatggagtctcgctttgtcgcccaggctggagtgcagtggtgcgatctcggctcactgcaagctctgcttcccgggttcacgctctcctgcctcagcctcccaagtagctgagactacaggcgcccaccaccacatccggctaattttttgtatttttagtagagacggggtttcaccatgttagctaggatggtctggatctcctgacctcgtgatccgcccgcctcggcctcccaaagtgctgggattacaggcgtcagccaccgcatctggcccggaatctacttttcaaagtctcctagataagtctggtttgcagccagagttagggggccaaagttctgtgagtgttcaagtagcactagcccaagtcaaccgcttccaaaaaactgcaacatacacagggtttgacatcacatgggtagggcaacagagagaaatggcatcagatcaccacaaaatgttctccgactggtacccggagtagcactgaccctgaggcccaacagtggaactgccactatcttaacctgcagtcaccaaacatgcaaggagtgggctgcagcgccccatgaagcagggtgcatagctccccacttaatagttgtgtgaccctggaaagtgactgtgcctcctagtctgtaaattccgaagaataataggatccacttactaagtagggctgaagtagataaccagggtggaacgtttagctcagtgtctgactcacagcgcgagctaaataaacgtcagcgcctgactgctaaatgttcggccgctttcttaactaacatctatggacgcgtcctctgggccgggcactggaagtcagccaggaggcaactcacagctcccccactgtcgcagcacgaggggctccccaggggctctggagggaaaaggggtgtggtcgggtacatctatcagcacatccatgaatactgccgtatgtcctatgattaaggaaccagaaaaaaaggcagctcccagatggcaaaggtctgtcctcccagaggacgaggcggcctcggaggaggggaaccaccaggctgagcagatgtttggggcagccctgacagggaaggcgggtctggaagagcagctgggcacgtgccccgccggagcgggccaggagaagaggaccagagcatcaggcccacacttgtccctgcgtccacggccaccaggcgctccccaatgcgcacgcccaagggacgccaggctccagcagccgccctgggccgcagccggcggcgaagccgctgggagacgaccagacagggcggggtgcgggcccggcctcaccacccacctctcatccgccatcacgatggcatcgaatatgtcctgactgccagccatagcggcaagcagcccgcccttggcccccgggtttctgcagccccgcggtgccgtagcagacccggcagcttcaggcacaaatgctccgcttgggaggagacgagacccacttccggaagcggcggcgcggggcaggccgggtaagaacggcacgcgggagggcccaaagcagcctgtacatggcgcatgcgcggctgcagcggtgggcggggccggcctcgactgaagccccgccctggggtcctttcgccctgcccagctccagcaaagggcctgtctgtccgcgctgggagcgtccattggccgcgcgcgtggagagccgacctgtattttaccactgcagatagaaccgaatttcccaaagtggctccgaaagaaccaaggaagaaatgggaagtcatcagctggcgcggtggctcacgcctgtcatcccagcactttgggaggccgaggcgcgcggatcacctgagttcgggagttcgagaccagcctggccaacatggtgaaacctcgtctttactgaaaatacaaaaattagccgggcatggtggcaggcgcctgtaatcccagctactcgggaggctgaggcaggagaatcactggaagctgggaggcggaggttgcagtgagccgagatcgcaccactgcactccagactggcgacagagccagactccgtcaaaaaaaaaaaaaaaaagggaaaagaaatgggaagtcatcaaagaaccgacgcctcaggaggctccaggccaggaggctctgcatgtgggattttgggcagaaatttgtcggttttagttctcatatttgtcatttccatgagatgtgctttctgaacacgatttttaaaaagggatttcaaagtctaagcgacaacggaactcagatgagaaacaccagaagcattcctaataaagtcagtagtaaaacctcacgtgaccactgaacatctttctaccagccctggccaatgcagtaaaacatgaagcaagaagtggaaataccaaaaaaaaaaaaaaaaaaaaaaaaaggcagaaatactactatttgcagatatgatggcccacgtggaaaacccaaatagtcacctaagacgttctcagaatccataatcgcagcaagtagctatgtgtatgatgaatagggaaaaaaacactttctgttattccaacaataattggtagtaacctgagcaggggtggtgatgggaaaatcgccttatgatagtcataatacatttcttagaaataagaatttctaacaatttgagcaggacccatataaggaaaactacagctctaccatgattgaggattggggaactgaacaagtgcagtaccaaagaaaattccatgagatctggtaaaatgtgtcaaaatcctaaactttttcatccgtatgaataaactaataaaaataactaagatgttttagaaaaaaatgattttcatatcagatatgaaaagataaagtgtcaatataaatattgtggtatgttggttcaagaagtggcagaccagtgaaataaagtaaatggcccagacaatggactctcatagatgtaaagccttctcatgtggtaaaaagaagaattacaaattaattggagaaaggaaatattaactaataactataatggaaaattggttgtttgggaaaagcttggttccatttatgcctcacaccattcatcaaaataattccagatgagttaaagagttaacttaaaaaaattaagcacattggctgggcacggtggctcacgcctgtaatcccagcactttgggaggcccaggcaggtggataaccagagttagggagttcgagaccagcctgaccaacatggagaaaccccgtctgtactaaaactacaaaattagcctggcgtggtggtgcatgcctgtaagcccagctactcgggaggctgaggcaggagaacccaggagacagaggttgcagtgagccgagatcacaccattgcaccccagcctgggcaacaagagcaaaactccatctctaaataaataaatgaataaagcacattttgcctgtaatcccagcactttgggaggccgaggcgggcggatcatgaggtcaggagatcgagaccatcctggctaacatggtgaaaccccgtctctaccaaaaaatacaaaaaa

SEQ ID NO: 915263 - DNA, 4001 bp, Homo sapiens
gctattgataagcaattatctctgtaactgaccgattcatttcacactaacctgagttttaggttagattagtgtgaacagaagtagtttcaaatcccagctgctcaaaaaccttgggaaagttgcccatgctaagtctgttttcctcatcagtaagatgggaatatttcccaactcctagggttgttgttgggagtcaacaaaatactataatgaaatactgtatataaaacacctagacacattgtccagccctcaggaaatgtttacgccctgtccccaaatcacctatcttaactcctctatcctttttagcccaaaagcgtgccatgtgatggccaggttatgagtcaccataaatatatattaaacagtccaaaataaaccttgttgaacagaagtaatcacaccaaagacatggattcttcttttaataaaagttaatcctaactaaccaaaaaatcacagaaatgccagataaaacacttaatcatttccacgggaggaggtggggcaagcaaaaataaaagcagcactggggtgcacatctccattctgggctgtccagaggccaaagcacatgcaaagtcttggagagataaggcagaaaggggacggaataccgaagccaccctgtgtgtgtgatgcccttatgtctgaatgtgaagggagcaaggacgggtacatccagagctacgaataaccttgagttttggagactgggcactgacagctacaacttgggacttccactgtaagttccttgggaggagtgcctcgggtttgttctgctgcatgtgttcccttagtacctacaccagtgccttgcttgcagaattaataattgcacccatgtgctggtggaaatacaatggaagcacagacgctctccaaacgactaatgactggaaaggccgggagcgaagggaagataaggcaccaagagtgggtaacccgaggggaggggaggtgtacgtccaggggcttttcactttcgtgacagtgggctccgacccctgggctgtcaatccgcacagatgacgaaaaggggcctggggcaaccctggctgcggtgccggctggcggtaatgccggagctgggactgttggcagatatgggggaggcaaggtgagcgacagcgccccggaagcagttacctgtagtagctcaggagcccgttgctcagcacgaaccatcgccgctggtagcctttgatataattggtccatttgaagagccagccctctcgagccgagcccgaacccccagcgcccgagccgcccgagcccccagtcggcggcgcaggggccgggccagccgccgccactcccccggcccccgggcccgggcctcccgccgccgccgcgaccaccgtccctgacgcggccccggagcctggccccgcatctccgcggccgccgcctcctcccaccactgggggaccggcgccgccgccgccaagtgctgcaatggctgccgggcctggccccaccactcctctcagctccgtcgccgccatgagccgccgccgcctggagatacaagaccggaaccgcctacgagagccgccgtcgccgcccggagcgccccacacggctaccgcatcagccaccgccgcgcagcgtccccgccccgcccggccagccgcggggaggagggctcggccgccgggaagaaggacgtcgattggtgccgctgagtgtcacttgaggaagaccccgcggatattggcatttctctcgggcctgtcattctacagcgcccagtgagagcctggggtgggacgcgtccgccagacccacctttgattggttcagataaaggccaatcagacttttggggaagctcattggtgctttcctgaagtttccagcgctcagggaggacgggagaatgcggaatgcccggccaatctgatcgccgattggctgctgtttccgccattcatttcagtttatgcgcctgtcactgccacgtcaccccctcccatcgctcttctcatcatccttttccgccctcatggattggtggttggtatcagctgctccaccttttctaccatttactgaacgagttgaggaaaaagggaaggagtctcgtctttacatccttattttctttttttattggttggcacctatgccactcacgtggtggagaggcggggcaatagttggagatgattggttctgagaattggctgtgaaagcggcattgctgaccagtgagagagacctaatgaggagcaggccggggcaaccaatgaaatcggagaagagcgcttgggggcgtgtccgcctgctttcagcctttggcaagttggtgggaggtgaaagtgacttggcctcttaaaagcgtttttttcacgtgggtgtgatgtcgtgttccgtttttctgaataagaacttcgtagcttcttgttaggaagaacctggaggacagagtaactctcggcagtcagcccccgcctgaggctctcttgaaggacccccttctaactcgaagctggatacccagattccaggggtgcccagaagtagcttttccagccccttcctggatccatggtccccctagttcccttccctgtttgctctttatcgctccacaccccttgtgtcttgattctagactgtcatatgcctataccgattctgtccccttcagaagtagattcgcgaggacctgactttatgtgtctcttccagacctaaaggcccttggttttagcatcataggtgccatgtatatgcttaactttgaacagaaaattattattttttgtatctttaaactgatatatcgtagttgtacatatttaactttggacagaaaattttttttatatctttaaactgatatagttgtacatattttcagggatacatctgatattgtgatacatgtattcaatgtataattatcaaatcagtgtaattgggatatccatcatctcaaacattatctttgtgttgggaacattttctgctatgcgttctcttgtagcaggaaatcgttatttttgatcaactgactattcacacatttgtgaagattacaaattcagtaactaatgtaacatttagatgtaagctattgttgcaaatgtaacctaaagcgccgtactttagggaatctagcatctgttacattttgctagtttgaacaggcaatagaaatagctattagatactgtaaaagaaattgactttctttgccaatgtgcttcccagtgtcaataaattaaagtatcctttttaagaaaatcgtttcaaaagaagcgaagtatttattgaattctggagagagaatactctttaaaaatctgcaatttttactatcagggatcatttgtatagctcattactagtgaatttctctgaatgtgtagagcaaaataaaatctgctattagatgtaggctatttgggattaattttttttttaactgagctagagttaatccatttaggcttgagtcctgcttttgctacttactgggtctattactttgagaaaattatttaagcactccaagtctcagttttcacttatgttaaacaggaataaaacctcacagggatgctgttgtgattaagtgcgtttgaatgtgtttgataaactgtagatagctacaaacatgtgagttgtgttgccaaacacatctcacaggttacttgccatcacaaaggagaaacatacttttacaatggggagatctggcagtccccaccttaacccagttatccaatgtgtatcagtaacccttggacaaccaacatttttatgaagttcccagtgtgctgcagcataaagtatacagcatcacttaatggtgttttcttgccaaaatactgaaagttaatctaatcaaggctttggatctaaactccagtttactgggctggaggaaccagttgaaccataaccccaaggagataatcagataaatcaagaacgtgaagcattctataagacaactattttatagaagataagac

SEQ ID NO: 915264 - DNA, 4001 bp, Homo sapiens
ctggcagagacacacacagcccttccacccgccggcttgtcacagagtgtttctccctcccccaagcgttacatgtcagattactatcagcgctcagagtgaggccaggatctcaggagagaaactgataccaggcattctcagcatagtaaatacaatcctgggtaggggttgggtggggggggcggtcttgcgttggtattctgtaaagagctgaaagcagtcctttgaagaacatggcctattcatggcccaatctggacccagaaaggagcctccactggacatgcaggatggctgcccggggttcgacatctgcagggcagcctctctgagaccaggcccaggactgcaggtcagaggctcctcatccggcctatctgctgtgtcacctttcttaaacacagcctggcaagacagacacacgcggtgcctgcctcctggcaccccaggccagccccacacgcgtgcaggcagacaataggatctgcagttctggagcctgagaccagaagggagcagctgggcacatgatgccaccccaggttgccacaaacctgcccgatgcctgcaaagcccccactcacctggcaggttcaaggaacagcaaggccctgtgtaccaaggaggtgggataaaaacgtgcagaggggccttactcctggggttggggagcagagtttctgttcagtctgggatctggatcagccctggtgcaggcagacccaagagcatctatctaggatcccaaaggctggcccacttctccaggctttgggaggctgtatcaggtggggtgggacccttacagaagtcttcctgtaaaaggcaccttgaagagactggggcagacacacagaggggagcaagttgcgaaacggcaagagaggaaatccacccagccgcttcggcggggcagacccgctcagcccaaggatgagggaggggctgggctcagcccagggacgagggaggggcaggtaagcccaccctgtgacccctccatacccccaggagtcaccccaaaccctaactccagttggcttctgacaggaggcagcccagcggtctgggtgggggttgggggcggtgcctgggaagcccaggacgggcctgttgcccggggggctgcagactccagcctccttcctgcctgccccaccctcctgcaccccgctccccgggaggaatcttcaagtgcacaagaccctcttgaggactcaggcacctcaacaatccctaaggctccacatcttcagggggtcagtgccccagagatgggggctgtgggcaaggtccttccctagcctgtaatccaggcagccccctgactctgcggactcagacacagcagtcctcccaagcccgcagctgggacgccagactcagatcccagaccccctgcagacccatcaagacctggctccttggagcccgcgtcggccgagctggggggacagaccccctgattggccagggtttgtggtggtcagacccagccaccttccctggcggtcccggctcctttaagccccaccaagtggggagccgagctgggcgcgccgcttcccactcgcgggccccacccgccccaacccgccaggcgccgacccgtcctggcccggggcgcccccaggctcccgcgctccccagctccccagcgcgcgaccggccccgcggcgtggttccccgcactggctactgccagggtccgcggggctgcggcgcgagctcctggatcccttcggccggccccccgcggccctcggttcgctccggccctgcccggcggggccctccggatccttcccagcccgccatccccccgccgccctgccgccccccgggccgccgcgctcctacctcctaccgtgccgcgagctcggtgctccgggccggccgggcgcgcgggggctccactggcggcgcgggcctggctgcaggaaatgccagcagatggtccccccgcgcgaggcggagcgagggcgcggcggagggaggaggcccagggagcccggaggcgggaggaggaggcgcggcggccgcaaaacccgggccgaatcgccgcgcggagcgggcgcccaggggctgccccccaccggctgccgcttctcctcatcccccaaccccccgcgcgcgctccggggctcacacccacccgggcggccagaggtcgggacactccgctgaaaatggccaggaggcttggcggggtgggcagcggtgagtggggtcagcttcgtggggttctccaacttaggggtgcaggcccccagcccaccctagccagggtgcgaggcgcctcctctcccttcctgaacccaggaaactgtcgccgtttctccccgtctcaggagccatcagaacacaagaggagccccagacatctgagcccgttgtccctgccccttatgtgctaagaaggaccctcagtcacactctaactgtacgtctttctcaggacccttttgacaagaacctcccctcatgtgcatttcttcctgtgttttctcctcaccttcttctaccccccagagacctttttagacccctcagttctcttgtatataaaagacattctaattcccctaaacagcatccccttgggagctgagaagtcctcccctggcccctggctccctgcctgtagaccctaaattgggtgtgggcccagggctggccccagggcgtttgcatccctagtgtccaagcctgaggtgcactgcaggtccttcctatggtatgtccccaaatgaccagaaaaactgggagctgggctcgggcatccccagatgtaggtagaccccaagagggcgtggagtcttttccacacagaaccttaacagggacagaactgaccctccgcagagagccctgggctcctccccaggcagaactgccactgacacgtgtgtttctacggtttcacgctgcagttgcattcgggaggccgcaagcctggctatcatgggcgtctgcaagacctcccagcagggctgcggagggcgagcggcccaggaaggctccttccagcacctgaagggggaacggcacagcatgcaggtgctctgcccacaacaagccagaccccttcccgtctcagccctggccttgcccaccccgttagacaagttggtgggtatcctcctggggatagcagcaccagccgcttgtgtgcggatcacaggaacccacggcttacggaggcgagtgggctgatcggacttgccctaagcttacccccagggctagcattgccattccatagtcaccttgtgaggccttgggatgcagaactgctcagtcaagatgctcagggccatggtgggaccctgctccgcgtggcctgtggcaggcggcctctgcctctgcaggagagggtctgtgcagctgggatccacatacaactgctgggtctgctctttgaagactccgcccaaagctgaggtgctgctgcctggtaacttgctggttgctggagccaatccaaagggaattagggaagaaaacaaagcccctatccctagggcggaggtctcaggggcggcagtagggaaggttgccagttgcttgatgctggctgtccagggcctgggtttcatgaaatgacactgctgagggcagaggtcaaaagtcaaagaggcacctgagggtgggggaaggggccatagatgacagcagggtggggctggggtggagcaggacgagggttgagcctctcactgggtagtgtctgacagccagatggccatgcaagaaatgaagaacacgccacctgccaggctcagtgacaggtgtcagttgtctgccccacttcccagcaggctctgcatttttccagaaagccccatttccagcctcttgcctggttttggagaggcagtgagccgaagaggttgcccccagcaagaggtaggtccgaatcctgctgctgccagaaagaagctctgtcaccaggcagtggcttgttcctcctgggaccccgcttcctctcctgtcag

SEQ ID NO: 915265 - DNA, 4001 bp, Homo sapiens
tcatgtctatttccaaagggcaggagttgggactcattgctgtcataaacgattctccccaatctgctggctcaaggggctccccagagctgaccgctggggctggggcaggggcacttgagctgaggctcagctgctttgggggacctagctgcaggtgggtggaacttatagctcatctgtagttatagaaagagggagacaaatgcgggccaggattagaaagtagacctgagtcacctgatccagagaccaaagaagtttggcaaagggagaaaacaaaactgccacctctcccacaaacacagaggaccgtgggaagatgggcagtggaatggtcaagactcaaaggatagaggccgggctcagtggctcatgcctaatcccagcactttgggaggctgacacagaaggatcacttgaggccaggagttcaagaccagcctgggcaacatagtgagactctgtctctaccaaaaaaattgaaattcaaccaggcatggtggcacacacctatagtcctagctactcaggtaacggaggcaccaggatcacttgagcccaggaagttgaggctgcagtgaactatgattatgcgactgcactccagcctgtgtcacagagcaagaccccgactcaaaaaaagaaaaaaaaaggctcaaaggatgagttcagggctctgcttctcaaccaaaccttccttgcaacttccaccaggtggcctagtttttgtcttgcctgcattcttgaggctccgctcagggtatggagaggagcctctgacagggttgagggccttcgcaggccagtcagggaaaagagaactccattcttctaaacgtccatctttctacttttacctgccagaagggagagctcagctctctcctgaaagagccctggtgcccacctctcctaaaaaaaaaaaaaaaaaaaaaaaaaaaaaaaaaaaaaagagtggactatagacccccaagagattaaaaagaatagaagggttttatgaacttgcacacctcagacacataccaggaatctgcttgttcctttctgaacaactccagagacccctcctgtaacctacagagctccctgccagcctcagatccagatagacatgagctcctgctcaatgaagccccctcccaagacctcccttacctggcctcccacgactgtagccttgtcccccatggcaagggtcgcctcctggtggctgctgctggaggaaacacgagtctggcatggatggggggctaggatgggttatgcctccccgcagtcccctggcctatcccaccctaagtgctaaagccctggggtcgctgatgccagaaatacggatgggagctgtgggtggggccgccacagctcacacctactcacctgggttgcccggctggctctggctgtggctctgcactgccccacagaacgggtgctgcggctggggagggggattattctccactcaaattgtgcttgtctttactggggcctcccaccacctggcccccactgctagaaagcctctcccacgccactgagcattcccccattctccctccctgcagccttctcaaatcctttctctcccttcctgatgacccttctccagccaggatctccctgtttactctcagtctttggcccccagctctctctagttccccacctcgggtctcttccacccagcctaactttggactctttcccccgcggtcataggcctgcctctgttggcttcggggtccctcctcccctgactgctcctcctgggtgtccctctgctctccctcaaacctctctttcctccctctctccaacctgcgcgggcccattcctcattcctttaacgtttctcattcctcgagcccccgacctccctgagtccacaaccctctcaccgaggcgctgcacccgcagggactcggctgcctgctcaccccagggcagccagacacaaagcagccagcagagcgcagacgccaggactcccatagggacacgaggggaccggaggacttgagcgcagggccagcctcccgaggtgcctccccgggctaaggcagggtcacacctccactccgcagccgaggtccctcttgttctcatgccccagggctccctcagcccctcctcccaggctctcagctcctccccgaactagagtgacaggagtacccagcttattaccataatttaggcgcctgtccatagcctagcctctgcttttcttggcctgtggccacacctccccaggggaggctggattcagattactcagccctaaattgtctagggaagcatagaggcagcctatgcaacctccagctccccttacctgggtcctggaagcccaataccagagacgcaagatgcaggtatgagtctggccctatcctctccttttacagagggccatgctgaggccctgggacatgccactcagggatcagtggtcaataacagagcctgcagagtcctagcctatgttctcaccatgccccacctcagcttccacctgggtctccacatccgtatcctatgaccagttttgagcacctctagggaatggatcatgccttagtcctctgaatgcccagcaccagctcctgcccgagctcaggaaatgacgattgaataataaaagtgtttcatactcctatgttattgccaccatcaaggccaaactttgacaaaacaactttatatgtgtgaacgaggtccactgtctgcccaggaggaattttaaaatggcaaaaacatgggactgagcacctggggaatctgtacatcattcacttcgtcatcacttagggaacaccaactagatgctaggtcttacagaggatgatgatgatggtggtggtggtggtcgtggtggtattggccccagtagacttctaggcaagggtatagatttgagatgcattcattcattcattcattcattcattcactcaacaaatttgtttggcattgattccatgccatgcactgttctaggcatatagtggtaaataaagcaaacacagctatcttcacacaggaggaagctgggggcacagataggaagatgaagaggaaagagctaaggatggagccttaaggaatgctggttaaggaacaggcaaagactgattgtctccaaggaagcttgaaacaaaaattcatgagagaggagaaccaggtctcaatgctattctcaaaacaaagcagggggcattttaaggtggagggagtctgtgggggtaatggccaatgtaaaataaggattggtgtggcaggtgaacagcattcccctggataaggacattcattcacctctgccaggattctaaatacaaaataaacagccatatgacattcttttccaatgtagagaatcaatgaagtaagtcggaggggaatgcattttgtgtggccttttctggaccattcaaaaatcccacaagtctttccattttatcgctgacttaatagttaatgctaaggtgagaaaacagatcatattttaaggttcttctccaagagggatttacatcttaaactaggcaacaaaaatagtgtgcttgtaaaacttcagctattggggagagggacgcagaggggtgtttaggtgccccagagttacaattgtaagtggttacctgatgtaagctgctgtccatctccttgcccctgcccttgacagggcacaaagggctcaggtgcctccctgggttaagttcaggcacaagccccatacttagcctctgatttacacatttttatcacccctctcctagcccctctttcctttcatctctttccaggcctggttcatcattgtctttgatgaatctttcctttcattcctttccaggcctggttcatcattgtctttgcaccaagcactagacctaggagttaagcaaatgctgaccaaattgaattaaatgaaccagagggtctgggccctgggtgaaggtcagccatagatcaaaatgtcactgcca

SEQ ID NO: 915266 - DNA, 4001 bp, Homo sapiens
gcagcctgggaatgttctggggccaggcgtggtctcttgcagaaagtaggacgaggaagcagagtcctggcctggaggagagcttcctatgagcctgcactttactccatcaccgccttcatcctcttgcggtcgtggatattgttaatggtgcccattttacaattaacaaaacaactgcagacaggtgaagcaatctgctcaaggtcacaactagcaaaagacctgcggtcaaacccaggtttgtctaattccaggctgagctcttcagcacaatacctctccttggctaccacatggcagagacctttcctcaactgtaaaatggggcgagtaccctcgcctttcttagaggcataccagtacgtgctctaggattatcagccagctgggcaggtccaccctatggaccccactgtgagcagctatcggtgaggagctaggacacctgaattttagtcctggctctctcttaatgtcatcttgaacaagtcccttccggggccgttttcccacttctcgttccctcaagtgttcggtgagaatgaggtgcgtgggctgaatgactttaaaggtcaacccttttggggctcgccatcccaaattcttggctgggcgtcgacctacctacccttttcgcactactctgcaaaagaactgtccctgccacccaatgacctacgcggtccccagggcccaactcataggcgggaaaagacagagtgggaccatttttgaaaggcccatctcctaaggagactaacaatgtctaggcaggcggaaaggggctgcaaggccagaagaggcggctctaccagaaaaagtcgcaggcctcagggacagatcccgcaggcccctcacatcccagggccgcctacgacatcccgaatggcccgcccggacctttgtgctccgtagcccagcgaaactcgaggccctcacggcgcgggccgccgctggagcaggccggggggctcggccctggcgtaggcctctctgcctgactgcaaggacaggggcgagagggctcggggcccctggagccaggagccgaggggttgggcagagggcggagcgacccaggccccgccccgggcgcacacgatggagaagggccgcgggccttggcccgcctcgcccgtgctccctcccggccgggggtcgcggcggtggctccttccattgtgagggggaggggaggcagcggaggtggaggaagggacccctcgcgcacctcgaccccagagccagcggccctgcctcccctccctcctcgggagcagctggcccggcatcgcccccactagcccgggccggacatccctccttggatctgtaccttcggagtcgctgcccagcggctcctgcttctgctgctgaggttcctccgccgccatctttaaacagcgccgcactaccgaccgcttccgggttgccaattgccgtcctcccggaagcgagcccctcctcgttgccccgccttggcaacagccctagcaacgggatccccttaggcgttgtcaaggaatgggcttccagtcccgtggcaggtgctggcacgccaggcctgcggacctgagacctgtaggagaggccggccgccccagatccgcacctccaccccacacattggtttggctccatcttcccagcctcccaaagttcccggtggtgattgcagatcctcctggagccaattccgttttcttttccctggagtttgaaacgcggattttgttattgagagaagtagaaaagtgaaattaaaatcaccgaaggcagcattcctgctgcgggcttcggcaggcactgcatgcgaccatagctgcagtgcggagcagcatctgacccaggagacaggaagtcggccagcgccggggcgcccgcggagccccacatcgtggccccacggaacctgggttctctgccggctttggtgagctgcttccggcaaggagacagcatcccttggtgtcaaggccaaagcctcatgacctaactttgggctctgtgtccttctggtttttaaagcaggacctttaaaaaaagaagaagaaagaaaagaaagggtctcgctatgttgcatagggtagtctcgaactcctgggcacgagcgatcttcgggccctgcctgaagagtagctgagactccagccgcgagccaccactaaagcagggtctttataaaagcaaagacttcacaaaaaaggaaaataatggttgccaagagtcaagcggaggtgctggagggaagtggatgtggctgtgaaagggaaagtctggattcttgtgaaggtggaaatgcgcaataccctgactctgtcagtatcctggtgtatgcttcacaacatttttgcaagatgttagtgggggcaggggagactgagtaaaggatacatggaatctttataatttcttttttttttttttttttttttgagacggagtctcgctctgtcgcccaggctggagtgcagtggcacgatctcggctcactgcaacctccgcctcctgggttcacgccattctcctgcctcagcctcccgagtagctgggactataggcgcccgccaccacgcccggctaattttttgtatttttagtagagacggggtttcaccgtgttagccaggatggtctcaatctcctgacctcgtgatccgcccgcctcggcctcccaaagtgctgggattacaggcgtgagccaccgcgcccggcctctttataacttctttaagttccctgtgaattatctaaaaattacgtttaacattttttttttttttgagacagagtttctctctgaccatccaggctggagtgcagtggcacgatcttggctcactgcaacctctgcctcccaggttcaagccattctcctgcctcagcctcccgagtagctgggactacaggcgcccgccaccacgcccggctaattttttgtgtttttagtagagacggggtttcactgtgttagccaggatggtctcgatctcctgacctcatgacccggccacgtcggcctctgaaagtgctgggattacaggcgtgagccatcgcgcccagccacgtttaattttttaaatagcaaagatggctgggtgtggtggcttatgcctgtaatcccagcattttgggaggccaagctgggagaatttcattggagaccagcctgggcaacacagggagacccacccccgcatctctataaaaaacattaaaaaaaaaattagccaggtgtggtggcatgcacctgtagtcccagcaacaggagtgcaatagcgatctcggctcaccgcaacctctgcctcccgggttcaagcgattctcctgcttcagactcccaagtagctgggattaaggcatgtagcaccatgcctggctaattttgtattttcagtagagacgaggtttctccatgttggtcaagctggtctcgaactcccaacctcaggtatccgcctgcctcggcctcccaaagtgataagattacaggtatgagccaccgcacctggccttgcctagctcttttcaatgatggtttatttggtggttaataactgttctcttggccaggcacagtggctcactcctgtaatcccagcactttaggaggccaaggcaggtggatcacctgaggtcaggagttcaagaccagcctaacatggtgaaaccctgtctctaccaaaaattcaaaaattagctggctgtggtggcgcacgcctgtaatcccagctactcaggaggctgaggcacaagaatagcttgaacctgggaggcggaggttgcagtgagccgagatcaagccactgcactcctctagtctgtgcgacagaacgagactccatctaaaaataataataataataaataagtaaataactgttctcttatcctcattccatctgtcctgttaattttactgtgtgaggattttggttctctatcctgaatcatctaaatcccacctgcaggccgggctcgctggctcacgcctgtaa

SEQ ID NO: 915267 - DNA, 4001 bp, Homo sapiens
gtacaagtaaatactttttcttatgacattcatcacatgccatgatgactattctgtctttcaacccaactaggctgtaggctcctcaaagatataaacttaaccttaaaaatatctatatccataatatctagcacagttcttgatgcatagaagtccttgagactcacctgccagggataggaacccttctccacttggcttcctccaagaatgcgactgaaaatgttaaaataattccaaggctgtaccttaaccagactctgcccacaactgggagctgagaaaaaaacgagacaaactaaatgattagatagcttctaggattgaggtaatatcttctccatttcacccatgaaactgagtctgagactatggtgtatggtgctcagcacacattcagatatcaataaatctttattggatttaattctcttgagggatgaaaagtgacaggtcatttaaggagagtggagtgaagtgtcctgattcacaagttggtactcggatagaggtttgctaggtaatagaagaaaaaactcctccctctttatgtaaaatactttatccctgaaaaagttgtttttatttatttgccctcaatgggttttctgactcctcagcaaagaggtagactagattaaagatgtttaacatcacctggtaactcaaggatggcacatcttctgtccctcctggaggtcatccttttccatattttgaaggaggattagaactagccttgcttcataatcaccatgcttcattgcctacctaaattctgtaattcttattcctcagcttggagatcacctcaaccaggaagtcttccttgatttcctcaaagtgggattgcctctcccttgtgttgtgtagcacgctttcttcaccccttttatagttcttgtcatgcagaattgtgataatgaattatttgcctctatcatcggactatgaactactcaagggaaaaaacttgccttattcacctctgcatttctaaggtttagcttaattcttggcataagtaagcacttagaaacactggatggacaaacaaatgacttttcttgagaacacatccttaagagtatagctatttagatcaacatgttaaaatattcaaagctctttcatacagcttctcatttaatcccactctatgcctataaatgaagcactgttatccccacattgcagatgagaaaactgagaatcaaggagacacacagctggataatggcagagcatgaatgtaacagtaagtgttttgatcctgaacccagtgccaggatgacattggaacaaaagcttattttctaactgtttcagttgaatgagtcataaatactttaaatacaaaatttactatttcccaaattcagtaaagcaaagtcagaaaacatgttgattctcagggttggcacaagtctgaccaaggagaaatcttccaagaactgttttcagcttaagttagttgaaggggaaaaaagaccatttataatatactacagtgaacatgcttcatatttctcagcaagatgattttgtaaaagattaaaaatgcttccaaatccatgctgatttccagaatttgctctatgaaccaagatgggattatgtaatgggttcaagtaagtgaacaatctcagttcacttaggaaaactaagcgaagaaaacagggattgtttacttaattggatacattagttgcattctataaatgtttcaccctgtgtcctatgccgattgcaggagataagtccaaaataattgtttaaaaacaattagatatccaaaatatatttgcttctcctattttcccaaaggaacatggagtctcggagttgtgacgtccattgccagcaaaggttcagacaaaggtaattatagagttcatttgaaacttacctttggggagcgaaagagttgcagatttacctcgttcaaaaaagactattcctagtagtaaaatcagcttgttcctgcttataagcattttgagactcatagtttttccctgaaattttagagagactaaagcaaacaaaaataggaagccttgagagaccagcaataagccaatttaaaacaagtttattcattaaccaagacgtggtgaatcaagcatgtccatctgatgtttctgaatgtagtgtttcgcaaagatcttttggaagatgtggagaaacaaccacagaagcagagtcttgatcaagcaatattacatatcctattacacctacaccaattagttgattcctccagagtgtatctggctagcaaagtggttagcatgtaagatttgcatctgcaaacattacttgctcctttgtagagcttaccacttttaccactttctataagaagattgactatcaatgttgtccttgtttgcaagggtacacttccctacttttttgcaaacgacccatccaaatgtatataatttttttgggcagagatggagtttcatcatgttgcccaggctgatctcaaactcctgggctcaagggatctgcctgccttgccctcccaaaggtctgggattacaagtgtgagccaccacgcccagccaatattctaaaatatttttatttatcttattttgcaaatgtaactacatggttattataaacatatgttggtgaatgagagaagtggaaagatatttgggtgtcacactcaggaagccctgctgttagaaagtcatctaggatactgtacattggggcatttgtgactctgcattctcctatcatttttgtatttatagaagggaaacactaaatctcctttacttctatgcctggtagatgcttgggagagtaaagtggctatgattacctgtacattttcctctttcctcaacgagttttgggcacatggtcagtgtgtgagaaatatttataggatggtcaatgccatctatgaccagatagaaatataacatttttctgtcaacttttataagttacccactaaaaataacaaatgtcagcccaaaagctcttaatttccttttggcaacttttgtctttgtacaaaaaagtatgaaaatacaacacatacaaataatataaatgcaaaacagagaaggtgtaaaaacttaacatttgtaagcactacatatttaggtacactaatcaagaatgtagccttatggaaagaaggaaactcaaacctctattgaggctttatctataactactgtaatcctgatgccaaacatttttggctattggtatggagtgatagccccaagaggtaatcaatcaatgtctaagccctaatcaaagtctcaatctttctttgacagcaagctccctttaaattgctattgtgttttatcaatcacttttgagagcaacttgactaggaatatggcctttctgaccccaaattcactacattctgtctaaaatgtgtatactgttaatgtcaaaagtgcagaaagacctagtgtgggcctaggatgcactaaacttgacaagcctaaagtaggcacatagcataggacaataaaatttgactctatactgaaagaatgatgagttttcctttgtaaaatgtgggagtggagcgtttttattgattgtcacacagaaatatgatgagctcttgcttagtgcttaatttcaggagagggtatttgcttcaagctcttgcatcagcacaactatcagtacacatcaacacactcttcaccacatgaagctggtcattaagagtttgttactttcatctcttaaggggctaaaatgtggcccccttgctgttaaaatatttgctcttcatgggggatgtagcaggttctaagacactatatttttgtaagtccagctattcaaccctcccagggtctggataggaattataataactgtacattgtagttacttgcagacaggaatatattaaagtgttgcttggcatggtagtataaaatcaatttttcattcatgaaactattaaaccttttaaaggggaaaaaatctct

SEQ ID NO: 915268 - DNA, 4001 bp, Homo sapiens
gtttatcagatcccaaggagcagctaagcagcaagtcaaacacaggtgagggtggagggcggagggcggagcggggagggggctctggccctctgcgtgcccccaccaacccccaggtagagaaccagccagctcaccagggagtgtggccaagcaagaagctatacacagaattctgagcccacaccctaatctgcctcaggtggggaggccactcacttccctttttgcctcagtttccccactggggttaccagggtcttctggcacattcccttgttttaaggaacggtggaagaggggtccccttgagatcaggttaagctgtgaaacatcctgccagcgccacaggccactgggtcctggaaggtcaggccacaaagacctcaccaggacactgtctccaacagcttattcaggagggaaactgagcaagagccctcacggggcccctcactgctgccctcatttccccactttcctacaaggcctggggcggtgccagggagtctgcagatcaagggtcaaagtcagttggttaattactcctcccctcccccctcggaggggctgggctgggcgttcagagcgtccacgccccgcccccaaggcctggggagggggcgttcggaaggaagcaggctttctccagaccaaagactttgttgggggtgggggaggacagaaggggtaggagtgttcttggggcgttcaggggaagatgccgctggaggaagaagcaactctcacagtcgacgctgtctaggcgtctgccaaaaataactgggtacaccagcttccccgggcctggccctccgctgtggggtgggctccctgcagctgctttccatgcaattgtgccctccgcaaggtgaaggaagtgcgtttctagcagaggtgagacccgatcccacctctgctttaagggcaagcggggcgcagcgggcgcctgtcccaccgtctcggctcactgcgcgggactagcagccggagcccaacgaaaatttgggggcccacgccccccaccggcccgaccctcactccgacccggccaccagtgttgtgggggaggaggaaggacctgtgcgagcggctgaagctctgagcttttaacacaaatctcggccgaaactccagcccgctccccgccccccaaagtggcatcgctccagtgccttctcccgcctcatgcgagtcccggttttctggatttacgacgtcggagccgagggtcgcctgagcggtgacacaccccgctgcctcctctgtgccgcggttcagggggtgggggtaggcggttccgcgccccctggccctgggagcggctccccttccaccatgcagcccccgccccgaccagcgctcttccgccggccccgcccccgccccccgagtcccgggtcgagagccgcgggcccacccagcccaggccgcggccgcattcagccccggcgcccacaccgcgcctgccgcctggctccgcggacctgcgcccgcccgcccgcccgcagcctcgacgccgccgcgggtgccccaggccggagggcggttggagcctcacctggcacgtagatctcgccgcgctcctcgtcggggagctcgctccagttcctcttgcacgtggagacgcacggcttcttcaccaggaacgcgcggggcattttcgaaccctcgtcgctggacacgggccgcttccgtaactgaagccgggagccgtcccacctttgcggggccgggctgaacgccgggaacgggggcacaacagggaaggagtcgctaaggcgcccccacgttccggggaaggtccgagcccggacggcgcgcggcggttccacctccgcggaatgtcgccgtcttccctgagaacgaggtcccttgcggccaggtgcaccgggcggcgcggggaagcggcaggtaagcgtctcccggctcgactggcgtccccgccgccgctcgggaagtcttaaagtgcgagccggacggacgggttcacgctttattggctcgcggcggtgtgtgttggtggctggggcgggggggggtgggggtggggggcggtgatctgatctaattagcttggggtggcccggggagcgacggcgcatgcgttgggaaataacggtgacaacccacctatttgttacctgtcgaaccggtttccattccgctgcgggtgaggtggcctcgcggcccgggcggggcggccgggcggggcggggtcggggggcgagcttcgggcactcagcccctggctgcccagccggcccggcccccgcgggacctcctagccaggcgtactggcgtttgcaaacaggagtttcggagcgagcggagccgggagggagggggcaacgttatttgcaccggcgctggcacgctccgcgggtgatgacacgaaactcgccccactggggccggcccaacccggcgcgcccgaggctcctggggaggcgcgaagccgccgggcgggaacgggcggcccggtccgcacttgttgaaccgggcctgggcccaggcggcgcgggatcccaaaggcttggctaagcaactcgtggctcagccggggaggtgtttgctgggcgccggctttgtgcgaaaaggcacgcagggccgcaggagcggccccggccggtgtgtggggaggcacggaccgcgcgaccgagtacccgtcggagaacccgccttctgcccggagggcttcacggaggaagtggcttcaactgcgcggagtgcgccgagagcccgacagacccccgtgtcttggccagtgggacttatgcatcctcaaaaaaactcctccttgtcccaaatgggtggatttcaggtgcagccaggctggtggagcgcggagggctggggacctcagaccgggaaaggctcagccgcctttgccctgctgcggccaccgcggagagcttcctacccacggcctgcccagggctgaggttcagcctgggacccgcgcccccagccactcttcatactctcctcaggccccaggcccacgtggagggatgcccccgctcctcagaggcctccatgaagcccacactctcatcgtgacacttgggcgctggctgggcttccttcactcgctgacctacttaagggcagggatggggcgttcgtgtttgcctcttcccctgcctttctaagggctgtgacctccactctgatcccagccagacctttgagttcaactgacattaagtgaacacctggtatgtgcctatcttttgaggtgaatccaggagaaacaaccttaaacacaatctgtctaggacagaggtgcagttagttcattcattcaacaaatattggttgagcagttttgttgtgccaagccctgatgggctggtacacagtgggtgctcggtggatactacggtgaagtcttcacagatgtccctagacacaaggggcagtcttccccatcaagggagcaactccaatgtccagagggacaggacactgggtagataaagtgaagccagccaggggaacccctccctgcacaagtgagttacaggatgtggaatggggccccaggtgggaggcggtgttgtctactgctatatctccagcatctacagctgtgcctggcacaaagtgggttatcaataaatgtttgttgaatgaatgaatatcctcttttcttgactcctgtgacccattcacctttcacagtccaacttttggtggagacatagatatgggaagacaatactacaaattcagtgagaaaacacaactggccctggccgttggggagaacagagttggggggacgggagagaatgtccctatctaaacggcagtcacaatcctgtcattcagatgcacaaaccccacgtggccacagctttccattttccaagagaagccagaagtccagatttgtaagtgaaatcaactaatttttaaatgttagctcaatttttttatttttaaaataattttaagagttggggtctcaccaggtcgcctggctggagcacagt

SEQ ID NO: 915269 - DNA, 4001 bp, Homo sapiens
tcgctccagcaggctgggctccagccctgaggactggaggattctatctgatcatgatgagacagagacaagggcagtgggggctgagcgggctggtctaggagcccactctctcccccatcaatctctgcctggagccagtggagccaggccagaaggggaatgtgctgagccagattttgcactcacctgggccaacataccatcttgtggctataaacaaccacagcattgaatatacacgtgaacacagaacatttaggaaccaactttgagccaagctctagagatgcagacagcgaacatttgcaaacctcgtatctcacaaaacctcaacattggaagggaactttgtggccatttaatgctattccaaagcttgaatcccttttctaaaatctcccaaaggagcactggatggtacagcctttttacaatacctgcccactgaagcctaccagggcttgcccagcacacagagcaaaaaatcacctaaaaagtcacatctagccacctttccctccacaccctcgcataaacttcaacatttcaagcaagcaggtttgcatgcagcttcagcccacaggcacacaggattctcctttgacctgcttgaactaactcctgacagtcagtggattgctgcctcaaatgcaaagacccattgtctgaaagaacagcataagattggagacccgcatgccaggaaagaaaaccttcgaggtttctgcctgtatttcctggtgcccaccagtgtgtggaaatgaccacaagaaggacaggacctgcattcttccccagccattgtctgctccacagccctttgtgtgcgtgtgtgtgtgtgtgtgtaggtgtgtgcttgcaggcggtgggggctgaggggatggttgcaccttcctggctcttaagcaactcctaggatgggttacatggcacagggtcagggagaggtagggaacttacactttttgacaaaggggagcatttctggattcctggggagggagcggcactatgttcagaaaagctccttttctccttggccactcttcccttgggcctctgtttgtttcctcatcaaggggcagttccctctttgtcctccccttcaagagcagagggcttctcccttgcccttctctctctcaccatctcacccatccatgccagaaggaaattcctcattctaaaacagatccagttctctctttccctcccggccaccaacttgatcaacctgccaccacccccttgtctcagtgccttcccttccctattcctgtgctgtcttgtctttttgagaccccgaagacttgactgaggggaattcgaagatgtgggagggggtctgcctgttctcttgttggggagatgagagcagggagggtggagatggagctcctgagccctccctcggtggagggcagtgccggggcagggaccctactactccgagcgtgtgtcttgaaaccaatctcaaccctggaggacgaactgggaaaagaattcacctgggtgaatttaggccctaggtgggggtggcagaggccagtctttaagactcggctccacagaagaaactgtttcccccaggagcagaggagctcaggaagctggatggtagcaccgaggcaggagggtgaagacgggataccaggcagcccaccccgccaggaacctgaaaggccacagactcaccctacaaagtaggagatgatcagaagctgaactactcggttgatgatcccgatggtccagctcttcacaaccaccgacttggtggtctcataggtgaagaagtcggatatgcagttcatgctgagagagtgctcaggggacactcagaagggggcccagtggtggcctcaggagagggaggtcctacaggacagggagacgagatcacgacctggagggggcagcttagaggggttggaggaatggggagcctgtccctttaagccatgcaatcctagtgagattctctgctcttgatactctggcttccaagaggccaggaccagggcgggggaccccctttttgttcgtctccactccactcccctgtgatgtcacagcaggggtggggtctccaatcctgggctcctgattgcctgggatgtagctggctggagccctctgggactaatgttttatctgcactctgtctactgtttctgttctgttctcttctgcagcatcctcatcccagctcaccagctgctcacactctccctaaagccccttgcaatttcccatcccccagtcacctaatagcctgcctgagctaaggaccctcttcattcctgagtgtctgccaaattccacccagttctgcgccgtcccctcctttcctgagttgcccccagtggcatgggtcagggggaaaaggtctcttgaaagtttttctgggtcttctggggtgtgatgagtaaagagtcacatatttctaactccagctggtaatgagcttcgctctacctgtagcatagcagttagcacgtcttttttgttttgttttctttttattattattcttatactctaagttctatggtaaacctgcacaacgtgcaggtttgttacatatgtatacgtgtgccatgttggtgtgttgcacccgttaactgtaaatatacccgtcatttacattaggtatatctcctaatgctatccctccccactccgcccaccccgcgacaggccctggtgtgtgtgatgttccccaccctgtgtccaagtgttctcattgttcaattcccacctatgagtgagaatatgcggtgtttggttttctgtccttgtgataatttgctcagaatgatggagtccagcttcatccatgtccctgcaaaggacatgaactcatcctgttttacagctgcatagtattccacggtgtatatgtgccaacttcttttttttttaactgtcactttatttattaaagtcatttgttagattatgttttcctgaaaggttggggctgggtttttttttctgttttttttttttttctttctttccttcccttccttttttttttctttttctttctttctttttttttttttttttgacagagtctcgctctgtcacccgggctggagtgcagtggcacaatctcagctcactgcaacctctgcctcctgggttcaagcaattctcatgcctcagcctcctgagtagctgggattataggcacccgccaccacgcctggctaatttttgtatttttaatagagacggggcttcaccacgttggccagtctggtctcaaactcctgacctcaagtgatctccctgccttggcctccccaagtgctaggattacaggtgtgagccaccgtgcctggccggggatgttttcaccttgttcaagtttcctcaaatctgagaagtgtgctaaagtagtaataggccctcaatatctatttattaaacccagttgaatttattttgctagataatgctggaatagccactactcagaggttaaagctatgagttcaggggagaagggtgcattcctgttgtctcttaccccaggattgatttagcaagctggtgtattgattgtcagggaaatcttgagcttacatattctgtactaatgtcttcatgtaggacacatatcaatagtcattctgaacatacagtcactgtgattatgacagaagataactggactggtggtgttaaggaggtctgggtcctacctagccttgttgccaacgcactgagaccctgggcaactcactcccctttgggtctcagttttcccatcagtaaaaggaggttggggtagaaaaactaaaacatcttttccaggtctggtctctgatgttgcaaaatgcactctgggattatacgggggagacctggcttccgcaaccacaggatgatgtggtttcaaatcagttctggctccaaggtgaatctgacaccaggacttgaactggataaggccgtttgccagcctcttggaggtacctataatt

SEQ ID NO: 915270 - DNA, 4001 bp, Homo sapiens
gctccctattgccttcaggataaaatctctaggtctttagcctgggcactctaggtcctacagtgtcccagatcacactgttctggcaaactgtgccacccactttgataaccagattctggtttgcccttctttgtagtgacatggagctcccctgcagccgggcctttactggagaagctggtgccagagacaggggatgggcgccactgctgctctctcagttcagctcagccctgtgcagggtgctggcaacacagaaataataagacccagtttctgccctccaggagcccctagacctgggaagaggaaaggaggagacagacatagatcatgacggttcaggtgggaccagggctgtcagccccaggcctgtaggggcctagaagaggctccaacccagctgtagggatcaaggaaggctttccagaggagaggacatctgagctgggtcccaagtctgggtagttctccagttgaggaaggtgagagtaggagggcttatcagagagggagtgtagaatatgcaacaggccaggggcaagaaatgagagactccaggcagctgctgcaaggtaaagagtcaggcgggagaggtggctggaaaggctggcaggccccagttatcaaataccttaagtcccaggctacagggttcaggcttggtcctgtggaaggcttgtgccctagggaggggcacagttgggattctggttctgggaggctccttccagggactgacttcccatccccaagctgtgagcctgcccatggggggacactggtgctgaacatgacacactcatcagctcctcaacagccctcaaattccttatcattagtcccttcttacagacgaggccactgaggctcagagaaaggacggcttgcccaggccacacagtggccaagacaggattggaacatagatctctgagtctccagagctctcttgtggacctgtctgctcagagaatcttcttccttccacttccacccacaggtaataaacttgcctgggtctccacccagatcctcaaaactcataattatttcagcttagatccaaaacaaaccaggcagatcaggctgtggtcctgggaagctggggatgccatgctgagaggaacagcagccatggaccccacaaatcccgagctggcaattctggtctccagcagtccccaacccttgggctgcgctcctggaggaccccaagagggccactggcagccttcgggttggggggtggggtatcgcctttctcctgactgaccctttctaccgcaccatttgccagattaaaagcccggggacagaggcttaactgtcctttctggccactccctcctcccccgcccactccctgcaactgccccctcaacattaccaatggtaggtggccacccagagtgaccctggggttaggacagtggtagggggtctccaggggttcgcgtctctgggcaccggccaccgcctcacgccacggggacgctcacatcggagcacacacagacaagttccgcaggcttggccagtcgccccgaggggcgcacacactcacccgctaacacgcagacctccccagtacgctgacgcgcacagcctcactactggggcgcccgtccacactcaccgagaccgacgctcccgtggagacaaagttcaaccacggacccacaggcgcgttcaagccgtccagttatgcgctacacgccggctcgcaactgtgccccggggcgacagccgctccacagcgccctcccctgccccgcgcccagtccgcacctgcgccagtctggcccgccgcttccccgggcctctcccagcgccttgttccctccagacgccccaccccacctctcgccactgcgctgcgcttctcctctcagggtgccgtcgccgccgctcccgggtgccagtgcccgggtcccgccgcagccgcagagacccacgtgcctgggagcccggctacccacctccctgcgctgttccccaaccccgaagccgggccaggcagggggcggggcggacttttgactgaccctggcaccgccctcaacccgcccgggtagacaccgcgccacccgctccgggacgccgcccagcgacaaggccgcggggtcagcgtgtctgtaccggtgctgcaacgggagggtcgggcggcgacgctctcactgccgggccagaaggaggcctcccggctccctcacgctagaagggagctggttaccagaggttttcagagacgccaaagttttgccaggtcagcccggtgcctgcgtggcccactgcgggacctttgcgcccagccaccgcgccaccctacccctgtcccgcccctgccccagcccggctggccaggaagggacctactgggagatacctgctcggaaccccaggctaaggacgtacctcccttgcttgaaagtgggggaagggggtgcctctctccattaccgtggttaggaaagcagggtactcaggatcccgcctctcccgtgctccccactttccctgccttaatcttatcagcagctccctgaactccccactctggccccttatcttgagctgctttacctctcttctctgtcgtcaaccccactctaatggccttccctggtcgggctaccggctgcatgtctgacccgttcggagactgtgagctcccgagggcaggaaccaggtctgccttcttcctgctgctgtcctagaggtcctgggaggtgctcaatccttgaaggtgtgaatggatgaatgaatgagcaccccgcctctctctcatttctggtctaggaatcaggagtgtaggttcctgtctggcttcagcactgactctgggagaccttgacccagttccattccctggcagggtcttctttcctgtgaaatggagccaatcgctccgctggctggacaagtgcagaggaggcctcttcctgtagccaaggaacttgccccgggccttcggggccttgggccctcttgggctccatatcagctgactgggcctggctgccaggaagggtgctggctgcagccccaccaggagcagtagcagagtggacacacagcccatagtggctgagccgcctctgcagtcctgctggggcctttgcttgggagacacaaaggccccttgtctagcctcctgcgcctattgtctaagctgggccacgcaccttccagggacctaagtatcctcatagcccgagttatagggcctaggccttcaggttccagtgtggggaagaccctttgggcactggaactccagccaaccctctctttctctcccctcttccaaaacttcaaaccttatactgtcactgccatttagcccaggagaaacaagtttctttgacgccaagttgaggacccaggctcgaccttagccttcagcgggcaaatctggttggtggcctgcccagggctctgcccctgctctggcccaattcccttactttacagctgaggaaactgcattcctgagacatacagcgtttcagctaccacacaggtgacttagtgaggcttgaggagcagaggaaggggcctagtccttgaaccccatagccttgggtttagattccagtcttacctcacctgtcctatgactcctctctgagcctgagtttcctcttttgcaaaagggagtaatactaatctctcacttgctggcctgtcttaaattttttgagaaagggcctcactctgtcacccaggccgtagtgcagtggcatgatcacagcacactacagtctctatgtcccagggccaagggatcctcccatctcagcctcccaagtagctgggaatacaggcacatgccaccatgccgggctaatttgtaaattttttgtagagatgggatctccctgtgttgaccaggctggtctcaaactgctgagtccaagcagtcctcctgcctcggcctcccaaagtgctgggattccaggcatgagcccctgcaccctatccttaaattcttt

SEQ ID NO: 915271 - DNA, 4001 bp, Homo sapiens
ggttcaaacaactcctgggacagttctagtgttgacatcacaaatgccctgacctccctgcacttggcaatacttgatccattctccatcctgcagccagagagcgctttctgaaatgccgctctgaccatgaaacacctctgctcataaatttccatggctccctattgccttcaggataaaatctctaggtctttagcctgggcactctaggtcctacagtgtcccagatcacactgttctggcaaactgtgccacccactttgataaccagattctggtttgcccttctttgtagtgacatggagctcccctgcagccgggcctttactggagaagctggtgccagagacaggggatgggcgccactgctgctctctcagttcagctcagccctgtgcagggtgctggcaacacagaaataataagacccagtttctgccctccaggagcccctagacctgggaagaggaaaggaggagacagacatagatcatgacggttcaggtgggaccagggctgtcagccccaggcctgtaggggcctagaagaggctccaacccagctgtagggatcaaggaaggctttccagaggagaggacatctgagctgggtcccaagtctgggtagttctccagttgaggaaggtgagagtaggagggcttatcagagagggagtgtagaatatgcaacaggccaggggcaagaaatgagagactccaggcagctgctgcaaggtaaagagtcaggcgggagaggtggctggaaaggctggcaggccccagttatcaaataccttaagtcccaggctacagggttcaggcttggtcctgtggaaggcttgtgccctagggaggggcacagttgggattctggttctgggaggctccttccagggactgacttcccatccccaagctgtgagcctgcccatggggggacactggtgctgaacatgacacactcatcagctcctcaacagccctcaaattccttatcattagtcccttcttacagacgaggccactgaggctcagagaaaggacggcttgcccaggccacacagtggccaagacaggattggaacatagatctctgagtctccagagctctcttgtggacctgtctgctcagagaatcttcttccttccacttccacccacaggtaataaacttgcctgggtctccacccagatcctcaaaactcataattatttcagcttagatccaaaacaaaccaggcagatcaggctgtggtcctgggaagctggggatgccatgctgagaggaacagcagccatggaccccacaaatcccgagctggcaattctggtctccagcagtccccaacccttgggctgcgctcctggaggaccccaagagggccactggcagccttcgggttggggggtggggtatcgcctttctcctgactgaccctttctaccgcaccatttgccagattaaaagcccggggacagaggcttaactgtcctttctggccactccctcctcccccgcccactccctgcaactgccccctcaacattaccaatggtaggtggccacccagagtgaccctggggttaggacagtggtagggggtctccaggggttcgcgtctctgggcaccggccaccgcctcacgccacggggacgctcacatcggagcacacacagacaagttccgcaggcttggccagtcgccccgaggggcgcacacactcacccgctaacacgcagacctccccagtacgctgacgcgcacagcctcactactggggcgcccgtccacactcaccgagaccgacgctcccgtggagacaaagttcaaccacggacccacaggcgcgttcaagccgtccagttatgcgctacacgccggctcgcaactgtgccccggggcgacagccgctccacagcgccctcccctgccccgcgcccagtccgcacctgcgccagtctggcccgccgcttccccgggcctctcccagcgccttgttccctccagacgccccaccccacctctcgccactgcgctgcgcttctcctctcagggtgccgtcgccgccgctcccgggtgccagtgcccgggtcccgccgcagccgcagagacccacgtgcctgggagcccggctacccacctccctgcgctgttccccaaccccgaagccgggccaggcagggggcggggcggacttttgactgaccctggcaccgccctcaacccgcccgggtagacaccgcgccacccgctccgggacgccgcccagcgacaaggccgcggggtcagcgtgtctgtaccggtgctgcaacgggagggtcgggcggcgacgctctcactgccgggccagaaggaggcctcccggctccctcacgctagaagggagctggttaccagaggttttcagagacgccaaagttttgccaggtcagcccggtgcctgcgtggcccactgcgggacctttgcgcccagccaccgcgccaccctacccctgtcccgcccctgccccagcccggctggccaggaagggacctactgggagatacctgctcggaaccccaggctaaggacgtacctcccttgcttgaaagtgggggaagggggtgcctctctccattaccgtggttaggaaagcagggtactcaggatcccgcctctcccgtgctccccactttccctgccttaatcttatcagcagctccctgaactccccactctggccccttatcttgagctgctttacctctcttctctgtcgtcaaccccactctaatggccttccctggtcgggctaccggctgcatgtctgacccgttcggagactgtgagctcccgagggcaggaaccaggtctgccttcttcctgctgctgtcctagaggtcctgggaggtgctcaatccttgaaggtgtgaatggatgaatgaatgagcaccccgcctctctctcatttctggtctaggaatcaggagtgtaggttcctgtctggcttcagcactgactctgggagaccttgacccagttccattccctggcagggtcttctttcctgtgaaatggagccaatcgctccgctggctggacaagtgcagaggaggcctcttcctgtagccaaggaacttgccccgggccttcggggccttgggccctcttgggctccatatcagctgactgggcctggctgccaggaagggtgctggctgcagccccaccaggagcagtagcagagtggacacacagcccatagtggctgagccgcctctgcagtcctgctggggcctttgcttgggagacacaaaggccccttgtctagcctcctgcgcctattgtctaagctgggccacgcaccttccagggacctaagtatcctcatagcccgagttatagggcctaggccttcaggttccagtgtggggaagaccctttgggcactggaactccagccaaccctctctttctctcccctcttccaaaacttcaaaccttatactgtcactgccatttagcccaggagaaacaagtttctttgacgccaagttgaggacccaggctcgaccttagccttcagcgggcaaatctggttggtggcctgcccagggctctgcccctgctctggcccaattcccttactttacagctgaggaaactgcattcctgagacatacagcgtttcagctaccacacaggtgacttagtgaggcttgaggagcagaggaaggggcctagtccttgaaccccatagccttgggtttagattccagtcttacctcacctgtcctatgactcctctctgagcctgagtttcctcttttgcaaaagggagtaatactaatctctcacttgctggcctgtcttaaattttttgagaaagggcctcactctgtcacccaggccgtagtgcagtggcatgatcacagcacactacagtctctatgtcccagggccaagggatcctcccatctcagcctcccaagtagctgggaatacaggcacatgcca

SEQ ID NO: 915272 - DNA, 4001 bp, Homo sapiens
tcctgtaaaatgggaacagtaaataccatctctggagggcattgggatgttataaagagtcagtggcacttgaggccagcagtttgagaccagcctgggcaacatagcaaaaccccatctctacaaaatatttttaaaaattagttgaacattgtgatacatgcctgtagtcccagctacttttaggttgaggcaggaggattgcttaagcccaggagttcaaggttacagtaagcaatgacagtgccactgtactccaacctgggtgacagagcaagactctatcttaaaaaaaataaaaatcccaaaataaaaagcgtcagtgggacagtggtgtgaaaacagccagtgcatagccacagatggaaaaacaggtggtggatgggctgcacagagaagccaggcaagcttctggcagaacaggccatgctgggagctcccggcagtcaggtctccagagacagccacaggataaggcaagggcaggagagaagagtcggcaggctcagaaacgatttccaggtttctggaccatggccccctccctttctgataaactgacaaacagtgaggaaatgcaaaaaaagattgtaagaattttagaagagtcccagccacacagggagtcgaggggagtgtagagttccacccacccagccagtcacacacacacacatacactggaagctgggcattctcactctcacgtacacacccaggggcttggcacacacacagatgcaccttctggggcacaacactttatagtttgcaaagggccttctcatttttcatctcattgatactgaggggtggagagtttccctgaatatgacccattctagagctggcaagagatgagagtcccaaatatcttcaagaggccggggctgaacgcatgggctgggctgcctgttttctctgtgtcggtgtcagcagagctgaatggcaatagaaactctggaaaagttttaacccagctctcccagataggccctttcacccttaacaagtcacacctggactcagggactttttttttttttttttccaaaccactctcacggggccagctccaggctgtcttaagatttagctggaatggcagaggtgagaggcttcccaagggcctcctctgtggacaattatttgatcactaatccttcctactcattccctcaaccaaagttcctggggagctctgagggcagggcccagcctcctccgtgaggacccctctccagatactacacttagcagtgttcacatacgcagggagagaccacggttgcccccattttagagagtaagaaattgaggcccagagaggaaaagtgcccttgccagccatttgcactccaaccaagacctttgtggctccgaatcctgactgagctattccacttctccagcaaggcacggcgcagcaccaatgtgtccatctcctccccgcccccactgaccccgtcctgcggtgcctcgtccctccatgctgtgcagtctgcaggctccaggcatagccaggcggaggaaggaggaggaccccagtgcctgccctactgccactcttgcctgtgatgagcctcggtggctgcaagtggactgcagttactcaggaagctcctaggggagctgaggggcgcaagcccttccaggcatggacccagaaaactcacccaagagttagcaagtgcctcgcttgcagtccgtgaagtgctggagcaaattcccactcgtggagcagcccctgctgccagtcagttctgtgcctgaaactgtcgcgtgcaatgttctggcagaagtctggagaggcagcagatgaggaaaccgagagacctggggagaggaagtaacttgccacagcacagagctggcaagcagcagggccaggactcgaatcccgagaaccctgaagctccagtcctttacaccaatgctgactcatcctctacccagctgcccgcaagtcacttcattcaccctctgtttgctcactcaaacaagcagcatcaccaatttagcccaagggactgttgggaggatggagtgagataacatttcaggacaagggcctggcacagggaaggcacgcattgggtggctgttttttatcctcctccccattatcaccccagccctctcctggcttctctggagtctggagatggccctgcttctgctcattgctgccgcaggaaaccattaacctggttttctcagcagtgcctggaaggtccgttaagagaggctgagaccccgagattaatggctctgttatctgtggctccaaccctatggatccagacaactcccacccagggatgaggatggcactgagggaggagagagaccctctcatactgttttatactcggaaaaggaaagagaagcgaaactaaaggcaggtagcccggcgcctaaaaaccagacctgaaaccaaggaaccagacccgaaaccaaggaaccagacccgaaaccaggcctgggcctgcctgacctaagcctggtagttaaaattcgacccctgacctagcagctgttgttatctatagattccagagattgtatggaaggacattgtgaaacctcccgttctgttctgtttcactctgaccaccggtgctcgcagtccctatcatgtaccccctggcttgttcagttgatcacgaccctctcacgtggacccccttagagctgtgagcccttaaaagggacagaagttgagcacctgacgagctcagattttaagatgctagcctgccgatgctcccagctgattaaagccactcccttcactatctcagtgtctgaagggttttgtccgcggctcgtcctgctacagcaccgaagatggagggtgatgccgggggggaaaggctgaccccaggcaatcctcccctccccagcgccaatccatccttgagcttgggcttgatgaggagaaggcagcccgggcggctctacctgggcccatggtgggccctccccgtctgtaagatgactctcctgcttcctcctcctcctcttctttcttacaggtacttattggccacctactctgttcgggtaatgttcaacgcacttgaggtcaaaaaacaaagtcctgcccttgagacacctgtagtctagcaggggagattagtttcttttggttaatgagtaaatatatagcaggccagatagtgataagagcagcgatatagaaacataaaggagggtaaggggcggagagctagggggctgcagcctcggacaggtggacaggccccatctagatttgccagatcaccctctcccagccacctagcctggaggagaccctcccccaggccccaagcccccactctgtgccaggctctgcctcagtggatctcagcagcaggctagtgcgaagactgggactccctgggcacaggcagcaactcagggccaccaacgctttggcagggagcatcccgagcttgtgccccactcccagccctggggaagctctctgcttcctctgtggtccagagagggagcacatccctcaaccaatccccaatcccaatatcccagtaggcgagagggcgctggacccagagagggtcgggacttgcctgggtcacacagcaaggcagagctccctctcctgccctctcttggcatgtccacaaaggtaggttcaggggtgagcctcccagcacagtgctggcctgtgaggggctggctgtgccccccgtcagctcctggtaaaggagtgtgaggtgtttctgtggcaggcccacctggtagtgccagcctgccccaccctccaggctctgacagccaaattctcctaccccaagccccaggaagctgaaggcattttccttgcaaccccagctcatgagagttttggtcaaccctgcctcagcttgctgtgtgacctcaggcagtccaggcagtcccatccctctctggcctcagctccctcatctgccaaatagaggaagtgaaggcacttacatatcaggagtgtc

SEQ ID NO: 915273 - DNA, 4001 bp, Homo sapiens
gctctcagggcctgtcttggtccagggactaatattcctgatcctgtactggactttcctcattccaggcagagggcaacccaggctcctgcccctgccagttcccaaacacacacatacacagggccagcatttttcggttcctccagggtttgtcaggactgagaagcctccatccaagcccatggctgcccctgcatttctcccccaacctctctcccacgctccatcccaggctttgacagagacctgcattgtcctctcccagactgcatcttcccaggaagcaggtggtcactgagaattcaacaaggattcagtctgggaatgggaaaggatccctcagagatactcaaatagggactctctgattcctacccacacagcttattggaatcactggctctgtgaaaactgagagttcctggggtgggcagggacccagttgtgtgggggtcaccattactatcatcatagttttgtcaccagctgttaggatttctatgtatcagagattgtgccagccacttaatatccaggcactcagtcagtcctaaaaataacctatgaggcaaatactatccacatctacattttacaaaggaagaaactgagacacagtgaggttttgcccaaagttctgcagataaagtgccagagcccttttgaagcctctctaatatttctgcgtttgcttaaatcaaatttgaaccaagcttggatgacacaaacacctaactgtctcaggaggcagcctgctaggggaacccccttcttcgtggtccccagggtcctgcagccccttcctgcccaggcagtggagaagaggcaagaaattcactgatggtcagggttcctcctcagaagcccagctctcctgcccctgccccaggagtgacccaaacaactcccccccaccccgccctgcagcacacaccacatacccaacatcaccgcctcactcctgctgagtccaagttcttacatctcagtttgggagacaggcaggggattcccaccacaagataaacccagcttacctccaagacttgagccaactcattggatggtaatttatcagaacagtgtttttatatgcagaaatattatagaagaatgcaaaatccacaggaattttggaagataaaaaaatgagatttcggagcagcttctcttgtatgtgcatgtgtttgtatgtgtgagagggtgagcctgggacctgtcatactttctccacccagatccgggtgagctttcactctcccaagccctcccgggcactgggtggaaaaggcagagccaccacggaaaacattctgtcagtgtcacccctgcacaaatgtgccccaccttccatcacccagctcagcacaccacaggggccacggatgtgccacacaaaacacacacctcacaattcacacaacgcacacccagtgcaccaccctgccatggctcccgccacagagtgtacatgcaccgtggacccctgtgttaccccagcacagtcactcagagctatagagagttgcaatgcacacttcttgcaggcagacacacactgtgatccatgggtcacaccttgcacataccgcacactaaccgcatacaacccattaacccattgctcacagtaatttctttttttttttagacggagtcttgctctgtcgcccaggctggagtgcagatcgcgctcacagtaatcatttacacattgcccacactacacacatatgcagggactcacccccggcacccgccctgactggccgcgaccctggagtgggcaggcctccctgtatccccgcgccccggcaccccttacccctgtccctgcccgcgcacgcccttacctgcgccgcgcagcaccagctggtccggcccagatgtcactcgcccaggcgctgctaggaggcgaacccgtcaaatgaggggaccgtgtagacggcggcagcagctccggccccagcgtccctggaacccagaggagccagagcaaagcggcagggaggggctgtggccaagcggcctccgcaccgctggagtcccgcccagcggcccgccctcgtgggatgacggggaggtgatgtctggaagaggctgcaggcctctggggaccgctcctggtctgggacctgggaccggtggactccagtccagaatccttcacgactttacctttccctggcctcagtttccctctttgtattgatatgtgtgtgggggggggctgggtatcaaatggtgatttctcccatctttccagctctgacattctgcagttctgggatagtggggaggagggaggaataattttaattattatttccttgagcacctactatgtgccaagcactgtgctaaggtgttctaatgcatacctcatttaatcctcatagcaattctggaggtattattactcatattttacaggcagggaaactgaggcacagaaatgaagtgacttgttcaaggtcacacagctggtaagtggcagacctgagatttgaagccaggtggtctgactccagaatccaagtacccctgaagcgtgggtttgtaacactttccacaccataccctgcttcctcctcttcataacaatcccaggagcttggtgttaccagtccattttacagatgaggaaactgaggctcagggagattagcttgctctgggtcactcagctagtgggacatcacactaaagatgggagtggggatgggagtgatgctcaggatggtgtcaggacagtgcctggtacacagttggtgtctcatcaatgtcagtgttcctcctaactgtcactctccttccctttttcccttttatcgcctaaaatctggctggtggacagggacctctgactccctcatctctgaaacctcctggatctgctgtccccagatacaaaccagctcctcctctcagcccccattgtggctttttattcaacaattactgtgccaggttgtgtgctaggcactgagggtgcactggaacaacattccagacagtgcaggccttgtggagttggtaatctagtgggaaacacggacatcaaacaaatagtcacacaaatttcatacatagttgcatattgtgttaactgctaagaaggaaaagtcaagaactggatgaaagactgtcatggggaaagaggccatctaatttaaactgagagatctgggaaggcttcccagaggaagagacatttaagctgaaccaggagaaggagttagacttagccaggtgaaggtaaggggaagagaatcctaggcagaaagtacactgaggccccaagacaggacaggtcttcccttcactgtcaatgttcttgagagaggtgacaattcttggactcttctctgcagtgccctgcccacctatccggtctcagctcctgtagcaactacaagacggccctgccaagtatccagtgacctccatgtctctgaagcaatgcacacatcttagtcactccaccggacactttcaaaattccccatgtgggctgtacagctcccttccttgttcttcctccacttcacactcttccctaggtagctctgtctctgtcctccccagggttctgccccacccttttcttgctcactctgcacgttctccctggggaaggcactcattctccttattctccttttattcagcaaatgttggatttccactatctgccaggattaaggaacaattttttaaacaacaacagcaaaaacaaagaaaattgtaaaggaaaatattaataagctcagagtaataaaaagttatgtttgtacaaaaacactaaaaaaggaaaaaagcaagaagacagactaccgactggagattattgcaatgcatgtaacaaaggattattatccagtatataaaaataactcctatacgtcaataggaaaaagctaaacaacctaacagaaaaatgattgaaagacatgaacaggcatttcacagaaaagaaagcaattatggccaataca

SEQ ID NO: 915274 - DNA, 4001 bp, Homo sapiens
attctgctgaagtaacctcttccttgggagtttataagtttacaagagtcagactgccaaagccagggccagaatcctccaacattggagccagaattggggaatgttacagctttggagtgtagaaagttggagttcgaattgtagacttctagaatgtttgagtaattatagactcttagggctaggggtgtggaattataaacaattatagccagaattggggattaaaggaaatcagggccagaagtgacgacagcatcacttggtcccacctccctgacagctaagaagacagctggccttatcactcagaaagtcagggctgggccaggcctccttctccccaggagggctctgtccagaccttccagagaagctctcagggcctctggggcagcagtactccctgttagggacagtggggacagtggcttgcctctgtggtgcccgaggttgcactggcccatcatggcaccccgtcaccatgagatatatttaggttccctccccagatgtttccacagctcccaacactgccttttatgtccccttgtcctccaaggcctccgggcaactcctctaaactgactcaatgaagtcaacaggaacaggggcacttgctctgccaatgcagaagttttagccccagaaacaaggctcagcctgcggggagcctcctggtccacttctgcttgcagctcaatgctgacctcacagcctccctttcagctctcagggcctgtcttggtccagggactaatattcctgatcctgtactggactttcctcattccaggcagagggcaacccaggctcctgcccctgccagttcccaaacacacacatacacagggccagcatttttcggttcctccagggtttgtcaggactgagaagcctccatccaagcccatggctgcccctgcatttctcccccaacctctctcccacgctccatcccaggctttgacagagacctgcattgtcctctcccagactgcatcttcccaggaagcaggtggtcactgagaattcaacaaggattcagtctgggaatgggaaaggatccctcagagatactcaaatagggactctctgattcctacccacacagcttattggaatcactggctctgtgaaaactgagagttcctggggtgggcagggacccagttgtgtgggggtcaccattactatcatcatagttttgtcaccagctgttaggatttctatgtatcagagattgtgccagccacttaatatccaggcactcagtcagtcctaaaaataacctatgaggcaaatactatccacatctacattttacaaaggaagaaactgagacacagtgaggttttgcccaaagttctgcagataaagtgccagagcccttttgaagcctctctaatatttctgcgtttgcttaaatcaaatttgaaccaagcttggatgacacaaacacctaactgtctcaggaggcagcctgctaggggaacccccttcttcgtggtccccagggtcctgcagccccttcctgcccaggcagtggagaagaggcaagaaattcactgatggtcagggttcctcctcagaagcccagctctcctgcccctgccccaggagtgacccaaacaactcccccccaccccgccctgcagcacacaccacatacccaacatcaccgcctcactcctgctgagtccaagttcttacatctcagtttgggagacaggcaggggattcccaccacaagataaacccagcttacctccaagacttgagccaactcattggatggtaatttatcagaacagtgtttttatatgcagaaatattatagaagaatgcaaaatccacaggaattttggaagataaaaaaatgagatttcggagcagcttctcttgtatgtgcatgtgtttgtatgtgtgagagggtgagcctgggacctgtcatactttctccacccagatccgggtgagctttcactctcccaagccctcccgggcactgggtggaaaaggcagagccaccacggaaaacattctgtcagtgtcacccctgcacaaatgtgccccaccttccatcacccagctcagcacaccacaggggccacggatgtgccacacaaaacacacacctcacaattcacacaacgcacacccagtgcaccaccctgccatggctcccgccacagagtgtacatgcaccgtggacccctgtgttaccccagcacagtcactcagagctatagagagttgcaatgcacacttcttgcaggcagacacacactgtgatccatgggtcacaccttgcacataccgcacactaaccgcatacaacccattaacccattgctcacagtaatttctttttttttttagacggagtcttgctctgtcgcccaggctggagtgcagatcgcgctcacagtaatcatttacacattgcccacactacacacatatgcagggactcacccccggcacccgccctgactggccgcgaccctggagtgggcaggcctccctgtatccccgcgccccggcaccccttacccctgtccctgcccgcgcacgcccttacctgcgccgcgcagcaccagctggtccggcccagatgtcactcgcccaggcgctgctaggaggcgaacccgtcaaatgaggggaccgtgtagacggcggcagcagctccggccccagcgtccctggaacccagaggagccagagcaaagcggcagggaggggctgtggccaagcggcctccgcaccgctggagtcccgcccagcggcccgccctcgtgggatgacggggaggtgatgtctggaagaggctgcaggcctctggggaccgctcctggtctgggacctgggaccggtggactccagtccagaatccttcacgactttacctttccctggcctcagtttccctctttgtattgatatgtgtgtgggggggggctgggtatcaaatggtgatttctcccatctttccagctctgacattctgcagttctgggatagtggggaggagggaggaataattttaattattatttccttgagcacctactatgtgccaagcactgtgctaaggtgttctaatgcatacctcatttaatcctcatagcaattctggaggtattattactcatattttacaggcagggaaactgaggcacagaaatgaagtgacttgttcaaggtcacacagctggtaagtggcagacctgagatttgaagccaggtggtctgactccagaatccaagtacccctgaagcgtgggtttgtaacactttccacaccataccctgcttcctcctcttcataacaatcccaggagcttggtgttaccagtccattttacagatgaggaaactgaggctcagggagattagcttgctctgggtcactcagctagtgggacatcacactaaagatgggagtggggatgggagtgatgctcaggatggtgtcaggacagtgcctggtacacagttggtgtctcatcaatgtcagtgttcctcctaactgtcactctccttccctttttcccttttatcgcctaaaatctggctggtggacagggacctctgactccctcatctctgaaacctcctggatctgctgtccccagatacaaaccagctcctcctctcagcccccattgtggctttttattcaacaattactgtgccaggttgtgtgctaggcactgagggtgcactggaacaacattccagacagtgcaggccttgtggagttggtaatctagtgggaaacacggacatcaaacaaatagtcacacaaatttcatacatagttgcatattgtgttaactgctaagaaggaaaagtcaagaactggatgaaagactgtcatggggaaagaggccatctaatttaaactgagagatctgggaaggcttcccagaggaagagacatttaagctgaaccaggagaaggagttagacttagccaggtgaaggtaagggga

SEQ ID NO: 915275 - DNA, 4001 bp, Homo sapiens
tccacttctgcttgcagctcaatgctgacctcacagcctccctttcagctctcagggcctgtcttggtccagggactaatattcctgatcctgtactggactttcctcattccaggcagagggcaacccaggctcctgcccctgccagttcccaaacacacacatacacagggccagcatttttcggttcctccagggtttgtcaggactgagaagcctccatccaagcccatggctgcccctgcatttctcccccaacctctctcccacgctccatcccaggctttgacagagacctgcattgtcctctcccagactgcatcttcccaggaagcaggtggtcactgagaattcaacaaggattcagtctgggaatgggaaaggatccctcagagatactcaaatagggactctctgattcctacccacacagcttattggaatcactggctctgtgaaaactgagagttcctggggtgggcagggacccagttgtgtgggggtcaccattactatcatcatagttttgtcaccagctgttaggatttctatgtatcagagattgtgccagccacttaatatccaggcactcagtcagtcctaaaaataacctatgaggcaaatactatccacatctacattttacaaaggaagaaactgagacacagtgaggttttgcccaaagttctgcagataaagtgccagagcccttttgaagcctctctaatatttctgcgtttgcttaaatcaaatttgaaccaagcttggatgacacaaacacctaactgtctcaggaggcagcctgctaggggaacccccttcttcgtggtccccagggtcctgcagccccttcctgcccaggcagtggagaagaggcaagaaattcactgatggtcagggttcctcctcagaagcccagctctcctgcccctgccccaggagtgacccaaacaactcccccccaccccgccctgcagcacacaccacatacccaacatcaccgcctcactcctgctgagtccaagttcttacatctcagtttgggagacaggcaggggattcccaccacaagataaacccagcttacctccaagacttgagccaactcattggatggtaatttatcagaacagtgtttttatatgcagaaatattatagaagaatgcaaaatccacaggaattttggaagataaaaaaatgagatttcggagcagcttctcttgtatgtgcatgtgtttgtatgtgtgagagggtgagcctgggacctgtcatactttctccacccagatccgggtgagctttcactctcccaagccctcccgggcactgggtggaaaaggcagagccaccacggaaaacattctgtcagtgtcacccctgcacaaatgtgccccaccttccatcacccagctcagcacaccacaggggccacggatgtgccacacaaaacacacacctcacaattcacacaacgcacacccagtgcaccaccctgccatggctcccgccacagagtgtacatgcaccgtggacccctgtgttaccccagcacagtcactcagagctatagagagttgcaatgcacacttcttgcaggcagacacacactgtgatccatgggtcacaccttgcacataccgcacactaaccgcatacaacccattaacccattgctcacagtaatttctttttttttttagacggagtcttgctctgtcgcccaggctggagtgcagatcgcgctcacagtaatcatttacacattgcccacactacacacatatgcagggactcacccccggcacccgccctgactggccgcgaccctggagtgggcaggcctccctgtatccccgcgccccggcaccccttacccctgtccctgcccgcgcacgcccttacctgcgccgcgcagcaccagctggtccggcccagatgtcactcgcccaggcgctgctaggaggcgaacccgtcaaatgaggggaccgtgtagacggcggcagcagctccggccccagcgtccctggaacccagaggagccagagcaaagcggcagggaggggctgtggccaagcggcctccgcaccgctggagtcccgcccagcggcccgccctcgtgggatgacggggaggtgatgtctggaagaggctgcaggcctctggggaccgctcctggtctgggacctgggaccggtggactccagtccagaatccttcacgactttacctttccctggcctcagtttccctctttgtattgatatgtgtgtgggggggggctgggtatcaaatggtgatttctcccatctttccagctctgacattctgcagttctgggatagtggggaggagggaggaataattttaattattatttccttgagcacctactatgtgccaagcactgtgctaaggtgttctaatgcatacctcatttaatcctcatagcaattctggaggtattattactcatattttacaggcagggaaactgaggcacagaaatgaagtgacttgttcaaggtcacacagctggtaagtggcagacctgagatttgaagccaggtggtctgactccagaatccaagtacccctgaagcgtgggtttgtaacactttccacaccataccctgcttcctcctcttcataacaatcccaggagcttggtgttaccagtccattttacagatgaggaaactgaggctcagggagattagcttgctctgggtcactcagctagtgggacatcacactaaagatgggagtggggatgggagtgatgctcaggatggtgtcaggacagtgcctggtacacagttggtgtctcatcaatgtcagtgttcctcctaactgtcactctccttccctttttcccttttatcgcctaaaatctggctggtggacagggacctctgactccctcatctctgaaacctcctggatctgctgtccccagatacaaaccagctcctcctctcagcccccattgtggctttttattcaacaattactgtgccaggttgtgtgctaggcactgagggtgcactggaacaacattccagacagtgcaggccttgtggagttggtaatctagtgggaaacacggacatcaaacaaatagtcacacaaatttcatacatagttgcatattgtgttaactgctaagaaggaaaagtcaagaactggatgaaagactgtcatggggaaagaggccatctaatttaaactgagagatctgggaaggcttcccagaggaagagacatttaagctgaaccaggagaaggagttagacttagccaggtgaaggtaaggggaagagaatcctaggcagaaagtacactgaggccccaagacaggacaggtcttcccttcactgtcaatgttcttgagagaggtgacaattcttggactcttctctgcagtgccctgcccacctatccggtctcagctcctgtagcaactacaagacggccctgccaagtatccagtgacctccatgtctctgaagcaatgcacacatcttagtcactccaccggacactttcaaaattccccatgtgggctgtacagctcccttccttgttcttcctccacttcacactcttccctaggtagctctgtctctgtcctccccagggttctgccccacccttttcttgctcactctgcacgttctccctggggaaggcactcattctccttattctccttttattcagcaaatgttggatttccactatctgccaggattaaggaacaattttttaaacaacaacagcaaaaacaaagaaaattgtaaaggaaaatattaataagctcagagtaataaaaagttatgtttgtacaaaaacactaaaaaaggaaaaaagcaagaagacagactaccgactggagattattgcaatgcatgtaacaaaggattattatccagtatataaaaataactcctatacgtcaataggaaaaagctaaacaacctaacagaaaaatgattgaaag

SEQ ID NO: 915276 - DNA, 4001 bp, Homo sapiens
ctgagaccccgagattaatggctctgttatctgtggctccaaccctatggatccagacaactcccacccagggatgaggatggcactgagggaggagagagaccctctcatactgttttatactcggaaaaggaaagagaagcgaaactaaaggcaggtagcccggcgcctaaaaaccagacctgaaaccaaggaaccagacccgaaaccaaggaaccagacccgaaaccaggcctgggcctgcctgacctaagcctggtagttaaaattcgacccctgacctagcagctgttgttatctatagattccagagattgtatggaaggacattgtgaaacctcccgttctgttctgtttcactctgaccaccggtgctcgcagtccctatcatgtaccccctggcttgttcagttgatcacgaccctctcacgtggacccccttagagctgtgagcccttaaaagggacagaagttgagcacctgacgagctcagattttaagatgctagcctgccgatgctcccagctgattaaagccactcccttcactatctcagtgtctgaagggttttgtccgcggctcgtcctgctacagcaccgaagatggagggtgatgccgggggggaaaggctgaccccaggcaatcctcccctccccagcgccaatccatccttgagcttgggcttgatgaggagaaggcagcccgggcggctctacctgggcccatggtgggccctccccgtctgtaagatgactctcctgcttcctcctcctcctcttctttcttacaggtacttattggccacctactctgttcgggtaatgttcaacgcacttgaggtcaaaaaacaaagtcctgcccttgagacacctgtagtctagcaggggagattagtttcttttggttaatgagtaaatatatagcaggccagatagtgataagagcagcgatatagaaacataaaggagggtaaggggcggagagctagggggctgcagcctcggacaggtggacaggccccatctagatttgccagatcaccctctcccagccacctagcctggaggagaccctcccccaggccccaagcccccactctgtgccaggctctgcctcagtggatctcagcagcaggctagtgcgaagactgggactccctgggcacaggcagcaactcagggccaccaacgctttggcagggagcatcccgagcttgtgccccactcccagccctggggaagctctctgcttcctctgtggtccagagagggagcacatccctcaaccaatccccaatcccaatatcccagtaggcgagagggcgctggacccagagagggtcgggacttgcctgggtcacacagcaaggcagagctccctctcctgccctctcttggcatgtccacaaaggtaggttcaggggtgagcctcccagcacagtgctggcctgtgaggggctggctgtgccccccgtcagctcctggtaaaggagtgtgaggtgtttctgtggcaggcccacctggtagtgccagcctgccccaccctccaggctctgacagccaaattctcctaccccaagccccaggaagctgaaggcattttccttgcaaccccagctcatgagagttttggtcaaccctgcctcagcttgctgtgtgacctcaggcagtccaggcagtcccatccctctctggcctcagctccctcatctgccaaatagaggaagtgaaggcacttacatatcaggagtgtcatgaagaatgagcaagacactgacaagaaggcagtttgcaaatttttagacactatccagatgacaggcaagcagaaaactcatctgaaaaccagcccctcatcctgtggggccctgaggtagccccagagcaggtccttgatccttgatgggaaataagcacaaattccacagaaccagttcttccgaaaagacaaagccacctctgctcccagccagctgacaggaagggcccctcctctgtccttgtggtaagaaggtgtggggggagagacgggaaagagacaaggctgggaaggaggcctgggaaagcttgttccgggaggcagaggcatagccctgaggtagccttgagagccaccaaccccagtcaggcccccaggctgggggaggacatgaatgctggttgcacagtgtctgcctgggggcttgtcagccatgtgtacctgtgctggaagatgcgcatgcattcacaaggcacaggtgtttggaattgtgcctaagtatgtgtgtgtgtgtttctgtgagtggctctggagtgtgtacacctgttcacatacctgtttgcccaggcccgggcctctgcatgtgctccacacacatgctgctcctggggagccccgcaaacccctagtccacaggccttattttcccaggctccgaaatccttatcataatcttcaaactgtcccagatgtcacgggagatttgtggggttcccaggctcttgattttccccaggaataaaagcagttacataagatgaggaggaagccttaggggctaactttcaggcgcaggctctcccagctcagcccagggtgtaggctcctcacggggaggggaggagtgcccaaggttgaagccccttagaccctccgttgcctgtgggcactgacccctccacagccaccctcctgcactcagtcaccagcaggaagcccctgggtcctttacaataaatcaggtgctttacagtttacaccccacatgcccttgctgggtgatgctcaccactagctggccaggctgaccttcacgtcctacccccgaggccctgccgccaggcagccactgctagctcagtcctagtgtcttccttcctggctctgggctgggctcacagttcagtactggctactcccttgggtgggtctcaccccttcctgaaccttggttttctcagctgtggaatggagctgttccgatccacatgagtcaagggctgagaagggtctctgtagcctgtaatgaggcccctggcaggcaggaatggtctcgtgcacatccctggccaccgcccattggccccttgctgctcccaggagtcaggagggaaaacaccaccttcagccctcttgactgaaacaggaggctgcctagccctggtccgtgggaggagatgtggtccctctgggattcagatcagatcctaaaaagagttggcccacttcaagcttgcaggaagcatggttggtggtctccttggacaggaggagactggacatcttttttttccagacagggtctcactctgtcacccagactggagtgcagtggtgcaaacacacagctcactacagccttgacctcctgggctcaaatgatcctcctcagcctcccaagtagttggcactacaggcataagctactacgcctggctaaatttgtatttttttttgtagagacagggcctttctagtttgcacaggctggtatcgaactcctggtctcaatcgatcctcctccctcagcctcccaaagttttgggatcacaaacgtgagccaccatgtctggccagggctaggccttcttgctgagccacagaggttttccctctctgcagcctgagcccctcatactgtccagagtctggggtctgctgtttgccttccatcataggaaaccacagagaggccacagagacctaacagagttgtaaggagcacatgcctgtgggtgcaattctgcactggtgcatgcacagcacacccagccccggaaacagctccacataactcacacaggttcacacatacatatgcacacgtgccctggcacctgccacacttgggaacacaccacccacggcaggcacgcaggcaccatcacatgcatggacccacttccagccagcttacatagtgttctagcttagctcagcagcaagttgcatgtgaagagctttcataaccaggaaagagatgggagaggaagagctgagtccttggatgcccaagcccttcc

SEQ ID NO: 915277 - DNA, 4001 bp, Homo sapiens
atactagacaactatgctattccaaagagtgacaataattattgaaatgatcttcatttattgttaaaattaatacatacctatattgtatattgtcacactatttcaagctgtttatacgcaagccacatacttaaggacaagcaccacattagctcattcagtcactattaacaagatctctcgcaaatactttccacccacaaaatgcttctcttctacatagctctctctcacagtcatggggtcacaaagtttcgcacagggtgacaatgggtttgggggtcacactggacctcagagtcactccccattccacataccttcttctcatgtcaccccagaatcagtattattaccacacacactcacgcaaagttttaaaagcagtgcattgtgctgtctttgctcaatgataaggtcacatgatataagtacaatattaatatatccaaatagtgacgtggtcataaccactctgtcagtgttgtaggcttcttgatgtcccaggcagagaaggcgcagcacatattcatacagatggtatcatatacaatcatttatctttcatttttgtcagttggacactgctaagtcgatacatgactatggtgcctcagcatcccaagtctgacaaccttttatgccacagtgtgtagcactagagtttgttgactgtaccccaaaactatattagctgagcatccactgctgtgtgctacactcagtatcttctgcatcaagtatgttttttcacagtgcttttttgatatcaaatatgttgacacacatataacatctcagttatcatttatttagtatttagagagcttctacatgtgtaaagagaaggaagaactgaagacgtagacggcagtggacatctctgattaacagtcatggtgctacagacccaaactcctcgagggcagagttggctcttgatcaccattttatccccactgcctggaacactgcctggctcttagtaggcactcaaaaatatgtgttgtatgaattaatgaactgaagcattattcatatagcgacctgtacagttactcagcatcattcacatgcagagtatgatatccacagtgtcgtgcccatccagtcccaatgacatgtaaacctcacatatggtggaagactgtcacctgactcctaacactaaacatcagctcactaggtcatgcggtgtttcacgatccccccttgaaaggtcaatacttgcgtagctaaagcgtcaccgtattctctccatgtcactctcacagtgtctctgtcacagcaccgtccactgtgtctgtgtcagtgtgacacagggcctggggctcacacagctttgcacagcacattgtgaggtcctagagtcaccccgccccgctcttccacagtgtatcaactttgctgtgtgacgctggatatggggggtgccactatgtgtgtgatggagtctgcagtcccagtgtgacccaaccctcgccaacacctcatgccacggagtgtcagggtcccacacagggtgacaatgggtctagggggtcacactggccctcagagccactccccaccccatgccacaatgtctcagtcgcacggtgcgacagtgggtctggggtcccacgcagcatgacaatgagcctggggtcacactcaacctgagtcaccccaccctgcggcacagtgtatcccactgaggcccctcggtcgctcccactcgtcgtgccctcacctagtcaggtcccgcagccgcgcctcctccccgcgcaggtaccgcctcagcagccccagcagccggcgctcgggcgccagggcgcgcgccacgctggtcagcgccgagaacgtgtcgccccgagccgcagccctttctgggtctcctgtcccgagcgccagcaccgccagcagcgccgccagccgcgccccaggacccatagccagcgctcgcgaacttcccctcagacagtcctggccgcgcggcggcagccgctcccgccctcgcctgccccgcccctgtctccgccccctcccggctcaggccccgccctctggccccggcccggcccgtcccgtccaccgcccagtctcgctccacgccccctgactccttccttgtttcgacgcctcacctcgctctctattcctcagctcctcggaatgcgtgggggcttcctgcaacatcagtctccgccgccctccactaaatcgcgaccctgggaaggtgtttccactgtgcccatcacactaggggaaattgaggcggaggcagggtgagcgatgaattcacaggtctaaggctgtgactatccccaaatattgttaacaccacgctcacaggatccccaaaatatccgcccctctgtaccatggagtgggaatacacaaacaccactggatccccacagggacgtccagaagagtcaattatgcgtatgtgaataggtgcgcaggcaaagagcggcaagaggacagctgggaggaaaaccctcacagagagcgtgacatctgagccatctgaaggataagtaggactgtgtcaggatgtgagtatatgacaaatctaggacttacagaacctgaagctctggggtcctaaagtcactgctttacacaatatacttagagtcacttaagcaaataaaaatattattattattattatagcctactaggctatgtactctatttcccccctcttatgcatttcccaggcaatgttcattcatgcaacaaatatttattagtacctgtgttactgtgctgcctacacagagaaatagcagatccaatcctggactcaaaggaggagacagttatgtaaacaagtaatcacaataaagtgctgtcagagtaactgagggttgtgcaatatgcaatggcaacactgaagaaggaaccctcatgtagtgggtggagagggcatcagagaggaggtgatgggtgctggttcaaaaggatgaaaaaaattggaagttgacaggcaagggaggagtgggctttcctggcagaaggtacatgggcgtgacaaggtttggaggtggaaaacagtttgagttccagaaatgatgaaaagtttcttgtgcttgaaactatcagattgtgaaaggtctttgcatgtcatactaagaaatttaggtgcttgtcctctatgaaaatccagtggaagtttttaaggtagcaataattgtaataacaatggcaacagtaaacatagtagttaatacttaccgggtgtttcctgtgtggcagtcgccatccagagtattttacatatattaactcatttaatcgctgtccagagtattttacatgtattaactcatttaattctcatgctgaccctatagcctaagtaatattagtattcttacagtattattggccccactttaccgatgagaagactgaattgtagggacaatcattaacctactcagtgttaatcacttgtggaccacattcgaggtgtgctggtaaaccagctctccaggaaaaaaataaagttctggtttgtggcatttgccaatttctgtggtgtcaattctcccacagtggctaatttcgacatgcaaaaatgtcaccactgactgtggttggataaagatgccaacaactcctgtgagctggggtgagccagctccagcacaccactgcttgtgtagacatgagatgtaacatgcagatcccccttcgaagaaggacttgttgcacagctgcagggtatgtgatgagaagagtatccagtggtcagctgctttagggtctgtcctatagcagagagcagtctcgcttagggaaatgtccttcctggaacagccctaatccagcaatggagcaaggtgagggaatcaaggcctagccattttggcccatcgtgagacaattcttacaggaaatactagctccagcgcacctgccaccttgatcaaggctttgtcaagcctctttgacttcttcctctgccttttcctgcttcctttccctttcgtagatgctgatct

SEQ ID NO: 915278 - DNA, 4001 bp, Homo sapiens
tggggtgttggccatacagtacagactggtcaagcatgtttgcagactattatgtaaggaggctgggccaggagaaagtaggaagctttcttttaagggtattaatccttctcctttaaagtcacagcatatataattcatgggtattacctgggggatgacagctcagccaggcctccccttcatccttcctacgaagaaagacaaaagcctaattaggcttacccaaagttgaataggatcccatagttacaagggaagaaagaaggtcatgtaacctccagcttggtcatagtacttagacatgagatagtccaacctctcatcgagtatagatcattctaagacagacaaactttatttgttcaagaaatatttgtggattaactatttaatgaatagatatctgttggttaaattaatgctcatccatcaacagtgagctcactttgaaaaatcaaggttatttaattatttatcaggattattgtaaaccaagccctgtgctaagcactttccatacacaatcattaaccctcacaataaccaaacaagattccttttattattttagcacctgcccaatcatccaaatcctgatctcttcaccctagcacttttagggtataatggaaagggtctatgcatttaagacagaaagatctaggttgacagcaaccctctatcatttgacgagatgcatgatcttgggcaaattaagccttctgattctggtgctgtattttctcataggtagctagtggcacttcatgttattgttctttattacttatcacattctgtgtactagcaactagtctgtattttagcccacctaaattaagtaaggtataaatttagtaaggtgtaaatttcttaaatgcagaaggctatgtttcattcatcttcaccattgtttcaatttgaaaaacccttattagtagtagcagttgccaaatatagcactgctatattcatcctgaagcctagagaaataactggaatagtataagatcaataaatgttagatgaatgaatagtttgctgtgtattcctaattaagacgtcagcttttcttcttttttgagatgagtatcgctctgtcacccaggctggagtgcagtggtgcaatctcggctcactgcaacctccacctcctgggttcaaccgattctcctgcctcagcctcccgagtagctgggattataggcgcccaccaccaagcccgactaatttctgtatttttagtagagacggagtttcaccatgttggtcaggctggtctcgaacttctgacctcaactgatccaccaatctcagttttccaaagtgctgggattacaggcatgagccactgcgcctggcctggatgtcagcttcttgaagagcaggaaccatcacttatatttagagtatacatctgagctccaccaagcatccagtatggggcctggacacagtattagtttccttaatagtatcgtccagtatgcctaatatagcattaggggcctaggagaatacaaaggttccatcacatacacaaagtggtggtgagtacagagacttctggaagtaactgacgactaatcaatatttgctaaatgactgcttggccaaaagccttcctgcctcccagtatccctgtctttctccaactcactgatactagttctgacgcggggatcacacagctcatgtgctcccttggcctagggatagcttttcagagaatgaccatacgggtttgatacttctttttccggaccctgttccctccatatccctcgacaattgacgaagtaacccctattgatatcctggaccaggcatggctctccttgacgcaaagcaacatccactacccgcctcctctgactctgttctgggcctggattcacctgagggcttgcgcccagtcgctctgaatcctcaaaggcgccgccatctcgaccccgcctccaccagcccacctcttccgccccttcccggaagtgagtccccgagaagcgtgcggcgaggacagaggtgggctcaacaccaagaggccaccaatgaaaacgtgactttttcacattccccgccccttccgtgtgcacgctccccacgaggggctggttcctgaaaggatgtacagaggatccccaaccgcctgcgaaacccaagccgccgcgtaggagcgtgcgttcgggccctcttctcccacctgttcggtgagcatcgcgtaccgcgttcttcaggaggcgttgcgggcacaacggggctgcgatcagcggccgcgcgcgcgcatgcgtcctcaaagttcaaagtcctcgatacgcctgaggcgcctcaggcctcgtggctgccagcatttttctgctttaagatcctttccatgacttccttgtttaggccagcctccacgatccagctgccaaccatctagcctaccctgatctctgagcaggggtcgtcgtcattttactccagaggagactgaagccaaaaggtggtgagaggagagtacagcagcatttactgagtcctatagtagcccaagcgcttttcattcgttatattaatcttcattctaattgtgcgaattaaatattattaatgggaaaactaaaatgaaaaagattacatagtaaggcgtagtgctgggatttgaacacggatctcttggtttaggatcaaggcactttctattccactgttctttctctaaattatttgctcctggccctatttaaagagttaacagtgtatttaggaagagaaaactatcatttattgaactctttagacataccagcctccttacaaaccttacctttttttttttctttttttttttttttgagacagggtctcccgctgtaacccaggctggaatgcagtggcgtgatcacggctcacagtgttgcccaggctgggcgcaaaccatcctcccgcctcagcctcccagtgttgggattacaggcgtgagccatggcacccggcttcatctctgtgcttccagagaggttattaaatgatgtgtccaagggcaccaaatgaggcagtgacaaagctaggtccaagtctgtttcaaagcccattttctccctcttgcttaagttataccgcctccaaggcaaatgagttgtgtaaagtgcctaactccctcttgtgattccccattgccctcagaataaaaagtcttaaactccctactatgtcctacaaagccttgtgatgatcacttacttatatcgccagtttaatattgtcttattctcacactgtattctcccatcactgaacttttttttttttttgctctcatgtgtcagattctatctcaaccacctgctcttccattgaccaaaaatagttttcccatctctggctaacttctgttccatctgtcaagtttcagcttggaaatcacttcctctaggaagccttccctgcctattcctgcccttgtctggattaggcatccctccactgtggtcccagtctttgctatctgtacactgtgtagtaaactgccctgtttccttgtctaggttgtaaactccatgaagccaggaacttaactgacttagacagtcttgaatcctcagcactagcatagtgcctggtacatgataggtacttaatcatttgttgagtgaatgagagacacagttaaggcaataaggagtcctagttgctttacagcccatcatggtgaaatttttgcaaaggctgaagtcatttctcttcaaaccttaagttccttctgtatgctgctttctgctgagtgttctgatgcagacgggcaagacagtttgggcaaataaatacacctcacatttttgtatagtttacaaagccatctcaccttatagacccagaggccaggtttctgcatactgtatgctacagccacagtgaactctttccatccttcccatgtgtcaaaacctacccatatttgggcactctttcactttgtttgtttgtttgttttggagatggagtctcactct

SEQ ID NO: 915279 - DNA, 4001 bp, Homo sapiens
catgtaacctccagcttggtcatagtacttagacatgagatagtccaacctctcatcgagtatagatcattctaagacagacaaactttatttgttcaagaaatatttgtggattaactatttaatgaatagatatctgttggttaaattaatgctcatccatcaacagtgagctcactttgaaaaatcaaggttatttaattatttatcaggattattgtaaaccaagccctgtgctaagcactttccatacacaatcattaaccctcacaataaccaaacaagattccttttattattttagcacctgcccaatcatccaaatcctgatctcttcaccctagcacttttagggtataatggaaagggtctatgcatttaagacagaaagatctaggttgacagcaaccctctatcatttgacgagatgcatgatcttgggcaaattaagccttctgattctggtgctgtattttctcataggtagctagtggcacttcatgttattgttctttattacttatcacattctgtgtactagcaactagtctgtattttagcccacctaaattaagtaaggtataaatttagtaaggtgtaaatttcttaaatgcagaaggctatgtttcattcatcttcaccattgtttcaatttgaaaaacccttattagtagtagcagttgccaaatatagcactgctatattcatcctgaagcctagagaaataactggaatagtataagatcaataaatgttagatgaatgaatagtttgctgtgtattcctaattaagacgtcagcttttcttcttttttgagatgagtatcgctctgtcacccaggctggagtgcagtggtgcaatctcggctcactgcaacctccacctcctgggttcaaccgattctcctgcctcagcctcccgagtagctgggattataggcgcccaccaccaagcccgactaatttctgtatttttagtagagacggagtttcaccatgttggtcaggctggtctcgaacttctgacctcaactgatccaccaatctcagttttccaaagtgctgggattacaggcatgagccactgcgcctggcctggatgtcagcttcttgaagagcaggaaccatcacttatatttagagtatacatctgagctccaccaagcatccagtatggggcctggacacagtattagtttccttaatagtatcgtccagtatgcctaatatagcattaggggcctaggagaatacaaaggttccatcacatacacaaagtggtggtgagtacagagacttctggaagtaactgacgactaatcaatatttgctaaatgactgcttggccaaaagccttcctgcctcccagtatccctgtctttctccaactcactgatactagttctgacgcggggatcacacagctcatgtgctcccttggcctagggatagcttttcagagaatgaccatacgggtttgatacttctttttccggaccctgttccctccatatccctcgacaattgacgaagtaacccctattgatatcctggaccaggcatggctctccttgacgcaaagcaacatccactacccgcctcctctgactctgttctgggcctggattcacctgagggcttgcgcccagtcgctctgaatcctcaaaggcgccgccatctcgaccccgcctccaccagcccacctcttccgccccttcccggaagtgagtccccgagaagcgtgcggcgaggacagaggtgggctcaacaccaagaggccaccaatgaaaacgtgactttttcacattccccgccccttccgtgtgcacgctccccacgaggggctggttcctgaaaggatgtacagaggatccccaaccgcctgcgaaacccaagccgccgcgtaggagcgtgcgttcgggccctcttctcccacctgttcggtgagcatcgcgtaccgcgttcttcaggaggcgttgcgggcacaacggggctgcgatcagcggccgcgcgcgcgcatgcgtcctcaaagttcaaagtcctcgatacgcctgaggcgcctcaggcctcgtggctgccagcatttttctgctttaagatcctttccatgacttccttgtttaggccagcctccacgatccagctgccaaccatctagcctaccctgatctctgagcaggggtcgtcgtcattttactccagaggagactgaagccaaaaggtggtgagaggagagtacagcagcatttactgagtcctatagtagcccaagcgcttttcattcgttatattaatcttcattctaattgtgcgaattaaatattattaatgggaaaactaaaatgaaaaagattacatagtaaggcgtagtgctgggatttgaacacggatctcttggtttaggatcaaggcactttctattccactgttctttctctaaattatttgctcctggccctatttaaagagttaacagtgtatttaggaagagaaaactatcatttattgaactctttagacataccagcctccttacaaaccttacctttttttttttctttttttttttttttgagacagggtctcccgctgtaacccaggctggaatgcagtggcgtgatcacggctcacagtgttgcccaggctgggcgcaaaccatcctcccgcctcagcctcccagtgttgggattacaggcgtgagccatggcacccggcttcatctctgtgcttccagagaggttattaaatgatgtgtccaagggcaccaaatgaggcagtgacaaagctaggtccaagtctgtttcaaagcccattttctccctcttgcttaagttataccgcctccaaggcaaatgagttgtgtaaagtgcctaactccctcttgtgattccccattgccctcagaataaaaagtcttaaactccctactatgtcctacaaagccttgtgatgatcacttacttatatcgccagtttaatattgtcttattctcacactgtattctcccatcactgaacttttttttttttttgctctcatgtgtcagattctatctcaaccacctgctcttccattgaccaaaaatagttttcccatctctggctaacttctgttccatctgtcaagtttcagcttggaaatcacttcctctaggaagccttccctgcctattcctgcccttgtctggattaggcatccctccactgtggtcccagtctttgctatctgtacactgtgtagtaaactgccctgtttccttgtctaggttgtaaactccatgaagccaggaacttaactgacttagacagtcttgaatcctcagcactagcatagtgcctggtacatgataggtacttaatcatttgttgagtgaatgagagacacagttaaggcaataaggagtcctagttgctttacagcccatcatggtgaaatttttgcaaaggctgaagtcatttctcttcaaaccttaagttccttctgtatgctgctttctgctgagtgttctgatgcagacgggcaagacagtttgggcaaataaatacacctcacatttttgtatagtttacaaagccatctcaccttatagacccagaggccaggtttctgcatactgtatgctacagccacagtgaactctttccatccttcccatgtgtcaaaacctacccatatttgggcactctttcactttgtttgtttgtttgttttggagatggagtctcactctgtcacccaggctggagtgcagtggcacgatctttggctcactacaacctccgccccttgggttaaagcgattctcctgcctgagcctcccgagtagctgggattacaggtgcctgccatcacgcccgcctaatttttgtatttttagtagagacggggtttcatcatcccggccaggctggtcttgaacttctgaccttatgatccatctgcctcgggctcccaaattgctgggattacatgtgtgagccactgcacccagcctctttca

SEQ ID NO: 915280 - DNA, 4001 bp, Homo sapiens
gggggaaatgtgtgcattactgtgggtgttaaacaggaaacaacctacatattcaagagaattacggtatattcattcacacaacagaatactacccatcatgaaaatatttaaactatggctaccataccacatggatgattctcacaaacctaatgctgatttaaaaaaaaataaaaaaaccaatcaagtcacagaacacatacaggatgacaccatgtacacaaacttcaagaacattcagaactataaaatatatagagatgcattatgtagtaaaactaatttttttctaacaagggaaatgataaacacaattcaaaatagtgtttacctttgtagaaggaagaggggagacagtcaggaaggggcaccctgagagcttcaacagaagcgataatgctctgttccttaagctgagcgaaacagaaagatgtactctcatcattcctatctgggatatatatataaaacaatattatccagaataaaggtggggaaaggaagacagtcgaggggggagcccagcaatcctctctaactctgacttacacatccgtctgcctaaccaacagtgaggagacagcccaagacttcaaggcaacagaatcaactcagctacaaggtgacaaaaaagaacacctccaggcacttctctgggctttctgggtgaaaccagctccacacaccgtcttattcaagtggcaaactgtaagacacagcaccctgtccccagagttggagacagactgccttgccaatacaaaaacagaaaatattcccaaactcaggcctattttgccaatggaaggaaagtccccagatggttccaacagacagagagcaatggattgaatttaggaacaaggcagtaatttcatacagccctgcagagctgggagattctgggaccagttttagtgggggaggggaggtaaaaatacacttgaggacacattaaatagggccccaaaactaagagcctagcgcttgggacagaacgtgtgtaatatgaagttcaaatgaacatgtgtgccgaaggctaatgagaagcccctagggtgattatatgagctttacctgcaagaggtgacaatcgagtttggcacatgctgagtctattgggaaataataatatcaagagatctataccacatccatgtatgtacagctcccggcgccggcgaggcaggagagtgacttactcagggaaactgactgccaggaaggccggattcggtcagcccaatcggagaaagcccggggccgaggccagaaggtccctcggggaggacagaagggtggtcccggccccaggcagaaggtggggctgccaggagagggcgggtccccgtggcaggagtcccgggaggcctggctggagccaggccgggccgcgggacagtcggggagatggagggcggggaccccatgggcgctggggcggggagggctgggccccggcggccaccccgctcccccggcgccccgccgcaccctcccgcgctcacctaggcacgcagctggacgagctccggtccacctcccaggtggcgtacaggttcatctgcaccggggcgggggtgcggcctggccccgggccaccgggaggcgcggagcccgaggccaccgccacggccatggaggtggaggtagacgaggacgaggaggaggcagccgccgccgaggtggacgaggacgacgaggtggcctgggccagcttggggggcgtcggctgctgcggcggctgctgctgctgctgctgcggcggcggctgctgaggggactgggcgaccccggatccccgctggccgctgccgcccccggcgcctccgggaccaccgcccgcccctccgcgttccgccatggcccggctaggcgggggttacggaggccgaggcgacgccgatctggctcccaggcttcccccgcggcggcggcggcgggggcgcggcagcctcctcagcccgcctgcccgagcgcgagcagccagcgagctgcacgcacgcgcggggcctctgggcgcgcgggcctcgcgctcgaccgccgctgcctgttgcggctcgcgaggccgacacgggtgggcgtgtccgggagggggcggggagcccggcccgcgcggccccacccagcgcggaggggccgggccgggcgcgctcgcgccctgcgtgcagccacgcgcgcccctcgctcccgcggagtagaaggggtggtctgtggccagcgcgcgcccacgggtcctgccctcaaatccgctgccagtctgcccccgctcctcccctccccgcccacggccggccgcggccccgccagcggaaacccggcttttccgggattcggtccctgcagggagggggccgccgcgggagcgcgcctcggcccctcgggtcttcggagccaatgcggaacccgcccccagcggtgggggtctgcccggggaagccggctctccgcctgccgacctagccctgccctgcggccccggcaaacagagaggtcggcggagacccggggcccgctgccaccgcgggtgcctgtgatccgggaagttcccgccccgagggcaagcgggggctcagggacctggagtccagaaggttcttcgcataagtgaattctcaagctaccccggggcccatctggagccaaccttcctcttctttccctaccccccaaatgcctctttagagtgccagtgctttgttgcttaccaaatttctaaaattccattcctcctaaggcctagctcagctgccacgtcctatctggatcatgccccccacaaccccgagaccatcttgaaccctccggcaagtgagcgcctccactggtgcacttaaacaccaacagtagtacaacagcagcgcatgactaccctccccacaggctggcaaatgcccatgggagccagtgatccagcctgctctagtctgtcagaaaggctgctcaggaccagattacaacctggagaaagtaagtccccccatcccacatacaaatcccaaaccccagcgactagtgttgcttgaacccaagggttcatatggactcaagacaatttagcttttgagctatgttgtcgcacaggtaaggacttgaacttctggtcacaaggtcagttgggaaggcctgccctggcctacttcccaagcccactgttacttcctctgccgcgctagggcgctaatctggctatttttactccccaaggacaaagtagtaaggtcaaaccagacctagaggtacttcccccaagccttcctacaaagcagggcagtggtgaaacacagatttcagcctggggttggcgtcaccaccagtcaaatgcgccgtctaatcccagtttatgttcgtggttactggggcagcccagtgattgtagaaagagactattttagtccttttgcaagaaggggctaaaaggagatgagggaggctcaggagtgttaaatattcatctctttccttgggaaacagctttatttacaaaacaggtctaaaataagaacatgaaatgacaagtccttgggaactgcgggagaggtggttcttgtgtgaagcccaggcatccagacgtagggccaaaaaaagggctagtgtgaggggacctaaaacttgaactccttatatttcttgctgcccccacggctgtcctggggctgagctttccgttttttttgctgtatagggagaaagagacacaggttaagacaggttgaaccacccccggacccccaaaacaagggtgggcagcctgacatagacatagaagtctgtgggaaaggcgctgaatctgaattctcttcgagctccctctcagacttggctgagttcctccccctcatcgtccttaaagagggcagcccactggaggatttctaagacttccaaatctaaggaagcacagagcagcaagcagaggccaccctcactctcaccactagagggcaccatgccactgaaaacggcaggccagggtccctggctctcacccagcccag

SEQ ID NO: 915281 - DNA, 4001 bp, Homo sapiens
agaggcttccaggattctgatttgtgtgtccccacgcgctggaatcagcaataattagttaagtgagaaaagaagcgatgtccacctggagcgcaggaaacgcgcccgctccagcagctgtgggaatgcttggtccaagtgggcttccccctctgctaacaggagacagagctaggggctccgcggagacccaggcaatggaggtgcccaccaggggcctcacaagctcgtcacttggttccctctgcagtgtgtcctgtctgcccagaaaggacctgacagggcgatggagagaaagagagctgctgccatgaatcacagggctctggagccgccccagtccagcctcaggagcctggggccccttgcctgttccagcctccgagttccctgctccccagagagctgccccccaccccttccctctctctggccccagaacagagcaagctgtgtgtaccgggctggcacagctccctccggcctcccagagcaaacacaggcccaagccccgggtgcagccaggccccacagccccagcctgacctctcagcaagcaagcaaggagggcttgcaccttggcccccattgagcaggttggcaccctgtgcctcctgagctcagcagagacccaaatcagtccccaccgcaggcaagagctcagaaagcaggtaatgcaatcttcccagccccgggagccagcacgttcggctccgagaggtcttcctgggcttggcagggtctccttgcagctgcacgggccaaggtaggaagtccctggttcagggaagacccagtctccctacctgaggcctgaaggtacccggccccagaccagccccaacctcttccagaagctgggggcttgcccctgggagggagctcagccattctgcctggcccatccctggaacctgagtcacaggctgcgcccaagggcttctttcccgggcagcccctcccggtgcgcccgcagctctaggatttgaggacagagcgggggggaggggagggggcgtcagtaggctggtccgaagagggacagcgaggttagaggggctggaaccagaagccagagccagccaggagatcaggaggctgggggagggggtggcgcagccaaagcgggaggaggcagggccagggaggggcataacaaaggggcacttttggaaacccgacctgccggccggggtgcctgcttccagatgacgcactccgaaccccagcctccactccagagctcggcgcccagaggctacgcgcctctggcctcaacccttatggaccgcgcccctcgacaggaccccttgccgcccggagctgcataactcggagcccgtggagccacgcggagcggcagggccaggcctagccaccgaagctctagacttcttggccaaacttgttgaacttggtcttggcgggggtggggccactgatcaccgccaaggggaggggacgccccctgcctgggccggccttgccgtgggctccagatggtggccccgggcagcggacccaggaatcggggctcgctgcatagggcgagggatcgccagggagcgaggaccctctggggcctcggggcgggcgcgaggcgagcggacgggggccctcgaggggcccctgaagacggctcagccctccagcgccggcgccgcctcccccgggcggcctgcggaattgcgaagcccgcggcaccgcagatgggacggcccctcggcgcggctacggcccttcccgtcggcacgcagagcggggtggccgggggctccctgggcgggagtcggctccattgcaaacttcagaagccggagcaggagagggcgggctcgagccaccgcacccgccgccgcctacccgcgcgtcccctccagggcactcaccgcgtcctccctgggcccctcggcgggtgggggtccggccacgctccggcccgagtcctgccgctcctgggcccgcgccgcggcctcccggagcgcgccgggccctcccccgggaagcccggcccccggcccccggccccgcccctctcctggccgccgctgcctcaaccccacgcggcggggcagcggggctgcaggcatcgcggcgaccagcggctcttgtggcgcgggtcgaggtttctctgcttcgcccgtgtgcggagtgcctgggcgggctccccagggttgcgccccggtgccgcagggagccagatttcggctttgcctctcccggaccgttgcagagcctgggagacccgagggagcaagaagggaccgggccggcacgggcagccttggagaggggccgggggaattacactgccttacatttttagctgcacagcttgtttagaaattggctcaggcgaggctcacaaccaccccttgtaagcattaggattcccactgtacagatgcaaaaactgaggctcgggggcttttcagaggcttgcccaagatttccctctagtcaggcagggctgggactccaaaaccgtgccctaccgttccacagctgccctgctaatctggggcgccttctaaggcctgagacgaacacgcggtgggggtgggacaaaaaggcctaagctcctcccgctccgagttcttatttccagattttgtaccacgattcattcttacccttcgcccctccaccccctttatcagtctggtacatttttccatatcgccacgatgccaccccacgctaaataaatcccttctccctcctctctccctacttccctctccccgctttcccccgggggtgagattttgcagagcggctccgtctgttatttatatccactggagcggtccaagaatgttccgaagctgacctaatcgccacctgctcggcctctccgcccctcccactctctcctgggcccggtgacccagcggcggtgccctgagccttgaagaccagggggagcgcggaccaacggggtcgaacgcccgggcgcagaaggtcccggacgcagaaggtcccgggcgcgcagaatcgcagcgggtcggagagccccggcgctctcagaggagtgcgcccccagggacgcggctctgagccctgggaagctgaggcgcctggctgcgccctctgaagctcgtacttttcctcccaccctcagctccctgaagagtgtgagtgcgtgcgcgcggagttttaaacggcagctttaaaaatagcaaaattatgttgtttctaaatccaggaggaatcactgacgcgttctttacgcagatgaatccgctcacaaaacgggaaagggacctggagaaaatgaatgggggtaattttgcctgccgagggctcacttgctgggcagtgctaatggaagggtaaaactgcctccccaagacacctgtggggcacccaaggcgcgccacctttggcctgaggattctggccgtgtttggcaaatcatagctgagtagtgaatctgaaacctgggatgtggtttctgagaccaatttcaacacccactctctcttagggcttggacaagtcccttatctctatttctacctctataaaacatgacaggtgaccagctgaccttccgctgagccatgagccccagctaattaatgattgtaaaaaacaactgcagatcagaggagctgggaaaatggcaaatcacagccacagggttttgtattctttaaaatcagttaacatccctcctagcgcctgaaggcctttaggcacctagaccgaagtgtgaaaacacaagaatgaaattaattacaggagccacctattaaaacctcattaaaaataaagttggcagccaggctgtgggatctgggaaagccaggccatagagagactcagaaaacagggctgttcatcagaccacaaagagaaggggatgtggactggaaaacatctggcttcccttgggctcaagtctgggagcagaaagcagaaatgttgcagctgatcttaattgcccctgaggtactgtaggggaaaaaaaacaacaaaataaaacccagagcata

SEQ ID NO: 915282 - DNA, 4001 bp, Homo sapiens
cgtggtggcgggaacctgtagtcccagctacttaggaggctgaggcatgagaatcacttgaacctaggaggcggaggaggttgcggtgagcagagattataccaccgcctgggcaacagagtgagactgtctcaaaaaaaaaaaaaaaagttccctagaatcgcagaggacggcaagccaattccaaccccagagccatggccccagggactcaaggacacagtggcatgtggctgctcccctcctgcctctgggcagggtctcagctgtccccagcactgactgactcacagaccctagaaggaaatcgcttcctctctgagcaggcccaagggacacagccagacccaggaggacagtgtgcgccctttgtccccaaagcagggcgctgtcacagcgcttcctccaaactcatgcacctctgcttctccttcaaacctccaattaaggcatcttctcctcagtcacttcccctgtttctctgtccttgctcctgtagccccgggtgacccttcagccggggtgtataacccatggagttgtggctgacaggacagtgtctatcttcagtcaccgacagaggcttccaggattctgatttgtgtgtccccacgcgctggaatcagcaataattagttaagtgagaaaagaagcgatgtccacctggagcgcaggaaacgcgcccgctccagcagctgtgggaatgcttggtccaagtgggcttccccctctgctaacaggagacagagctaggggctccgcggagacccaggcaatggaggtgcccaccaggggcctcacaagctcgtcacttggttccctctgcagtgtgtcctgtctgcccagaaaggacctgacagggcgatggagagaaagagagctgctgccatgaatcacagggctctggagccgccccagtccagcctcaggagcctggggccccttgcctgttccagcctccgagttccctgctccccagagagctgccccccaccccttccctctctctggccccagaacagagcaagctgtgtgtaccgggctggcacagctccctccggcctcccagagcaaacacaggcccaagccccgggtgcagccaggccccacagccccagcctgacctctcagcaagcaagcaaggagggcttgcaccttggcccccattgagcaggttggcaccctgtgcctcctgagctcagcagagacccaaatcagtccccaccgcaggcaagagctcagaaagcaggtaatgcaatcttcccagccccgggagccagcacgttcggctccgagaggtcttcctgggcttggcagggtctccttgcagctgcacgggccaaggtaggaagtccctggttcagggaagacccagtctccctacctgaggcctgaaggtacccggccccagaccagccccaacctcttccagaagctgggggcttgcccctgggagggagctcagccattctgcctggcccatccctggaacctgagtcacaggctgcgcccaagggcttctttcccgggcagcccctcccggtgcgcccgcagctctaggatttgaggacagagcgggggggaggggagggggcgtcagtaggctggtccgaagagggacagcgaggttagaggggctggaaccagaagccagagccagccaggagatcaggaggctgggggagggggtggcgcagccaaagcgggaggaggcagggccagggaggggcataacaaaggggcacttttggaaacccgacctgccggccggggtgcctgcttccagatgacgcactccgaaccccagcctccactccagagctcggcgcccagaggctacgcgcctctggcctcaacccttatggaccgcgcccctcgacaggaccccttgccgcccggagctgcataactcggagcccgtggagccacgcggagcggcagggccaggcctagccaccgaagctctagacttcttggccaaacttgttgaacttggtcttggcgggggtggggccactgatcaccgccaaggggaggggacgccccctgcctgggccggccttgccgtgggctccagatggtggccccgggcagcggacccaggaatcggggctcgctgcatagggcgagggatcgccagggagcgaggaccctctggggcctcggggcgggcgcgaggcgagcggacgggggccctcgaggggcccctgaagacggctcagccctccagcgccggcgccgcctcccccgggcggcctgcggaattgcgaagcccgcggcaccgcagatgggacggcccctcggcgcggctacggcccttcccgtcggcacgcagagcggggtggccgggggctccctgggcgggagtcggctccattgcaaacttcagaagccggagcaggagagggcgggctcgagccaccgcacccgccgccgcctacccgcgcgtcccctccagggcactcaccgcgtcctccctgggcccctcggcgggtgggggtccggccacgctccggcccgagtcctgccgctcctgggcccgcgccgcggcctcccggagcgcgccgggccctcccccgggaagcccggcccccggcccccggccccgcccctctcctggccgccgctgcctcaaccccacgcggcggggcagcggggctgcaggcatcgcggcgaccagcggctcttgtggcgcgggtcgaggtttctctgcttcgcccgtgtgcggagtgcctgggcgggctccccagggttgcgccccggtgccgcagggagccagatttcggctttgcctctcccggaccgttgcagagcctgggagacccgagggagcaagaagggaccgggccggcacgggcagccttggagaggggccgggggaattacactgccttacatttttagctgcacagcttgtttagaaattggctcaggcgaggctcacaaccaccccttgtaagcattaggattcccactgtacagatgcaaaaactgaggctcgggggcttttcagaggcttgcccaagatttccctctagtcaggcagggctgggactccaaaaccgtgccctaccgttccacagctgccctgctaatctggggcgccttctaaggcctgagacgaacacgcggtgggggtgggacaaaaaggcctaagctcctcccgctccgagttcttatttccagattttgtaccacgattcattcttacccttcgcccctccaccccctttatcagtctggtacatttttccatatcgccacgatgccaccccacgctaaataaatcccttctccctcctctctccctacttccctctccccgctttcccccgggggtgagattttgcagagcggctccgtctgttatttatatccactggagcggtccaagaatgttccgaagctgacctaatcgccacctgctcggcctctccgcccctcccactctctcctgggcccggtgacccagcggcggtgccctgagccttgaagaccagggggagcgcggaccaacggggtcgaacgcccgggcgcagaaggtcccggacgcagaaggtcccgggcgcgcagaatcgcagcgggtcggagagccccggcgctctcagaggagtgcgcccccagggacgcggctctgagccctgggaagctgaggcgcctggctgcgccctctgaagctcgtacttttcctcccaccctcagctccctgaagagtgtgagtgcgtgcgcgcggagttttaaacggcagctttaaaaatagcaaaattatgttgtttctaaatccaggaggaatcactgacgcgttctttacgcagatgaatccgctcacaaaacgggaaagggacctggagaaaatgaatgggggtaattttgcctgccgagggctcacttgctgggcagtgctaatggaagggtaaaactgcctccccaagacacctgtggggcacccaaggcgcgccacctttggcctgaggattctggccgtgtttggcaaatcatag

SEQ ID NO: 915283 - DNA, 4001 bp, Homo sapiens
cccgtctctactaaaaaaaaaaaatacaaaattagctgggtgtggtggcacatgcctataagcttgaaccgggaggcagaggttgtagtgagtagagatcgcgccactgcactccagcctgggcgacagactgagactccgtcacacacacaaaaaaaaaaaaaaaaaaagaaagaaagaccaagcagaatgcaaataaaaggtctgaagaacaagttttgttaatttgccacaacagactgtactccaggggaagctttgttgtccattaaagtgagttctctgggaagacgaggagtaaccgacttgcacgattttcctgccttttctatattctctacttactatgacaatacagcactagaatttccaagtgcttataccagcatagtgcaatgtatttaatgagaaaccacgtccaacaacaaagcgttataacttctccagctgagttagatgttttagtctgaaccaggaaaacagatgaagaaagttgaaccaagaattaaaagatttagagtttccactcagacctaagactctccactttgtttcagagggagtgggtatggttattctgaagaagaaggcggcccttatcctgaatgcccggtagcctccgtgggctggtgggtggttcctccggtccagcacctccataatttatgatcaaatgcccaagccaacaaactaatcctccccttctcccccacaaggaggcaacctttatgtcagaacaatgtgcccagaagaagccaaagacacaaggcacatccaaggcaaagacaatcttaattaagcactttctccttccactttctccacacctttacccccggcccaaccccttcccataatttcaagctgtacaaaatgaggtcctagggtggatccgggtggtctttcctttctctacgggtaagctctacaaagaggcgaaagctccgagtgttagttcttgtttgtgtataaattctgaaaagcaacgctggcctgcgagctatgaaaagcagaagcatgagtcaccacgcaacgggtcaatcaaacctgtagaccagaaggcacggatctggcaaacggacggtgagccaggaaaaaaacatccccccaaacctctccgctgacaggtttatctagctggctgaccttgggcaggtcaccagccgctccgagcacattcatgtctaagatgagatgggggctggaaagccttccaagaaataatcccttccgagtggtgacggtctatgcaacttttgaataaacacatcctaagaggcaacggagaagtttctaaagagttgaaatttttcaacaaaaggaggagggaaaagtgctcggtaaaaacacaacggagtaactggttttggcctccgaccagacgcgaggggagagaagagtgagaagttagacccctgtgataaagggaaaaggcagcagcggagacccgggcaggagctgcagcgcccagccggggcgagctggggtgcgcaaggcctaccgcgggtgggcccggcagggcagggcagggcagggcggggcggggcgcccgccgcgctaccctcctgggaaaggccgtggaggcgccggccggcggctgaggagaaacgccagctttcggtatggaatatcgggaaagggctctcagagcgaaaactagctgcgccggctgctgggaagccgacgctgggcccgcagagaaggcgcgcgctcgcgaggccccccccaagtggatggggcggcgtggggggaggggccgcaagggtgggggaggggaggtcgcgggcctctcacaataacacctcgcagccccttccgacccccgcctctaagccaccggttccctgcgaccctggatgcactcactgaagtagagggtccgtgcgggccccaagcggctgaggcgtcggcgggtggcgcgtcggtcgctcgctcggtcccgtcggtcccgctccggcgcgtccctcctccggccccagcaccagcagcagctcctccacttccggttcccctgccactcagccaaatggcttccggaagtcccgcccccatcctgccacgcctcagcgtggttcctctctccccgccttcgctctcccgggcgctggcggcgtgcgcccaggtgtcccgccacaccccgttgggtaccctgctttgttctcgcggttacccccattttgtgtggcgtctgagggacatgggcttctctctttactccagctgcatctctcaatcctgcgttcgtgccaccgcagtgtggagctggcattcgggacgatgtggcgtgaagtcacactgacgccattcccttcacactcagccaacttggcttcctcttccacccatggaataaaccagactgctgaaagtgggagggaaatagcggaccaaggttaaggaggcagtacctgacatttattagtggaatttctgtttctatgatgaatgtggagattttgggtgaccgcctgtaaaggtgatacatagggggatgacgaaccccaggcttttccttaaaagatacatccagtttaggggaagacatacatatacaaagtcaatattgaaaagattatatgctaaataaatgcaggatctataaaagtagagaggaggggcaagagatgtgctcaagcttatagcagcgcaacggttgctggagcagtgccctgaactggccctttaaggatctcagctctatgctggtgaataggcagagccttccagggctcttaaactgatgcgggggtgggggttgattttgctgacaaaacctgttaagaatactgtaaaatcctgggagcctaaaatgtcaagatatgtcaagtaatttttcttttttttttttttttttattcaagttctagggtacatgtgcacaacgtgcaggtttgttacataggtatacgtgtgccatgttggtttgctgcacccatcaactcgtcatttacattccgtatttctcctaatgctatccctcccccagccccgcagtccccgacaggcccccgtgtgtgatgttccccgccctttgtccaagtgttctcagtgttcaattcccacctatgagaacatgcggtgtttggttttctgtccttgtgatagtttgctgagaatgatggtttccagtttcgtccatgtccctgcaaaggatatgaactcatcctttttacagctgcatagtatttcgtggtgtatatgtgccacattttcttaatccagtctatcattgatggacatttgggttggttccaagtctttgctattgtgaatagtgccacaataaacatacgtgtgcatgtatctttatagcagcatgatttataatcctttgggtatatacccagtaatgggatggctgggtcaaatggtatttctagttctagatccttgaggaatcgccacactgtctttcacaatggttgaattaatttacactccctccaacagtgtaaaagtgttcctctttctccacatcctctccagcatctgttgtttcctgactttttaatgatcgccattctaactggcatgagatggtatctcattgtggttttgatttgcatttctctgatgaccagtgatgatgagcattttttcatgtgtctgttggttgcataaatgtcttcttttgagaagtgtctgttcatatcctttgcccactttttgatggggttgtttgttttttttcttgtaaatttgtttaagttctttgtagattctggatattagccctttgtcagatgggtagattgcaaaaattttctcccattctgtaggttgcctgttcgctctgatggtagtttcttttgccatgcagaagctctttagtttaattatatcccatttgtctattctggcttttgttgccattgcttgtggtgttttagtcaggaagtctttgcccatgcctatgtcctgaatggtattgcctatgttttcttctagggtttttatggttttaggtctaacatttaagtctttactccatcttgaattaa

SEQ ID NO: 915284 - DNA, 4001 bp, Homo sapiens
ctctttgaagacagggaatatcttaatagactgaatccccatagccttagcaagaggcctgaaacatagtagctctccgaactccagtaatgttggataaacgaattgactgaataagcaaatttaccaaggtagacccatgagctcatgtagttaaagagtatggataagcttcagggaaagtatgggaagttttcagggtcaatgttcccaaaaccctttttgaaaggcatagtttctagttgaggtggggagtttttatatgcacctgacttagaattttccaaataggaaccaaaatgttgtaagtgctgtggtagaaatcccaccgggccaatgggaagaaatcagctctgtctgtaagaggagagacaggatggaggccagcaaagacttcacagtgtgggaattcttcagtggactcttgaaagctgagtccggtgcttgctacttgcccgttttggggcataaaaccaaacttctggagcttttaaggctggaagtgacctgctcaaggtcacacaagaagtagatgaagccacagggtaagagagatgaggtatctgtactgataattcctactttctcctgacagagttgaaagagaacccaaaaatgtaggaggcaaaattaaagattgttctcaggaacaattcttaaagtcaagactaatgaatctgaatttttattagtaaccacggaactaacccttcccttcactgttcacagtttttgtaacagtagaacaattatccaaggggtttaaaaaccaaggacgttgctcacaacgccacacccactacttctcaagtattcttccaaaacactcccagtaatgtgtactgctgaaataggatagcgaaggctacaacaatcatgtcttttcaaacgtaataatgaacataaaataactataaatctccttccccggttgtttttcacttcccaagttacagaatattccggggtgggggaggggctgcgtaagtcaagtcctaccagcccttatttttcagggagtagaaccctaaaggtgactgtccaagcctggaaggggtcatttattccatgcagaaggaactgggcgccgctttgctgtgcctcctcgtagcgggacagggtgagcgccgcaggactgcgaagttcgggacggactcggtcccggaccggtactcgtgtggcctcccggctccagcctggcctggccccgccccgccccttccctctcccaggtctctcgaatcgcccggcgtctgagacccgcgaccccgccggtacgcgcacagggggcctttgttggcccgacgggagcgggcctcgcggggcgccgcccgcctcaccttacctggcgcctcctcccgcccaggcgcccggccccgcaacgcgaaataaatgggcccagacccccactccacccgtccccacccccgcgccccagccctggcagcccgggacgcgaggggtactgggcggtaggcccgctctcaccttccgcgctcgctcagctcctctcggctcctcctcctcctcccggcggtgggtgccgcctagccgggagtgagggcgcgagtgtgcgcgagctaccgcttcactttctccctcctgccgccgccgccgcgctgcccgtggcggggctcccctcaggacaggggaactgcgagggaagggatgatgggggggcgggagggagcgaggcgacgcgggcggggggggaaggggggactgaggggcgaggtgcgaagggctcagatggcctctgaggcaggaggtggtaactggatgcggagaccaggttcctcgagggggctcacgaaagcgcggggctccgtggaaaagggaatgagagtccaagggggaaggcgtctgtgggggaggactgcagagcctgtgagggaagcgcgatgggcgagcgagggggcgggagcgtgtgggggaagccgtgagggggcgtctactgtgcagccaccaccttcggctccggctgcagccgcgggagggcagcctcccccgcccacagccgcgctattgtacgccgcccggcaggcctgaccgcctagttcactggctcccctactcctcctcctcccgcctcctcctcccctctgccctttccccttctccccctccccctcccccactccccctccccggcgcggcggcggcggctgcggctccggtggagccgtgcccgccccgcctcccgcaggtgagagggggcggggagggcctgaccgacccgtgggagcgaggccaaaccctggcccgcatgagggcgaacgcctgggattacgtcatcggcgcgtgacgccagaggctggggaatcacccgcttgctgcgtgacgtcatcgcgtcgcgtcactgttctcggtccgctgtccgtggcgggttgtttccgtgcagcctttctatcagacaattttgggacgatttctgggagggctactgtagtagtcaggatggagaaagacggctaacttccggcgctgagggtccttttcaggttaacaaagcaccaccgcatctatgagctcgttgtcaagggctgaatttgaaaactatccgatgtcgtgtgatctcacagccagacatgtattatgttttctttctgtgggagagggggcaggggtgggaggaagacaaagaaattataacggagatgtttgaactaatgtgaactgacatacgaaaagaatgggcttcctttcacgttttttcccctaccgtggagggtactttcgacccaaagctttctttctcctgagctcagattgtgtatttcccaatacctcccgagcagcattacctgcatactcttcgtacctcagattcaacatgtgcgaaactgagacagcattagaaaggctaagagtccggaatcaggttgccttgcttgaaatcctagctattcaaatattagtgataggaccttgacatttctaagccgtaatttttctgtaataataagtagtaccttaactaggtcttcctaagcctcagttttaccatggtaatagtaacaagccctttagaatgttggctattattattatttcccccccaaaattgcttcttacgttcctttccgttctcaatgaatgggccacccattcaacaatcccctaagccaggaacctagacatactaatagctccccgttcttcctctctcaacatccatatcaagttggacaccaagtcttgtagcttctcctaaatatttttcaagtccttgcctgtgtcgtcttctactaccaccacctgaacaactggagcaacctttagtctcttcaaactcaatctatttttctcactagttacctgagtagccttataaaagcacaaatctgatgatgtcctcccgtttaaacaccgaaaggattttattgctttcaggataaagttcaaactcctgaacttggcactttattacctgactgcttacactagcctttctagctttgtctcacatcatttattttttgctccaagcacactgaaatattaacgttatttgaatacacatttcttcatgtcttcaagctcttccctacttagctgactggccaacacctattcattgtacaaagctgagctcaaatgtcattcatattcatattcatattcatttgactaatatttctaaagtttccctaagccttaacaaaactgtaattctatagtatttctatgccttttatggaagtaactgcatttgtgtatctaatttcttgagttccaagtcatattcctttccatatcctcagcacctaaaacagtgcttgacatatacctaagtatcaatatgttgttaaaatatatttaataaggccaggcgcggtggctcacgcctgtaatcccagcacttgggaggccaaggcagccagatcacctgaggtcagaagtttgagaccagcctggccaatatggcgaaaccccatctctactaaaatacaaaaattagccgggcgtagtggcaggcacctgtaatcccagctactcag

SEQ ID NO: 915285 - DNA, 4001 bp, Homo sapiens
tgaggaatcaaatccactgagccctggcactctgagaagaaccaggtcctctggagctggtccaccgacaccatgcaaaggcgaagatgaagtagggaggtgccttaatgcaaagtcacccacttacccctaggcaagtgtttaggtttatggattgtcagcccttatgaagggctccttcttcctttattattgtctttgggctgctccagacaccatggaggcaaaattcaaatgaaacactcaccatctttattgtaaatcattaaggaagatcctacctgggcaggcaggctctaggtagatggaaagtattgaccaaaatgaagggcaggggggtttgtgtatctcagcttttcgttgatcatgaagggatgtgcctatggctaagtttcccttctacacaggttattgcatttagtatcctccccacccgacctggcctgtttcattctcaggcacttgccagctacttgcagcggcagagcacccagctctcagatagagttcaggtgacaggtaaccagcacagaagggaagcagcgaaggctcgtacataacctgcccctattcagagctgccccgtttggtcatttctgtacatctcggcctgccctcatctcatgaggtctcactttaccccctgggccatagaaggacagatgttcctatgacgttcccacttccccgcctgccagcaagcaggatctgccatgtcctcgcttctgcccttagctggatctccgtatcatgtcccagcctcatttgtccccagaagcccatttgacctggggattgtggcttagaaaatgatatatgaaaaccaaagaagccagagctctttcaaaacaaaccctatgcatcccagaaacaatctgcacttttaaccttggctttttcttctttctcactctcatcagaaaggaagtgtgtctatatatgctgagtgagtcaatctcctgtgcttggatctactccgaaggggtatggctgtaggagttcgtgaagcaagattcaccagaagaacaccaagcaagccctgctctttattcctttctttctttccctctcttctttctttcttgctcacctctgagggagccctttccaagagaaacttcgcttttgcaagtcagagcgggtaactcagaattgattccctaaggcaatttggtacttttaaaatgataaaaagagcaaataaaataggagctggtccgctttcctgagacagtacagccccacgatttgggatgacaaaaccacgtcacagtctcagggagggccacaggagctccagcaccaccagccaagtccctaaaattatcactggaaaagcaccaccccccctcaacccctcaccccaaacacacacagcccacctcctgagactcccagtcctgctcccaggcagaccccaggaggaaaatgctccctcctagggtgtcctcctagggtgtcccggacgctactcacagtacctcttggcaaggacgagatgagaaggagctgaagaaaagtgagccccaactgcgtccagcaacccagctccatccttgccgcggctggtgcccgagcgtctactggggagggagaggagggacccagggaggccgggggcaggcgggttttacagggacctccccgagccccagctgagcgggagctcgggtttcagctcgccaggctctcccatcctcatctgaggggaaccaccttcagccagagcgacgtcagcccaaacctctcctctctgctgccttaacccttgcggggccccgggaggtgtggccacgcctggagacccgcggacggcggctgcaaaggaagctgcgggggagggaggccagcctgggtacaggtggggtcccagtgttgggtgctgggaggaggggccataggaccctgggcgggagcagaggtacccagggctgcggggcgctcaggtgaggccgggagatcttcctacgggaggctgagacgggagctggctttgccctctctgactgcacgcggggagcctgattaaaagcctggcctgaggagaaggaggagttggtgatgggaggagaaagggagcctccctccactccgcacgcaacactcctcgtttatctcctttcctctccgtttgctccaggtgatcacaggttggaaagcttattatcttttgcaactacaggctactggaaaaagttttcctcttcctatgatccccgtcatggtgaattcagcgacataagcagctcctgagctactggaaaaagttttcctcttcctgtgatccccacgatggtgaattcagcaacataaatagctcctgcgcacacgccaggcagggatggcgaagaacacacaagaaccctcactgcctccaccaaaagggctcagtttaggtacaagatagcaagtgacatctcgaaatgaggaagaaggatgtttcataataggtgactttttaaaataaactcctccgtgccaggtgtcatgtaccttacatgtattaactcaattattcctcacaataaacctagcctctgtattttacaattagagaaacggaaccattgaggattacaataactcatccaaggccacacagttagtgaggggcagagccagggtttgaacccgggcagcttaggcccacaggctatagtcttagccactaggctatagagcttcttaggatgctacatatgcagaattgtatttcaccatttgatatggcttcgctgtgtccccacccaaacctcatcttgaattgtggttcccataaaccccacgtgtcatgggagggaccaggtggagataattgaatcatggggacagttacccccataaaagttttaattttgttctctagatgttggcgggccctggtggtttacaagtagggtgtgctgagctcaaagcaaagtctcgggaagagaagtcaccctggactattgatgaaggcctggagtaaggattaagaaatggaagtggaagggaaaagataaggggagaaacctgaggaaggtagaatctgtaaagctcaggacagatcagaaggtcaggagccctgacacaggtgctctactagaaagaatttctgaactccagccctgcttctgggggcctattgcagtgaagtgactggaagcaagaactcagcaggcctgtgttctaattttgttgattcaccactttctggctgtgtgaccttaagcaagttaactctctgaatctcagtcttctcatctataaaatggaaataataatcaaacctactttgtagatcactggaagaatttaataagattacgcatgtaaggcccatagcacagagcctaccacatattaagtgcacactaaatattaatcattatctctattatctgacctgagactgcccccaagaacatctcatggtatgagtcttgttcctacactcaacttccatatcgagatgaaatcagttaaaataagcaccaagagtagccttaaacaggagcagaataccagagggcagcatatacctaagaggtagagggcagaggttcgaagaagggaggttcaccttgttgctggccaaccagtcctggtcctttggtgatgggagtgggaagaagatgacttagttcccaaataactgtaggcataagagcctctcaggagtctgtttcaactccagctgacggcacctgagctttacagattctaccttcctcaggtttctccccttatcttttcccttccacttccatttcttaatctttactccaggccttcatcaatagtccagggtgacttctcttcccaagactttgcttcgagctcagcacaccttactcctaaaccaccagggcccaccaacatctagagaacaaaatgaaaacttttatgggggtaactgtccccatgattcaactatctccacctggtccttcccatgacacgtggggtttcttttcatcttccctctccccacctcccagcccccaccacacacacctctc

SEQ ID NO: 915286 - DNA, 4001 bp, Homo sapiens
tcattggagacaaccctagacccttatcagcccagaggaatctacataccaaaacttactaactagtcttatctcccattaggacccccatttatttatcttcccataatttgctacccctagaagctcaaagtcctttttgtttgtcttgccacttctctgcaaatttattgttctttttaaaaatgcaatatgaacccaaattctaaccatctctttgagttactcctcactaggtatttcaacatgtaagcaccatgcacaagttaataaaaaacttttgtttgtttttctcttgttaatctgttttttcttttttttgtcattctaatttacagggccacagccaaggaatctaagatgggtagggaagaaagattatttttccttcccaacaaacctgtttggctatttgctaaggaagtccctggtaccaggtctttacttctctaggttcaggggtctggaaacagaggcccttcttctgtttctggaatccccttcaagagttgatttgttagtttgttgtcactaatttgggtttgtaaatttcctagagctgaggacctggaaagaaactctcaaaaagatgctctgcaaaggtggaggatgtatttttctggagaagtcaaagcagtaatcagatattaccttgttgaactgcacaataatcccagggctggaagagaaagaggagaactgttattatgacacagaaaagtcagtagtttactgaggacattcagccctacacaaatttctgttttcctacacaagtttacctttctctgtccccattatggtcaactgcatttttcatattgatagagtttagtattgttctaaatcaaggattcttaatctggaagctcctggttgagatggggttttttgagggactttgaatcttccaaaatcatatgcaaatttttgcatgcaggtttttgaataagagggagccatagccttctcatttgcaaactcccaacttttttagaatcactaatcttcgtaagttaaaattgaaaaatggaccaaatatttctcagatttggggaaagtgattttgtgaatatatacaatcattgagtctaggctataaactgcacagtggacatttggagggccctctcacctcctcctcacctttaaaaaactatttctgacttaagagcacttgctctggaccatactgactaatgttgaatgcagatggaccactcgctacctgtgtacacttgggcatgttatttcacatatgatggccttggtttcctcatctgttaagtctgaagaatagtacctgttgccattagggctagagtaaagagctcaaaacagtgcctaaaatatactaagatatcagtaaatgttaactgtttctgtgatgcttatctccccctctgccctcacctcctaccactgcttgcttcggggagaataaatcacaagaaaggctgtgtatgaaaaagacaaagtggcatgctgggagatagggcatgatacctggaattaagaattatctactaataatcagcatcaggaataaaaaattggctgtaatagacagagtcaggccacccatttaattacaagtcataatacccactaattttcacatggtacctttttcagtgccaccagggaggctggttgcatgtgaatccacagggagaaacagcagaggagactgtctttgtgaattcttacagttccctctatctcccagctatcacttctgcagatcagcagctaagcagcaaccacacactgggaaagccagaggaaacaggccagaggtagaactggtctgcaaacctataagaggcatcccagacttctggtaattaagtttggtttccatcagctgtgcaaaacaccaagttcaagtcagccaaggccagagatggagaagggcaggattgtggaaaagacaaagggcccttccactggagcctgctgtaactggccccttcatggaagtctccagccctaatgaatcccggctgttcacctacacaatgagcaatcatgttctgcctcaggtctggctcagctccattcccttccactgggagccagcaagggggtaggtacaactgtggttctttctcaggccacattcttctggctctatgtcattgttcacacaaattgctgaaagtcggcaagcttttctccttcatagttaatatgctcctgaatcacttggggaaacctgttcttgacatccatatgtatatttataaacttcaatttttaaaaatgttgtctgctatgcaactgaactgcaaagctttacagagaacactggcaaaaacgttgaccacagtccaagtggctaactcaaaaacagttgagtcatttgggtagggaagaaaacaaaaaatagaataactccaagagaaggtaatggagtacagtggcacacaaaaaagtcactgtggtgaaaagatccccatatggatcaaggctctactatgtatgaacctgggcaagtccatcagtccctctgagtttcagtgtcctcctctgtcaaaaggggtaatagctacctctgaattttggtgagaagactacaatgatgctgttatacataataggagctcaatcaatgtgtaccattttttaatattataactactgtaactatctatctatgagcacctcatcttggagttgttaaaaataggatggagagaagtggcttgaactgagaggcactgaggaggttagaaggatgagatctgtgattgatgatacatggaggataacagtgagagagcagtcaaagatgattcccagtttaatgaccatgtggtggtggctggtgcatggtggtgtgctggaggagcccctttgttctctgtctctctcagattactctgtctgggagaatctgggaacaaccctgtggagagtcttacatggagaggaagtgaagcctcttgacagtagtcacctgaatgagcttgagaacatatcccccagtccttcaaatgactgcagccccagccagcaacttggctgcaacctcatgagagactcctagccagaaccacccagctaagctgctcccagattcctgacagtcagaaactgggcaagataatgcattttattgttttaagcaactaaatgtgttagttcattcaggctgctgaataaaatgccataaactgggtggcttataaacaacagaaatgtatttctctcagtcctcaaggctgcgaattccaaggtcaaagtcccaggagatttgttgtctggtgaggtctcactttctggttcacagatgatgtggttcacagctgagtcctcacatggtggaagggaagagccctgatctcttcagtcaccactatggtctgaatgtttgtgtaccctaaaaatgtattgaaacctaatcccaaatgtggtggtattaagaggtgggaacttgagggtgtgactaggtcatgagggcagagccttcatgaaggagattggtattcttataaaagaggcctgagggagattgtttgctctttctgcaatgttaggacacagcaagaaggcaccatctatgaagcagagagtgagccctcaccagacactgagtctgctgacactatgggcttggacttcccagcctccagaattgtgagcaataaatttctattgtctataaattgtatttttcttatagcagcctgattgtactaggacagccccatatgcatctaccaatccaattcatgagggctccaccctcatgacttaaccatcacccaaaggctccacctccaaacattgtaacagtggggattagtgttaaatatataaattgggggaaatcataaacaatcagaccatagcacacagaaataaaatacaaatacaaaaggtttctggattgggcaacatgggttaaaggagaaactaaaactgtctatatatcagtaaacatgcagccaaatgaaaactgccagcccagccacatttaatatagatattattga

SEQ ID NO: 915287 - DNA, 4001 bp, Homo sapiens
ggctgggcagccaggggctgtggggctcctggtgcaggccctggagcagagtgaccggcaggacgtggctgaagaggtgcgcgcagtcttggagctcggccgccgcaagtaccaggacagcatccgacgcatgggcttggcccccaaggaccccgctctgcctggctcctcggctccacagcccccagagcctgcccaggcctaggccccacagacttttaggctggcccagatattccccagtggatgggcagagcccccaccttcaagtctctccagtgtgtggggacgggtccctgtgagcaacaaaactgcactgtttctttcacctcagagcttgatttatttgttggatggagaagccgttggagggcggagggtggtggggtagaggcctggcccctgcggggagggaggcctgtgtgcacaggtgccccacatcctggtcctgtcctctcccactgtgcctggggcctcctgtgggtcctcatcttcctgggagggaggagctgtgctacaaagtaacccacatgggctactttttttttttttttaaatggagtttctgtcacccaggctggagtgcagtggcatgatctcagctcactgcaacctctgcctcccaggttcaagcgattctgcgtcaccctctcaagtagctgggactagggcacttgccaccacgctggctaatttttgtatttttagtagacggggtttcaccatgttggccaggctggtctcgaactcctgaccttaagtgatccgcctgcctcggcctccaaaagtgctgggattgcaggtgtgagccactgcgcccagccccaagtggggtgctttggatacaaagtcgctgttcggcgggtggggttgtgcctccacttctccattgcgctggcccagcagttccacggatcacctgtgtctgccctggaggccacgcctcccccagggcaccctcatccaccggcgctctgccacctgcccgcgccccgcgggtccttgtgcctgcaggggcctgaggcccggaaaccaagaaaggaccttggggacgcgcggcccggcctctgcgcgcagaactgccaccctgcccgggggaacccacggccagggggcgggtgggcgcgtggctgtggcctggctgggcgcagtagcctcgacggccaggagggggagccgaagcccggaggaggccgagggcggagcgcgcgcggcgccgagcggacgcgcctccccgcctaggtgctggccgagcgcggggcgggcaggcgagcgcggcggcggcggcgagcgtggtgagtgtctgcccggcggctcccttctgctgcgcccatccgaacgcggccgggctgcgggggcgagaggtgctgcggcggccgagggaggtgacagctgcccgaacaacgtggcctggcgggcgggagggggggtcctggaccagcggatgctccgatccgcggctgctctggcgtgagacgccgtgctcggccccgacggttccgggcgcgctccccgcacatacgtgtccccgagggtgggtgtccggggcccgagcccaaggaagaaaggccgacccgtgtgggacgcacacgtgggagttcaccggacatctgtggacacgtgcgtggccggagtcgcggtggccaggcggaggacggagcggtcggctgagccccagcagtagggcaggggcctgagccggcctccgagcgcagagagcggcccccaacccgcttctcctttgtcctctggccgaggcatcgcgcagttggagtccccttccgggaccctccagccagcaggatagaaagcaccgccccaagaggacggggacagcgggagattgaatggggagccgccggccagactcggagcctcacccccattgcctttcttgggggtaggaggagcctggcggcttcttgggtggaggattttacccctgcagattcggaagcagcggtatcttcctgtggggtggtctctgctctcctgctgtctccctggcttgcctgtggcctcagttcacctgactatgaaggggggacagtgacggctcacagcccggggcccggctggggctgcagggtttctatagcaacatcagtgcagggggagggccctggccagctgtctcataaaccaggggtgggaactgccgagtgagggcagagaaaggcggggttggcgttcagagggaacccctgccggttcttccccaggcagagcccctcactgtcatcattctccacccagaagctcctctccgctgcactgggtgacgtgcgggcccaggcctgcctctccgccctgggatctctgggcctgcttctcttcttgggacgaatggccgctccccacctcggtcggcctgacttccaggattgcccctatcatgcaggtgtcctcatcccagactggagataggctcccaggaggaagggggttgctcagtccctggagggccagggtacacccctgggagggactagagtggagatgaagggcccagcgcagcccggagagctgtggccagtctgcacccgaagagtggggcggcaggggtggggggggctaggagggatcaggtagaagttcagaggtcagcttgtcaccaccactggctgaggcagggaaaggcaggtctgacggtgaagccctgagtgggacgggtggtggggcagagggctctgggcatgccagctcgtgtgccctctggacctgccaggtgagcagggcctgtgggtggcaacagtggcctctggcacccagctagctcttccctgtggacagcaggccttttttgtggcccagcatgaggcttccctgacatgcatctgcccctagcagacacacatcccacagacacgagtgggtgttagcccatctctgctccacagcaccggattccctgtccaggtacatacagggtaccctggcccggagaaagcctcattctcagagtaccagccctagacagatccaggccaggaaatgctatagggttcaacccacaggcagcagacaggaacacatgtgtgctgggggtgtggtggccacgcgctgaggtccctgtcggtgggtggcctcgctgtgccaggtcagcctgagtcagacccacccctgctcatctctcctctcaaggctgccggaagcctctgcttgcccaaagtgaaagagaaagtgcccccccacccaagcccgccccaccccgccccacggccaatccctgcggcccctcgcctcctcccccggcagcttccccttctgtgtgagtgctgggctggagtgtggaagagccatccagagtgagtgcctggggcagagtgagagcaggaccagcgggcaggtggcggagcgggggtcggtggtggatggcccagccctggaaagccgaggtgaaggttacgagtccctgaggatctgtgggtgtgagccagccgcgtggccctgggcaacggcgctgccggtgggtgaaacagctggcctctggggggcccagggaggggggaaaggcccccgaagctgggattttatggccatgaccctatgggaggcccctgaggctggctgtggctccccagccttgctgcttagtgggagaggcctgtcctctcctcctctgtagtggatgggggtgccagccacagggggcctcagaaggccagccatcccccacccccaaggcttccaggggtcccatcactggcttctgtgtgtccatgagtgaaactcctgggaggggtggaggggaggaaggggcgggcaaggggctggctgtggggggtgtgggcatcgtggggaggagctctgcaggccctaggtggagctgccatgggaggagagctatacctgggatagctgagcccaggtcggggggtcttagggcgcccgggaccccagcccctagctcgaagggggcaggtgccggctgctgctctctctgtgctgaaggatgtgggggatggtcaccacagctgtccaggtcgaggtgctccggt

SEQ ID NO: 915288 - DNA, 4001 bp, Homo sapiens
caatgaatttggcaacttcctgccaagctgaacaacttagtgctgcagattgcaaaatcacactcatagtcattctttcctaatcaactattccctcaacttcacaattcccatcaccaccaacaccacactccactcacccagacatacaacctccgcagcacgtttgaccagtactgccgttcatggcctattaaatactaggtactcaagtgctgcttatttactccttgatcgcacagcaatcacccacccattttcttccactcttcacaccctctgtgcacaagacctcagccgatgccttgctctctggcacccagccctccaggccccatcctctcaccttcttcccagaccctaaatgccaccatcattcaaccagtctgtcctctgctcaaacaataacttcacagttctgaaaccatcagcctacactcttctgttccaggctgacccaggcccatattcactctcagactccaggaactctgacttatcctcctgccttggctaggagagtcactgtgtctctctttccaggaacatataacattctctgccatctcaaaaccttaacaaaggtcttactccttcttgtccaaatcccacccaccctctgacaaaagttttcccaaagtccagccgcactgggtcctctctcttcccctgccacagaactgtatttaaccctcctgcgctaccttcctgttggttcataaacactctctcctgtgtggagagtcagaacagctgatgaggaaggtaaggcacgtagccacgtgatcctgcccaaaccaccagactttccaatctcacacaactgttatgaagctcaaatgataatttacaggaaggggacttgttcatctcacatttgtaagaccgtccaagttgaggatccctctaatgcctgccaagtgcagatatttcctatcattcacaaccctagagagctaagatctcagcaaataccaattatatgtaagacactgaaagaacacacttctcatggagcaccggtcttcacatcctccatgtagccactcaggaacttctctggtgtaaaattttaggcggctggacaaatatgtaggagacaggggtgaaaaacggggacacagctattcttggcaaatctggtggcaaggtgccagttctaagggtggaacataaactataagccacagtccgatcagaggggcatgaggaacaaaagaactgaggagtagggatgcgagcagagtagaccagggtaccaatgaaacacctgggcaaagaacgctttggaccataaaactggggccactgcccttcctgacgctcacgaccatcacagctgggcgtacccagactcgggcctgtgagccgtaaaatcgcagctcaccgggccagaccggggcggccactcccctccgtcctgggcgaggcttaccaatcgagatctcctgcgcgaaggccagcgagatgagcagcaggggcagccccaccgcaatgcacgtgaccatcttgtccacagccagctccagtcgcagccccttgaacttgggctccgtgggctccttcagcaagaaatccgagaacacgtactccgtggccagttgagcgatggccatggctgcggcgcgccaggctcgaccaggaggtccgggtacagccggcgtcgggaaagctgcgcggcgccttcacccagtcaccggccgggcgcgcggctttcgctttccctttgcctgctcccgcatcccgcctgcctttgtgtctcggtgcctcaggctcccagcgactccgctgggctctcgcgctcgctgcctccgccgccggcggggcggggcggggcgggaacccgagagctccgcttcctgcggttccaccccgcacgcccgtgcaagtccccgggccgcgcgcggcactcggattcgcgcctctcccgcgcacccccaggcgcgggaaccacgcgcggaacaaagcgcttccctctggccctgcccctccgcgccgccctggctgccgaagcggccgccgggatagccctgcgctcacagccagctgcgccgcgctcttccggaaccatgcggggaaaccaagtacccaggggcgtggagcttccggaagacgcggtgacgcggggcggggtgggcgcggctgcattccgcgcccctcgggccactctctgacaaagggattttcccactgagcggcacctttggaaattctcccgtccctccctgccggattctcctcacgtcctggcacccgggagttttaaaatcatttctgcaagcgactctttctgtggatgggatggccccctttacgccccacccccaacatttccaacacggtgaaatcgggttagaaggagctgcaaaagcttcaaagaacagtcagtgccataaaaggccaatcgagcggtgtagaccgacggtgccttgcagagggagcgctggacccttccaggagctccgcgtgagagggtggcgcggaaacggtagtgagtgtggagtttcgaggcctgagtagcgctgctggtcccgtttctctttcctctgccatcccaatcagagccttgttccgggagccagcagagagaggggggcctgcaggtaggtgggtgttggggctgcagagagctgcttctgaacagctcataggaagtggatgatggaaagacaggaggaaatactctgaccagtgtccacggaaattaaggctgttgaagtagaaataatttgatttattggaagctaaatgtgaggatccacccaagaagacttaccagcaaagttgggcatgtttcaaaatttgttacacgttggaagggttttagaagaaagtttaggaaaagggaggaggaccccttatatcagaggtgggatttttttcatcggagggtatggtacacaggttacagtcactggctgcagatgacaacatacaggctaaaatgttttgtgcacaagaaaatcaaagtttatatgattcagaaacaagtcagtgttcttttcaatgtcagtattttacatactaatcagtacatcagcagtttgaggaactgacaaaaggatttgaaggactcacagtaagattttttactcagggacaggatctaagccatgaatcataagacctttcttagatggcttagtttggaagccctgtcaaatgtgacatgtaggttatcaccagtaacatttgaagcaggcaggacctgcaaacatgagggctccttggggcagggcttggctcccttctctgtgggtccacagatacaagcctcaactcccacatgtacctctccaccccagcctggccgctaaacacacatccaagagcgtatacagctctctccgcgtagatggctcatagggcttcaaactcataacggccaggacttcagtcttcatcttccccttaaacctgaactccatcttccccatcttactaaatgtaccaccagccacctgtgcacccaagtcggaatcctggagcaccatcttcaacactccatttctcacagctgccataaccaattttcaaattctcttgcttctctctcctaaatatagcaaatctgacacccctccacctgcactgccaatacccaattcaactcaccatcctgtctcctaaccacatataggaaatatgtgagacagggtccccctccattctcctctacagctgccaggatgagcttttcaaaactccagtcggatcatcttttctacttaaagtgtacattgtttttagcataaaatacaaatttcttagcatggcctctgcctacctcaccaccagcttcactgctttcctttcagttcttcaagttagctaagcccttggcctcctccaggccttcccacccaaaacactccccacagtggcctctttgcctggcccacctttattcacccttctggcctcagcttgatgtcacttccctgggaaagccttccctaagtagacagactagattaggtccctttgtgaaattctcccat

SEQ ID NO: 915289 - DNA, 4001 bp, Homo sapiens
agcagctgagtgaactctgaatggtgagacccacagccgagttcctagagggttggcagcctggcttaattccaactgcaccccgcccctccccacaaattaaggtttgaatgactcttctaggaggaaactgatgagcccaggagaaaggactacagagtcaatatttcacatactaatgaaatagaccaaagggatcaccttaaaccgaagtctgcctgtttatgtgcctcacccttaggcacaaagcttccaattagataaaagggagcaaccaaagattgccagattcagagaatgcctgaaacatgaaagtaagtgaccaaaataaatgggttaggggtggtggggatagaggcaagagggagtagaatgaaggggttctgcaccactccactcagccgtgaagctggccttacagagagtttgctttaccttgtggggccagagagatttcattttgtcctggccaggcccgtcctgcttatggtgaagcagtgagtcccagcaggagctgtccacgtaggctgcctgccggatgctgaagttactgggagagaagcagctgatcggagaccctgcaacaggaacacagctttgaggccgcctgagttggagtggaggagtggggactcaggggcaatcatctaactcttccccagtttctgtttctggcagggactgtcttcttcccacaccttagtcttctgggttgagcactgccatgtcacggtaggacagggcactcctggacgcatcccactgtatggccagggcttgccagtgctgactcagccttttgggtctggtggttctttgctctcagagcaccccctgggctttttgtgctcctgtagtctggtaccagaaggcttgcggtttgatggtgatgtctctttcctgaaataactgacatcctttagactctaaaatgttgaggatgaattgcctgggcttccgagcctaaatgaagagaaagggtgggcaaattatgccgaaaggaaagtggacttggaggagagttcctgcctttttgttttcacatcattctccagaaagaggaagaagtgggagccatttcttctgccctggttgtggatgaataaagaggcggtgggaggctggcacacctgtttgggaaatgtagtaagctaatggcactgccagaaaggaaagccagaagtctcagttctcaggaagtccacattctctttaacaaaggtagtggatttgctgactgaatctagcacctgaaaccctagatgtatgtgtatgctaatgtctgtgtgtgcggctggggtttgtagacaggaagcagtgggtttatgcagcatctccaatgtgcatggccctcaggcacttaacacatgttctcaagtcaataaccctggagttggcgggttaggggtgggaagagggcccagagcaaataagagacttggcgacagcccagctaagatgaagaggtctaaggccctaaaaacattaccaggagtgtcaacttctttcatccataatgaaagccaaaataaagctttcatcatttgaaatgacataaaatatatgaatactaaaattacaacaatttttttttttttttttttttttactgtaacattttggagatgactttcaaaattttttggtgcctctgctttgctggtgccctgaactcatgcaccatctgccttttggataatccagcccagcccgaagccatggaatcccgtcactgtgcgcaccatctcacttcagagcccatgcagagagtgacatgagggggagtctctcttgcgcactgggtcttggaagcaacttaccagaggagaactcctgggcgaatgccagggacatcagcaacaagggggagcccacagctacgaacttgactatccggtccaggggcagttccagacgcagtcctttgaggcggggtcccctgcggtcaggcagcagggcatctgagagcatgtactctgcagctgtgtgtgcaagtgacatgatgctgctgagcttgggggtgcagaggtggcagcaggggtcctgggatggtggaatgaggagacggcagcttcaggcagctgactttgggcagacagtgcctgccaccccagccttatggatatctctgctgggagcaggcgatggttctctaaataactgcccaggccctgagccaggccctgctaattagagggaggcatagccttagcgggtccttgctggaggagggtcgggccttacctgggcctggtgccacgctgctgtctggattgtcctagagcagatggaggtctgtggctttatgctgccctgtcattgataaagtattttcagtggagagaaggagggctgtggagccaggacccccctccatgtaatttgtgtggaatttgggtgaggattgcttaaatgttttgaaggcactcattttgtggtttggagtgggaatggagtccccacgacccagctgggattgctaccctacatagtagtctttgtcccagtgatgatttttgctctgggcccagactctttcccagaacttttctgtatttggtgttagatttccttccctgactatggtcttttttccaaaatgtttcaactacatatttacaatttccaattcctttttagcccttgggttctttacaaagctgggggatgcatggcagtgttgagtcatggaaagagtacaacctttgaaattcggaggagaaactcctccactggagacctaggagtactcaggttttaactgtgtgacttcaggcaagtcacttttagctcagtttccccatctctcaaattgtgatatgtaacaagcttacaagactgtggggattgattaagagtattgtttgtgaaggtgctttgtaaaccgtaaagtgtagcagaagtgtcagctcttatttcaatttggtgggggtgggtaagtggagaatagggcactcttgtctctagtgttgcccttaaactggcaatagaggctcttaaccttatcctctttggttgtgtccttctcatgaggcaaggagtacgtgggcccaaggggatgtgtccattcagagtctgtgcacccagctagaaaccactctctaaggccctgcccaaatggcctcagcctgcttcccagacctgtgtgggcctttttttcaggggcaactgcccaagggaagattgtgctgctggtgtgcacttctaggcccaaggaatggctggttgtcagggtttggatgcaatttataaatcttggggtgtccacacatgcaattctgaggttttttgcaatgtgggtgttagctgagttgggaagagaagattgggccaggggcttgggagagtctgaggattctaaatttgaatctggcattcctgatcattatgaagctggggtgtgtttgtctatatatgtctaggtgagcaagaataacatattttatttaacagtttgttaacttggtttataacttttaatattttagatatatggtatgtggatctgtatttgaacttttttctcctaggccacaaatgtttgggctgggcttacctctctccccatcccacaggctagaggccaacttggattcagagctgccccgcgtgggctaactggcgtgtatgggtcatggggcagcagaagggaccctttatttctattccccattaccctccccacaccacatttctgtatcttttaattaggcatgtttttgccaaatgtttattattagtttgtatgcatgcatatccttttactttttaaaaatacatttttattgagaaataatgtacacaccttagtattgtgtacggtgcacacaacttgggtgacgggtacactaaaatctcagacctcaccactatgcagtttatccgtgtaaccaaaaacgatttgtaccccaaaagcgattgaaataaaaaattaaaaagaccaaaaaacgagagaaaaattcacataccataaggatgcagtttaataaatactcgtctga

SEQ ID NO: 915290 - DNA, 4001 bp, Homo sapiens
acctcttgtatatttcaaaatatctagaattccagtggtctagcatagagaaaagacaaatctttaacgtgatggatatcccaagtacagtgattttgtccgaggcatgtgaaccagagcaactccatcttgaatggggccaggtaaaacaaggctgagtgagacctactgggctgcattcccagaaggttaaggcattctaacttacaggatgagataggatgtgggcacaagatacaggtcataaagaccttgctgataaaacaggtcgcagtaaagaagtcggctaaaacccaccaaaaccaaaatggcgacaagagtgacctctggtcgtcctcactgatacactcccagcagcgccaggacagtttacacatgccacggcaacgtccggaagttaccctatatggtctaaaaagaggagacatgaataatccaccccttgtttagcataccatcaagaaataaccataaaaatgggcaaccagcagccccaggctgctctgtctatggagtggccattcttttattcctctactttcttaataaacttgctttcactttactgtgtggactcaccctgaattctttcttgcgtgagatccaagaaccctctcttggggtctggactgggacccctttcctgtgcaatttgatctttacaaattatatgaatgtattacattatcacatgtgccccagaactatgtacatcatgcatcaactaaaaaatgtttaaaacaaaaatgtttaactcagcaacttctatctacacaccagtcaccacagtgcttcttgagaactgccacctcgttttcaaaccaaaaaccaggacgcaaaatctgtgcatgggaaaaaaaaatattttacatgcaaactaccctgaaaaaaaaaaaaaaaaaaaagaataaggtcgcctcaattcactctggtggggaaaaaacaaaggtttttacgaaagccctgaatgcctgagttcacagcaggcccatgacgaagtttgtgtctcacgcaggttttctcctttggtgggagtttattgtgtattacaccgagggcacgctaggtttgccagtttttcgctcattcattcaacaaacactcgatgtccacctactccattaacagagcccttctcagccctcgggatggacaaaagatcccgaagaggccaaagccacgacgccgctgccagaggacgtcagcaggtccaggaaacgacctgattttaaggaccaatgaaggcaacgagtaagagcgacggcgcccaggaaagctgcagcggaaacttgggaaatgccagccttcgggcgcagagggcggggcagggcctactggatcgcactgtctgcgggctggggccccgcctgggctccggtcccgccgcctccggccgccaagcggcgcccgcccacggcccggcgggggcgttggcctggtccccggcccaggagggcagcgcccgggcgaccgcgagcgggcggggtggcctcgatggcccgcgagccccgggctcagtgtggggtgcgcgtcgctcctgcccgacgtacccgggaagcgcgcgcacgcatcgccgcgcgccccaccgcgccgggcacccgcggcgcgctcccgcccggtcccagtgccccggcccctcggcccctacggcacccccggctcctaccgcccgcccggccggcctggccgcactcaccctccttggctttcttcctccgggccagggtccctccgagtttccccaagaaggaatcatctttcttgcgggacgggggcgacttgggagtgggagacttggggacagaaggcgacttctgcggggaggtggccatggcgcggcgcaggctgccgcgggccggtcgggacgcggagctggcgctgggcggacgcagcgggcggcggcgggactgaggctgcggctttccaaacggaagcggaattattccaagcatttgaggcagctcacgctcgcctttcccttccctcgctccctccctcgctccctccctcgcgccgccctctgccctggaaggagctgcgctcccggggccgcgccttgcgcccctgggttgccccaagcagggaggatgccccaaaactgccccttgcaggacaggaggacgtgtgtgcccaggttgggagcggtcgagccggaaagcttcatttacccaggctctgtccccaccacacagcctggcgcaaaacacatctgagaaccaacccaaccctgctactctcccggggtcttccagccggcggctggtgagctcgctctgccccagcactactgcctgtggggttatcaggcccacgtcttgcgcccacaagactgcagctcctggaagaaattattgcagtgaaccaaaatgtgtccaggccccaccaaagtgggcagaaccaatcactcctgaacctatccatgaccgtcaacctcctcgtctctactcccatccaagactgagaagcttggagtgcacaagggtaaagccgaggcttcttattcttgtaagacatccgtgtttccagcagcttatacaaaggaagatcccacgtggtggtggaaacatgaatgggaaaagcacaaccatgagctcctacaggacttcccgcaaaatttatcctgcctaaataaaagcaagagagtgacaaccagactcatttgagataacaggggagtcatacaaagcacagtgtttgaaggactcatactggaaatgattaaaaggcacgtgttattgagcttacccatctcaagttctcactctggctctttgtccttctgtctgtctctcacacacagactcacagcaccttggcaactgtgtttcctccttgtggccccttctaggccacagctgattgaacctgggtgaacacctaatccaaagggcgctactgctttactgaagagcagacgatcagctggccccagttaagactgcactaagctggagagactgttgtcagaagttgtgctcgtgactgatgatcattcgcaatcaaaactagggtggctgtttctagccacgtgcatgctgaggagtagggaaaccaaagaatggagcaaagaagtgtgctcaagaagccacgtggtctgagtaatggaaaccgtggggagtagctgcttggaccttgaatcttttcccagaccccacttgcacttcctgccagggccagctgtgcttcttcccaggagatgttactcagccttttattaacccatccacagttccttaaactaaataaagtgacaagcaacagtttctgagtagaactaaaatttaacaaaaagatagtcaacagattctcaacaccgtataggttcattttatcttaagagtcttaattttaccttttttaaaaaaaaaaaaaatctgctttagttggtgcctcttacttaacagcagaaaagtcatgatgtctgctagcctgggaagattactacaactcctcctagacaataaatcttaaagggatggtgagaagccaaaatataagtgtgttttgattacatcattaatcatttttgttcaggatatcagatataggacatctccaaaagcgtatctccagccccgagagctcttgtcagggaattaagagacacgtagctcaatagcggtgtgatcttggaaaggtttactcccttttctgagtctccatttcctcatctacaaaatgaaatggttggcacagaacagtggttttcaaactcgatcgtgcatcacagtcgcttagaagtttgttgcattcacaggccccatctccagaaattctgattcagtcgatctcaggtgaaaccaagggataggtgttttttaaacagactacatcaggtgatttcgatgtattaatagctgattcacaccctgatgtcttgccatttagggctactttcagctcttaacagtctgtggttctttattctttcaaaaattgctaatatctgtatgcaaggcttagtcctaaatgtgccataatcaaaattacccatggagatt

SEQ ID NO: 915291 - DNA, 4001 bp, Homo sapiens
ataatttagcacaaagggtggaaaaagagaaatcatgatgtctcatcttaaccatccagggcaattcagccagagtctactgatgacactggcccttctatttccacagtttagaaccatccgtaaggaagcccagacaggcacaagaaccaaaagccccctccacaactcaacaacacactgttacccattgggcatagattacacctattctcttaccttgatttattctcctctgttttcttcaggcttctcaaaatgctaatcccttagctgtaggcccccaccctccttagtgaccacctccatctaattttcattacggcatatgatggggatgaaggaatcagccatcccaggtatgagactgcctatagtaaaagtaaagtaagatctctcctttcccctgtggctgatacgtccctgtatacgtcctctgcccgttcttcttttccccaacccacaacttacttttgaacatccttccaaccatgcaggcctcttctgttgttgctgtgcatattcctcttcctctggagcacttttctcctgggaactggaggtggcacatcctacactgaacaatttctatcacttggccagagagaggggaaagagaagtgagaaaagatggcactaccaggaaagaacccctctccccttttgggttagaagtctgcctagagccacagggctttgccagagcccatcaagcgtgaacctcttcctctgtggaaatacactaagccaagagagtgattgaggtttatggtctcaggaattttagcctgaaaaatgggaggggaaagaaaggtggaggaataaggaaaagtgaaacattatcaagactgaggtgatcagacaggtcctcttcatacttaccaggaaaattgtttttcacagcaactatttcattgactgtactggcaagagaaagaaaacacatctgaaatgtgcctgagatttactcttgtattgggttcttatagtctgcccttcagggtccatcctgcactcttaaactggagccattccaggcccactctgtccccctaatgcctagtcacctactgggcatctctgcacctcttctctccttctaaatctcttcacctcttcggggcttctcagattcatctacccattcctataggatgcagcacagaccaggaggagaaagataagtgcacctgcttttttgcttcattcccttctttttaattgactctgtgtggcactcttacctgtgggtgcctggaatctgacaatggggacaacctgaaattcctgaagttgccacgctttagatttggccaagcgacacctgaaaagccagcattccacttcctccttttccttttccttgcccttcactgacgctcactcctgaccttgtcagttgatgctaatgttattttgtcaaacctaaaatcagctcccatgccagctctgtcctgctggaagaggttgttgcgtgttggaactcaaggtctattcgtattttggttttttttggcccctggtgctcacctcaccccactcatcttttcctcctcagaccttccccttctcataccacttatctattcctactcacctgcatcatttctcattgaaagtgatccagataatgctgttggaaaaaaaaagagatacactgtctgcagacctcattttccaaaccccatctcaaagcttctatgaacatccactcaattcctctctaatctacctatttccccccataaaggaagggagaagagctttagttaaggtcctggggacatgacatacccctggtagaaggcataacattagaacagaagctcatcatgcttcagttgccataggactcccatgagaaggcctctgtcatgggtgctctcacctgttcctaaattcaggactcttaccagctgtcaaccctagggactcacccctaaagcagcagagcaggatggggagttccagcaagagggacttgtccattttggaaagagggagggccaggctacagcacgaagcttcgagagtgcctatttatacacctgcaaggttgggctttcctgcgaagggttaggggtggggactctgtggaagttcttggaaggcataacctgctcctagggaaatcaatgactctgttatttctcttccttgcaacttggtggggagaggtaatggccaggtcaatcctgagtctgatttattccagttctaccactcaggatttttgatgccaggttctatggtcttttcactatactgtactgtaagagaatgcaaggataaagctgggctggatgggtagaattgagagtcatctacaacaagacattcattaaagctgagagaatacataagtataaatcattggaatgcagaaaggcaaaaggaaggctgaacgcagacttaaaaaatacatacctctaggaatggagaagagagggcacagaaaggttaggctcagaggcagacagagggttcccatgaggagagtaaagtttctcactgtcaatcatcctggaaagaagcagaccctagggtagaagatgtaagctgaggagggaactgttttcctttcttgaggcttcctggtggctgcaacttagactttagttgggagagagagatttaagactacttcatctggagagaggtaagctgatccttctcacttgatggcaggccagggtattgaacctgtggattctaagagcagccgtatctagtatctcattttaagttttctgttaatttccttcagttattgctatgcattcagtgcattgtaatgaacgttgcagcttagtcttcattgtcattgtagagaactgacagaagagcttgtgcccatgcttagggcaaagcgtgtattgctaggagcatcttctctatatgagaagagcagcaactggaaggatgcaggttgcaacagggcacaatgcaggtctacagccaagtgggatggtggtctaagcaagatgctggctgaagtggttggggacagcaagagtaatgtataaaaaagatttttgcatccatgatattttggaggttattatcacatgccaaaagatcaaactggcatttccatgcacagaggaagagagttatatactaactcctgacctggcactgactaccctgatgaagttttaaaataacaccatgaagtattaatgtactacatacacacttgtgcacacatatgcacatgcgtattcacacacacacacacacgcacacatgacagcatcgatttttgtgttgagcatattcacggacagaagtcttcctttccttcctctcatttccctgaaatttagcatcttcccttgcatctttacattcctttctcttgccttttgagatctcccctcctttccttccaggaaccccataattatttgcctaatggcacccatgagaaaggaggaaatgttctcttcctctgccctgtcggaaacgtctccttacctaactacacctctataatattattataccacttcccctacagcagaaatttccttctcccagccaatgatttgtactgatccacctgtattccttgcttatatttaaactcctttatcgacttacccctaacatctcctcaaatgtatgaatactgcctagccttgtggccctaatacctgattttcttactgagcctcactctgctccttttctttgtgactctaatccttttactttttgccttaagggaccccccaccaccaaattcttcttatgtcataaattccagacctgtgcccagaaagtattcaggaatccctttcgccctattgttttgaaccctatggaagtttataaagccctttattcacgatcccctccctctaacacagagttctggagattcagttagtccagaagagtaagccctggcttatacctcatctctgagagtgatgaggtacttagttatgtctctgtgtgtacgattagaagatgtttagattatagctgagaac

SEQ ID NO: 915292 - DNA, 4001 bp, Homo sapiens
tctgttcagtttttttttttctgccctgaggttcccccaagagctctatcagagaaagacttggcccatgctgccaacacactgggaagctggggttagccctctccagaacccacgggcagaaaaggacagtgccagaaagtgtcagggctaatccaaagagaattccaacggagaggagtgtgtgtgtagatgaggatagaggatagtcacagaattctcagtacaaattggagattattatggcccaagtgttcacattttcatacaggagataataaatgaccaagtctgagcttattcatggcagtatcacgtaaggagagcaaaacccctcccacctgttagcgacagggatgtgcaaagagtgagtctagtgctccatcatcaataggctccgctgtccacactgcgtctccttatgcctgcttgtcttttcactatgagctggctttctcactctctaccaatgcatagaagaggagagcaaaattcaggttcagggaagagaaaaagagcgtagtggttgaaaaagaacccaaaatccaggagagacgtagaactaaactccctcagggaggttgcagtagttactatgatcacaacagatgagctctaccctcttcgtgaaccccaggaagttgatgtcctcacagctggtcatacacgacagttttgaataatgatacatgctctgccctgaggaggtaaaagagaggaaatatgatcataatgacctcatttccttttactgcgttcctaggagtaatctgtttttgtgtcctcactaacctttctctaggcccaaatgagttccaaagctgagtctgttaattgctgacccagagagtagattttattccctgccaggtaagggacatcagcctctttttcactcaatatggtcttagggaaaagtctgtctttgccatcccctcaagaccaccccatactcacccatcccattcacctactcacgctgagggcaaaagaacactactgtttctcagggatggtggtggtgattttccagtcactctatactccacattacctttccttgtaaggatgtaaaagttctcaactgcacaggactgtttatgcttcagggagcaggatgtcatgacaccatagcataacccaagatgatattttttacattcataacacattatttcagtcgctgccagatacaaaaagaggtgcttagaggatgcagtcttgagaatattctctggggctgggggcttcactacaggaccttattcttgcctagtggttcctaacattttttggaccatggactcttggtaatcttgagaaagatagggataatcatgctgcggtcctccccatgtacacattaataaatttgtacacattttctccaattaaaaaaatcttgtgaaagataacctgtacaaacataaatcaaacactgtatatgatttcaggaggtcagggttcccatgaaatttatccatggacctccagtaatgaaccccttatctagcctgatgattttgccgagtaatgggtaaaagaaagtaaagtggatcttagcctccttactctaagaaatggacaaaacaggtctggcaggaggcgaaacccctaggattctataataagaatggattacaggcctctctgaagatgaaggaaaggtttgctcctaaacatgtcacaaattgcctgtttaccaaggacttcagagaagccatgattgtaccttttatagggtcatgaagttcacctgtgaaaagaagaaaaaccttccatgttacagtctcacatacatctgccactgccccaagagccaattttgaaaactttctcttcccccagcatctgtccgtctcttaaccaaccaccagcttcccctctgtctccaggacttaccccaatatgggcagagcagaaagactgtgcccaggagaaagagaacaagcatcctggagcttctgtcaggtgcagcttcctgtggaaggagcaagttgttctcttgtgatctgtccttgggctagtcatctaaattatataatcataaaatttcagggacaggcagtatggcaatgttccaagccaaaccaccatatctgattgctgcacagcattctaaagagggtactcactttgattttgtgcaaatcctctaatgaaaatgaaatggtaatgttcctgattcaccagacctgctcctacttcaatattgcagagttttaaaaagtattttcaactttcattttagattcagggggtacatgtgcagggttgttacaggggtatatggcttgatgctgaggtttggggtacgaatgatcccgtcacccaggtagtgaacatagcacccaacagttattcagtcctgcccagtctctcctcacaatgttgcaggttttaatacatctgggaggtgttctttacatcttcttgtgtttcatcctcattgagcaatctaacagcaagtcttatccattctacctactaacttctcacatgggtttattattctctgtcgccactgccattaccataatccagtctattatgtcttgcctggaccaagcaatggccttatttctggcctccatgcttctcctctgccccttcataatcatttcttcataaagcagtcagagaacaagtcatagatgccacacccctgctgaaaacactctgacgactttttattacctttgaaagaaaatccagagtttttatcatagccggcaatggctttgtcattatgagcaatggcctcccctccaatctcctttctctccacatttccctggctcactcaggtctttgctcaaatgtcactccctcagacagagcagcattttctgcttaatctctagaaaatgacagccttcatttcctacctttttccctgtggtatgtttcattgcaattctaataagctgatcttacattgctattggctcacttttttactcctccactagaacaaagcaaggggtttctttggtttatcatggcacacttggcatctagaggctgggaacaaaggaaatgcccaacaaatatttgtgggaggaattaataatgttcttcccatatcctgccttgcatccctccagtccattctccacagagcatccagctttatcagactggttttttgaactataataaagacaagaaatgagactttctacattccagcaagggtcccaagatagtaggtagcaagtgtttcacatttcaaagtgaaatgctatgctacttaggcagatttacaaagaaaatcaatgaaaccgtgtttaatatcctggacttgctgcccacctggagggtataaatgaacagtgaagtgccagaaaataaaatggaaggagtttctatagtctagtgtgagggttacttttctatatatggctcaaaaaacagaaccataaaaaagatatgtttatctatatttttaaaaaatcttctacatagatggaaaaccaatcattaatccataagcaaagaccaaataacaaataaaccattaaaaatatttgcaactcatatctcagactaagggcgaatctccctattatacaaagatattccagaaattgatttttaaaagattaacaattcaaaggggagagacgcagtcaataataatgtcatagttcacagaaaaaagaaacagaaatgcttcttaaacacatgaaatatggtgaaccttgctcctaattttaggatattagttttacttaacagatttgcaataatcagaatttagtaacacaactgtgttggcaagatggagtaaaatgagcactgtcatacattgctgatggggctgtaacttaatatatcagtaaggaataaaattagacaatagctcgtcaattttatatctttcctgctttctcttgtgggcatttagtgctataaatttccctctacacactgctttaaatgtgtcccagagattctggtatgttgtgtctttgttctcattcatttcaaagaacatc

SEQ ID NO: 915293 - DNA, 4001 bp, Homo sapiens
gtctctacctccatgacattaacttattctttagctcctatacatgattaagaacatgggatatttgtctttctgggcctggcttatttcatttaatataatgacctccaggctcacctctgtttctgcaaaggacagaatttcatttatttttatggttgaataatattctattgtgtgtatataccatattttctttattgtatatttcaaaatagctagaagagaacatatagaatgttctcaatacaaagaaatgataaatgtttgaggtgatgaatatccagttaccctgatttgatcattacacattgaaggcttgtatgaaaaatcacatatactcataaatatgaacaattgttatgtgtcgattatcaaaaaaaaatctgtttggtcagttttcttggaaatatagaatccccaagttctccctcctgtctcattgacccaaattatcttctgtctgtatgcacagggacctgtgctaccacctgtgctcaggggcattctgcattggttcttctcttgagatgtgaaattgctgaagcactatcctaagaattctaagaatcttacaacaccttccctgaccctctaacttacgctggtaaatccttaagagcatgcatgcctcgcccttctgagcagtacagacaccaaagcctcttctacagcggtctgtccgtgtgcgaaggtggcatgttatgcactgaagtgatgtcactgctggagagagcatagagatggtgtgagactaggcaaaagcagggacttgggatggagttagaaatattcagatggaggtggggaatgaatagtggagggggcaggcagatgaagagctactggttggggtatttaggcggtaaacagttggagctcttatcaactcctcatttcagagtaataaaaagaaaatgtcaccaaaggattctgaccccaccttcagcccttttaacctggataactttaagcaaaaagttagcctccatgtcattgacttctctagcttaaaaatggtgctatgaatgctagcctggcctactagagatatgggtgtgataaggagggtgagggctttaaaacatttcaccaaagctattgttactattgttaggtgatatattctgttcttttgagcttcaatctgaatctacataaaggcatcatcaataatagtaccataagtgacacttttatgaggttctgcggggtgagctattcaaaatacaggtttaatttaaaaaaatttccctagtgcacctgaatgagaaaggaaagtagcaatgattgagcatcccatttgggccatgttctctcaagttgcatccgatttaatcctcgcaaaagccttgtaagcaggcaccattgtccccatttcttgaatgagcaaccaaaggtacagagattttgagaccgtgactacaaaccatgaaaaaaatctgtctgattccagagcattcagtacttcctctcatagaattacttgttgtaatataaagtctctgaaaagggtatcaaaagccattgttcactcctaaaataaactgaaaattattcattatagactgaccagctccatcaacaaatgggatataggtttacaaataaaaaggatgtcctaaggaaaatcttgccagggcttgggattatggggaatggtagggacagagggagaaaatgagttaaaagggcaggacagaggcctgcccatctggaggagaatggcaggaggctgaaaaggatggaagagttgtcagggaaggcagaggagcattctggaggctggcttcccctggctcataaaagtggccaaagctcagccctgcatggatgcatgctacacatgtagtttccctggagctccctagatcctgtctctcaagtatacccctcaggtccaggactcacccacaatgaggcagtaaaggaggaagaggaacaagaagtgtttgttcatcctgacccggaaatcccttgtgcaggaaaaagaagctaggggctgcaagcacaggtctttaggctccagagagaaaactttcttcttcgtcagaggctagtgattattcatgcctagggagagcctgtcacacaaggtttcctcttggagctcaagttcattggctgtcctcctcaaggcagagaaaaaagaaaattaataaatgttgaggtttgcatggagctaacctttttaaaaacatatacttttgatattattattcttatcccaatttcaagaggaggaaactgaggcttgttgaggttccagaagcttaccccaggtcacatatccagtgagatagtgctgttactcaaagtatgacttcctaattctagagtccacgtttcaccaccgtgattcaatgcctctctgagatttattcatacattcaacaaatatttgttgagaaattgtatatacaacacagttacatgagtaagaccaagcaatgaataaggcagacaagctcacctggctcctcacattatgggtaagaaaccagagagtgagagaggaaaagatatatagtctgtgaccaagcttgaccttccactagaacgtttgattctcagtcgagaactcttctacttacaagaaatctgtccttcaaggccagcgactgtttactttgtagagccattaaatcctctctagaattattccatgacttgatctttagcaaatttatattttgaatctggctagttttttgttcatgatttagatgtctatctttatgaaagctaactcagttaagattcactatgggtaaagtactagaaaaccatgaccactcctggcattctaagtctcctaaaccaccagcccaatggctgatggtgcttggttagagatactagaagtattccatattaaactgatttaacaacatgttctttagttgtaggaatgatatgatcattgaaatatattgagtctgacattttttagacatcagatgaagattgggtaaaatatgatcttatgttaagtgtcacaaaatttacaatgtttcttctctatgaacaaacagaatacggagcccacctttgcctaagaagagagcaagaagtcttagacacttacacatgagggagctggttcctttgaaataatagattccagaatggagagtaaggttgtgaggcctttggatctagttttctactctgccatattttagaagagggtgttgaacactggatagcatttttgagaacattcccaggcttatcaagaagacaaacttctgagcctttgcagcctggacttaccaagttattagggtatttcatttgtcacttgtttcctctgctttatcctctatttaaaaattacctgctgggtataatgttcactcttcaggtgatgggtgcactagatgcccaaactttaccatttgactatctgtccacataataagcctatgtatgcactccctgaatctataaaaataaatataaaacataagaaaatagagagagggagcagcactagaatcagagcaaaagaagcagacattctaggttaaactgtggtggagtttttttcttcttccttcaaggttctccttggcagatgccttctgaaaggccaattgtgttttgaatctccattgtactgattatttccagttaagattgtagaattttgcaactctacccaaatgttggagtcctctgacctacttctcagcctcccacagtacctcatccatcacattttctcttgaaaataatttctttcttcatttatcatggggtaggagagaagaaggtgttagaaactattaatagaggtagtgtggcataatggaaatagcattttcctgagagtctggagacctgtgcctgatcactagataactcattatgtcttcagcaaatcgtttatctgtaatatcagattttaatcattttaagggccctttagaactttaacattctgtggttccacgacatacgtcatgaaaatgggtagcaggttctgttattctgaa

SEQ ID NO: 915294 - DNA, 4001 bp, Homo sapiens
cctcgcacctttgggttcctcaagctcactgtgccttccaaacaccagaggacactatcaatttctccctgaagcaactttcatgaggcttctctctttcagaggagttgggagcaggctgcgcagtacactgataatgctcttcgaataattgtctctttgatctttaacctgagtatttccaatttcaacattctaaaaatgcattatttaaaaataggtaatacattgatgtgactaaatagtaagtaatagaaaaagaatgttgtgtaaagttgatctcccactcttgccagctagttatccagttttcatctgccaaataaaggaaaccagttttattcatttcttttatatcttttagattgattttcagtatattcaagcaaatataaatatgcacatgtatctttttacccccttttcataattggtagtatactatgcatactctgcactttgattttttgaataatgtatactaagtgtatagtattccactgtagtgctgtaccatgctttaattaaccagtctcttatgagaatttaagttatttgcactttttgatattatctgctgcaataaataatgctgaacatatttcatttgtgtgggagtatatctataagataatttcatgcaagcagaattgctggataaaaagtaaacacttttgtaattttgataggtattgctgaattgcccaccagaggagatgtaactattctgttgctatcaatgcttggaaaattcttgtctcaccacaactttaatactcaaatattttatcaaactcctggatgttgacaatctgataggtcaaaaatggtgtatcagtgttcttttaatttgcatttttcttagtatgagtgagattgagcactttttatatgtttaatagccattttcattttcttttgtgtgaactatctacatactttgcccatttttctattaggttgttggccttttcctttttgatttttttaaaggaggcattacatatcagggatattagccatttgtttgatgtgagttgcatttttaatttttgccatgaggaatattttgatattcatgtgtcaaatttgtcagtttttcttttaagagctctggattttgagtcatagttagaaaggtctttctcatttctaagcttacaaacaaattatgtcacattttcttataattcttttatggtttattatttcttactaagtgtcaaaaggtagcaaaatagaaatataaggtagaaatataatcatatttgaagcacatttaataggtagaaagcataggaatcattcactaatttttagtgagtgttaagggagagggagatttcaagggtgacttccaagtgtaggaggtgtttgttgatgaaagactgaagctcagaatagaaatctggctaggatataaaactgggcattttcagcatatagattgtaattgaagccatggaagtgggtaagttgatatagaggagggtctgagtggatagtataaagccttaaggtatcccagtgtttaatgatcaggtagaataaagaatcctacaaaatacactgagaagtagccagaggaaaggaaaactaggagagtgtaggagataataaaggagaaaagtatattaagaaagaaagggtccaaaatgagataagtatggatgaaaagtcaattaatatgaagttggaaaattgtcctgtttccctgcaatcagtagtacattttcttccggattagtgtgttatatatgatctctctgacatcctgaaactcagattgtactgagtctttgggtctcagctggagcatgtgagtgagacttggagagtagaggtttagagaacagcacccctaagttgcctccctccacccccattgttcaaacttaccctctttgaggtagagaaaagataagctcacaaggagcagtgtgttcattttcctcattggatgcttgtttgggtgacagacggtgtgctgagtgaggtattggaaagggcagccactagcttgctttataaagcttagatgttcgatcacagccagtaaatagaaaggagggaggagtccctgataaaggcatgaggcagaaccgtcctttccccactcccttctcttaaggagccataaatctgtactaatgtggaaagtgcaggctggtgagcagtgtcagggaatgcttctggctaaagttgaattagatttccacccctgactctccatcctccctctgccttccctgccccatatctgtcttctcctcactttttttttttaagagacagggtctcactctgttgcccaggctggagtgcaggggctcattgcagcctcaaactttttggtttacacgatcctcctgcttcaacctccagtgtagctgggactacagtcgctactcacccttttttctctatgtgtctgcgtgtgtgtgtgtgtgtgattgttacggtttgattgtcccctccaaatctcatgttgaaatgtaatccataaagttggaggtggggcatggtgggagctgtttgagtcatgggggcagatccctcatgaattgcttggtgccatcctcattgtaatgagtgagttcttgctctggtagttcaagcgagagctggttgtttaaaagagtgtggaacctccccttcccttctctctgttgttcccttctctctcttgctctcattcttgccatgtaatacaccaactccttttttgccttccaccatgattgcaagctccctgaggccctcaccaggagcagatgccagcaccatgcctcctgtacagcctgcagaactgtgagctaattaaatctctcttctttacaaattacctagtctctggtatatctttatagcgatgcaaaaatgcactaacagaaaatcgatactgagaagtggggtgttgctataaagatacctgaaaatgttgaagaagcttgggaactgggtaatgggcagaggttggaagaatttagagggcttagaagacaggaaaatgggggaatgttggaatttcttagaaacttgttacgtggttgtgaccaaaatactgatagaaatatggatagcaaaggccaggctgaggagttctcagataaaaatgaggaagctctttggaactggagcaaaggtcaccattgctatgccttagcaaagagcttggctgcattgtgtccacggcctgggaatttgtggaagactgaacttaagaatgatgacctagggtatctggcagaagacatttctaagcagtacagtgttcaggatgtgatatggctgcttctaacagcccacaattatgtatgggaggaaagaaataacttaaagttggaacttacatttaaaagataagtagaggctgggcacagtggctcaagcctgtaatcccagcactttgggaggccaaggagggcggatcatgaggtcaagagattgagaccattctggccaacatagtgaaaccccatctctactaaaaatacaaaaattagctgggtgtggtgcacacctgtagtcccagctactcgggaggctgaggcaggataatcacttgaacccaggagttggaggttgcagtgagctgagatcacaccactgcactccagcctggtgacagagtgagactctgtcaaaaaacaaaacaaaacaaaacaaaaaaatgataagtagagcataaaaatttggaaaattcttatgtggcagagaaggaatgaatgttttcaggagaggaattccagtggcctatggaggaactacttgctagatatatttgcatgactaaaagggagccaagagctgttatccaataatagctattattatgtaataatatattattggataacagctctcggctaataatatccaagacaatgggaaaaaggccatgaagacatttcagaaatcttcaaggcagcccctcttatcacaagctcagaggcctaggaggaaagaatgttttcaggggccaggcccagggcccttct

SEQ ID NO: 915295 - DNA, 4001 bp, Homo sapiens
tcttaccttctcaatgaacataattgcttcattatgactttttgtaaagatggcattttttttctacttcccaatttccctgacactggaagatttcatcatctttctttcactttctatttcctaatccttatttcatttaattcttgccccacctcacagcattccatttctctattttatcaagaatccacgaacagcagttcctcatgcaaccaagaaattaagcccacaactttccttacatcactggttggaatactgatgacaattaataatgaaccctttattttcttgtatctttatgtatcttttccagcaaaattctcatctttctcattatattcatgtcatcttttcaactattattccgttttaaagctttgtcttcattttccatctttcttatcttccctataggcctaaactctagtgatgaaacagaaaattaggtcttcaaccacaataaaatgaactctggaaaagctgtggtatgacaagttcaagttctggctccattcctacaatcagtgtgaacatgggcaactcagaaaatttctaattaattcatcaaataccttttaaggacctattgcgtctaaggttctgtgctaggctgtaaggctcaatgtcttacattgtaatgcagggacaataccaactatggcagagagttgtgatgatcaaagtgggcaaagattacagattatcgaacaaaggctagaggccaccacatcctaggtgtgttctattttccccctttacttcaatcttactcaactgatttattctccaagttttccttttggtttggtcttagatcattcctatcaagtatacctgtcctcaattttcaaaaattcagaatcagaattccatattctatcagtaggtacgtttgtgatacaccttgcctggctacctcttagctaccctgtttacaatggaaagattaggtcaaagggcgttcttcttaccccagagcccttccaaactcatgccaataggcatgccactgcctccttatcagaggcaacttccagcagtactcccttccaaatcacaaatatctactttaccaaatcgctgcttttttaaattaaaaattcttaaggatcatttacatcagttctttcatgctacaaattcagaaagtttacgtccagagattaggagtcactcaaggtcacacagtgagttggtgacagggtcagtactgtctgctgctattgctacattcccggcaccttctccaaacccgcgtctcccagcactagcccagaaggaacttctgcaggacacgcccccctcccaactcggagccctctttagtaaacgggctggggccctaatccaacggcaagcccaggcccccttcacctgaaggtagcctgtgtgaatgggatgtgtgtcagtgtaattcgagtggaggtgggtggggggtggttccgggtccagggcgggaaacgcggctctgggaattcccgggtgacacctacttaagaaaagcacccggggagatgcagtgctctaccctccgtggctcctctaggggtgggggcgggggtgtggtctggttacagcacttaacgggccctccccaccccaaaacggaggccaactttccccagcggcaactaatgggactgtctcgacccatgaagccagctcccagccctaggattagacccgcgaccccagaccagtcgcgtccagctaagtcctgcgactcccccagcccgccccctgccccgcaggaacacaggaccggcgcgcggagagagagtgagggagaggggcgcgggagggagggaggggtcacttccggtcgcaacagctcacctcgtagcggaacattcttggggaggggggcagggagcggggaggggagagggggagggagggaagaagcgctgactccccggctcctccgcgcgcgggtcctccaccggctcgcgacccctggccgccgccgtacgccggagcgtgcgtggggacgtgcgcaggcgcgcctcaggcagggcggccaccccgctcggcgcccggcggcggcggctgcgcagggacagatttggcgtcccgcttcctagtctcagcggcgggaaggaggtcccgtggcgagagactgcgcacgcgctgcccgtcttcggctgcctggtgatctgggcttgtagctccgccccctctttctccgcgccctctaggcgctcggcttggagctcaggggccggtcacgagttctccgtcacccgtggggcggagaaaacccttgtgattgtcacaggatatagctttgaagaatcctgcgcttagcctgggctgggaaagatgagattcccgggcagtttttccaacgtccgactcactcctcaggctgctcgggggtctccccgttgcaatctgcgccttgcgcagggaaaaaagaatggaaagttgctggtcttcgaaaggggcggacttcgtcgccactttcagcggctcgtcgcctgctgaatccacagcaggtcagggctgtgatttatgtggctcaaagtgatgacggcgcccgttttttttttttttttttttgaaatgctgaagacaggttccgggaggtttaactagggtggtatttttaagcgccaggctcattaggcgcgaggagctgcagagcctcgaagggccgcacggccgtgggccgctggccacgcagcagcagggtcttcgggccgtggtgcgccgctgggtgactccacttccttagaggatcgaacccacagaggaatgtgtccagcttagaagcttcggccccctggttccagaattctgttgggtggtttgttacctctagcacgctccatgcccttcttgcccctttcctttcagacaaaacttgcagcacaaagaatgaattcttttgggtttcgcaatccgtttcttccctgggcgtcttaaaatgcagcctcgtctcggaatggcatacagtaaatcccctaaatgttagtgtgtctggatcagtttgagtatcggaaacgctgaatttgtgaagaaaagttctgggtgggagcttgtgctttgccactggctaggaaactttgggcaacttacctaaacctctctgagccttagtttcttgtaaaatgggtataattacacctgcctcatgatggtaacactactaacgattgaaggctgcctgggactctgctaggcgctttataaaatggattatctcattgaatccttccttatgtgccccccatgaggtaggtactgttattttctcagtttacagttgaggaacctgaggattagcgacattgtttgcctccaaccacccaatggcaagtggtaaagctagcagctgagatttgtctgattattaaaaaccgagtgtcttaatcactgtgccagaataacaaaagcaaatgttgacatgggccaggcctgaactttaaagaagtggagcgtcgggacaagatgatttattggttttcaagcatgcatggaacattataaaacatcaaatactaagtaacaggccaggcgcggtggctcacgcctgtaatcccagcactttgggaggccgaggtgggcggatcacaaggtcaaggagatctagaccatcctggctaacagagtgacaccccgtctctactaaaaatacaaaaaattagccgggcgtggtggcgggcgcctgtagtcccagctactcgaggggctgaggcaggagaattgcgtgaacccgggaggcggagcttgcagtgagccgagatcgcaccactgcactctagcctgggtgacagagcaaagactacgtctcacaaaaaacaaacaaacaaacaaaaaaaactaagtagcagtacatcttaataattaccaaagaattggtgccatgtagatcaagggttagcagactatggcccacagtccaatctggccagccacccgtttttgtaaagcaagctttattggaatacagccaaccttatttatttacatattgtctttgattgctttaa

SEQ ID NO: 915296 - DNA, 4001 bp, Homo sapiens
ctaaaaccttcccaagttcgagttaaacgtccagaatggcttagggagcttgggagagtataagaaaaataaaaaggaagaaagaaagaaaccacgttcactttgtttttaaactttctagaaatcgctcatgaatgaagagccaggttttagcactcgaaaaagaaagcatttccacttgaaattcaactccatttcccccaattacacttgctaaaattcagggctattatggcgcagggagactgagaaaatctgcacaaggaaagaggcaacaactttatgaactttgaaaagacacttttcctcctgggatcttagaatcgaaagctctcaaattactccgactaattagccgggagaagaagtgatcagacgagggggaaggccaatgctttcatacagatttattttcaaggccttaccaagaaaaacataaggggattcggagtaaaacaaacaaaaaagcaaaccaactctgcacctcaaaacttgctgaaatcccaacacctggtgagactggatcagaggaaaacaaggaaaaatacccaccaagcgcagggggccggagaacagggaagagccccagcctccgcaaggcaagggagatgagagtcgggggaagcctggggagcagagagttttcaagttccgagctcagcgctccagtggagttgggggcaagagcccgggggctgggtggaagctgacagtcctcccgctcggctctgagctccctcggagcgcgcgttccaccgccttggcctggtggcttccttcccggctcgcgctagctcgctcttccctctacctccagcgtgcggctgccttgccgactgactccactcgggctggtggcgggcgcggtgcccccctcggcgctcgagtgccggctgactcttctgcgccggagcccagtgcggcacaaagcccgagggccggcgggcgggcggagacgcggcgagcaggttccctcggcgctccctcggcgagtcctcggagcgcccgctctctgcgcgttcgctgggcctcgggctggacaaagcagccggcagcggttgctctctgcggccgttccagggccttgggcaccacagagcctcttcgtcttttcccgcgggtcgggagcattgggcgacgctggggctaggagccgcggctgctgtcgcgcctggagtctcccttcttcccgcgagctcagcccgcgctggcgctggcgctggcgctggggctgagctggccgcccgccccgagccctgcgccgctcccgctcgccggcagtcgccctccgacgcgggctttcgctggaagtagaaagtttgggctcctgcgtggaaacttctccggcccaactctcccggcgtagcagtgggggaggggaccggcgagaggggaggaaggaaggggggaggaagggggagacctgtctgaatattgcaataaaaataaagcgagaagaaagaagcggactcacctttatgaggcatcctttctggttgtcacagcttctgtcaagagttttgtttggttggggttttttgtgctgctgttgttgcttgaagaccacaatggtttgaaatgacggtgttttaaaggagttgctggtgagagttttctccacggatgttgctgggttggtgtgtgagagcaattctcagattcctgggaaggagacagagattgacaataaaatgggctgtcagcggctggagagtgagagataaagagtgtgggtgagggaagtggctgcagccagcacacctatgctgattggtgatggctcaagtgtgttaatgtgtgtgtgccggcgcccggcctcgcctccaccgctcctcactggcccattagcgaagcctgacctctgtcatcatcctccagcaaaacacttcctcctgcgcctgaaccagagcgggaaatgaggccgagccacggttcccttttcaaacccactaatcactccgcaacatgcaaatgcaccgctcgctctcacacaaaatattgctttatgcaaagcagcgccggggcctcgcgccagccgattggatgctccctctccccgcctggtgcaattggtccgtttgtttgaatatgaatacacttgttttcggctccgccggtgggtcccggctcctctccccggcgcagggcccccgagcccgggctctggcgctcgcctgcatctccccgctccgcgcacgccgagattcggcgcggcccgccctgctgccgcgaacttgagcggtcaagtgaaggtttctgggttgggggtcgcgcccccactccccctaagctggactcgggactcccagtcctcggagggtgcaagtttctgtgctgtcctttcttgccaactccaggacagcgtggcctgccgccccgcccccgcccgcccccaccccatcccagccggggccccaagacacagagcacagcggcggccgcaccccagcccacctggccccttggaagaagaggaaaggggcgggagcgtcactgggtcctggcagctccattccagctgcggaggccgcggcgaagcctaggccgagaggaggttgccgggccgagaactaaacgaggccagaggcctccccagcccaagcctccagggcctgtccaaatcctccaccccgctctccccgccctttcttctctcctttctcctttcggaagccgcggtgcgcagcggagcagaggcacagctctggctggagaggcccgagtaaacacgccacttactttgtgtacagagggttcttgtgaaaagccctgaagagtcctcaccaaacactcaccaacttctcccacgtgccatttgttgactaagtgcggctgcttttcgcagcgcccgagaggaggggaagccaggggagataagaggggagggggagtggaagcctgggtgggggggcggatgaccaatgctgggagggattctctctctctctctgtgtgtgtgtgtgtgtgtgtgtgtgtgtgtgtgtgtgtcccactggcgatgtcggtatgtcagcgtgtgtcgtgtgtgccaccggtcatctgtgtgtggtgcgtgtgtctccgcaccacgactccctctcctgggtctgctcagtccacggaggcagctccccttcagctgttgccagaaaaccggggaggaaagtaagtaaatggcttttctcttctgaccacacaccagaagtccatttgttgaatgccgcacgattaggacacacctcagtacactccaaaggcgcccctcggagcctgcagttaaggtgacaggagagcgagcggctgcctggtcctgcgctgtcccgagctctctcggcggcttcgggccacggagccgggaaggagaaggaaggcctgggctgctgtacacaccccaggacagggcgagggggaatagggctgaagagctgaggcagggaggctgaaatgaagcagccgaagggtacgctagactcttcttgacttagggaaagtgctgaaagtcagagctcatcaataaaatctgcgcgacctgaactcgctgctgactggccgcgtcgccgcagcccctggcagccgggacagtgaggacgctgcaagccgccctgggccgccgggccacatgtgggcctcaccctctcgttcctgcctgggacccagcagccctgcgaccaaggagcccgggcagggctcccgggaagcaaaggcctccccggccctagccagaggtggggtcgcataaccctctcccctccccgggctggggagggctgccggctctaacccttccccgggagctcgcagcgccgggaggaaacctgggtcagaggtgaaggaggtggcgccgggtgtccaggtccgcggcctcctgggcgaggtttcatttcgcaggagcgcgactttcggaggatgccggcaagtggggccgcggccctgagtcccagaccagcgaaagtcggctttctctttctctctccttttactttccaagcgagcattaaagaagcttggactcaagactcaag

SEQ ID NO: 915297 - DNA, 4001 bp, Homo sapiens
agcccgcgcggcccgatgcctctgattcctcacgagaggaaagggaatgaaaaatgaagcaacaaatgacaccacccaggctggcagccctcgttcccggccagaccccgctcctcaggcccggctctggcgccgggtggcgtccagcccctgcacgcgcggcgcggcccgcgggaaagtttgtgcagcgagagtgactgtccttccgcctcgcgcgcgctgcccccttctgccccggaggggcgttgggttcccttcggttttcctttccaattctaaaataaataaataaactccgggccctggggaaatctgaatagtaattccagtcatccaaattctatgagagggtctgaggaaaaaaagacaagcctatcacgggcgccctccgatcacgaagggcacgggcatgagaaggcgacagaggaggtcctcggctcgccctgggcgcggagcgaggactctggtcagaggtaattatgtcaccgcgttttctcgccgtgacagccgaataaacacgatctccaataaacatctctaatgagggaggaggcccgaggatggctgggtttgatttatgactggaggagaaggtccacttcccactgcgaagcaggcgacctgctcgccgcccagctccagggagaggaacccgcggaggagaggatcccggcccaggtaaggcgtgcggccggactgccactgcgctcgtcccccgtttccaggtgaggtgagcagggggcgccaccgctcggagtcgggcggaggtcccaacacctgtcacaggtgactgagctccgaaggtgctcccagaagacctagaaagggggcgcaggagcgcgagtgggagtgggggttgggggctagccggggcctggcccagaggccgccccaaactcccgggcggggttcttgggtgccccgcctaagccggcctgggcgtctccagctgcttttagggccgggctcccaggactttcgcccggctgaaccacaagttagtctaagtttgggtcgtcccttccctgactcactaaggggacacttccgggccccggctctggccctccaagggccgcagggtggtgggcgcttctctttcccgggcttggcggcccggctcccatggcgcccgcgcgcttcccgccgaggcagccagcgcagcgcccgcagtaaccggagcccgcgttctagctcagtgagaatcgctaattattaggtcttccgaagtgaagctcaaatcacacgctgggagctttacgcgctgcccagctctgtcggccgcattctttcgtactccgcgtctttctgagaaacgaaccccatctctagactttgttgcggtccagccatctgcactttgcaaccgcgggaaacttctgctgcacctcgcccgacccgcggcagggtgtctttaagcgctccaggcgcgggtacggactttcccaagcgtggatgtcgtgaactgcgatgcagaggaggtctggatgcaaagtgcgtccccacctcctgcatttttcgcggtcgcgagtggctttagcagacagcagcagcagactcccgccccctactcccagctcagggccggactggaagtccactcttaggagtggaacattttgctacttttgcagaagagcacactcggcaaagacaagtccctcctccaccccccttcctatccctccctcagtaactcgcttccatctttgtatgcctccttttaaaagcaaaaatcaagccccggggccacttggggcgggctttgatttggggacagcagtcgctggcagcggagaggccccgcgggccccgagccgggccggggccggagcccgggcggttacctgggagcggagggcggggaggcaggtgagcctggcagcgccggttcccacacttctcaccgccgctcggcaggggaagtggcagatctgacagccgcgttctacgcgaggacctgccccagagtttaaatgtcaatgataagaaaagagggtgctcaggcaggcgctaactttccttaatatccacgccagcgccgtcctcattggctgcccggcccgcgtgacgtcatggcggctagagttgggcacagctctgcgccgactagttttccggccgggcgggagcctgcttctccccacccagggtccggccggctccaacccctgctttggccttccttggcccggcctgtgactgctctagcccggcccggtccagcctgggccgccgtcctgtatggcgtagagtcgatccccaggaaactagtcttgccgagtgcgctcctccgcaccttcgggcactagggccccaagatctctgcccttaggctggccagctacctctctgggtaatcaccctgtcccctcctccgatccccaagggagtcccttcatcggagagacccgaaggccgcgccgggatggagaggcgcttttggcaggaatcatttttaggaggagttcgaggctcgatgagtaccctcaacctggccctcgagcccgcaagtcactagctgggcacagacgggggctccgggaagaggacatgcgacccctttttcagggcctaggccaaaggtctctccaggcctgctgggttctcaagagggaagccctaaagggggcctacccgggcttccctcgccctctggctgaaaggctccaaccacattagaaaatgtaggtgattgtatttatctttgactttgaattaactgttgactttgtgacttagaggaggaaaacaggaaaatcccagattctgaagtcaatactcatagaaattggggcggggtctgcaggacactgacttgctggtctgtgcctgtttttccctcacaccttctgtggactgcgagatggcttagcggagctaggcctggctatcttggaatggagatttagaccctcgttgtcattcccgtccctcatccctcaaaacaggaagcttctcaactccttcccctatgcttccatctggctctccaatttgaaagtgacagtggtggggcccggaggggcaggggtcacttgaggagtttgcgggagaggaaggggcggggcgtggaatttcctttaggcagctcgtggagacccagcctgggtggacccgggagtgtgtgtgtagaagcagggagggggacgcctgggccggaggagggtcctagggccagtccctgcgcgccttgatccgggcggcggctaagggagagccgagcacagatggcgccgaggcggaggtctagtgattcccgctcccgcccctggcacacctggacaggtgccgggcctcgcaaccggccaggaggcagctccaggcagcccgtctgcccactcctcttagcccggacagctcctagctggacttgattttttgtcttgctcagcccgtcgaggactggagggcagagtaggggtgggagtgggggtaggggtagaggtgggggtggcggtgaaggtggggaggagaatgggagctttggctgagaagtttccgcaggatgttcttacttatttacaaacattctccaaactttctttcttcttcctaacgccctgggcatcctgtgttaaggcctaggagcgcccacctcccactggccactctagtctgggcctagaccttaccatggtcctgtcgccctgctcggctgggaagggatgctaagagaggcatttgttctggtttccctgtcgccgtcggccatctccagtgacctagtttcttggtaagcccctagctcccctccaggacctggcccagcctccagcctcagatgtcctgaggtctcccagactccgccgtccgccttggcgtgtgggctgcggataggcctcggacctgtgtaggccttcctagctggccagtttctgtccgggtctcgctccccacactgtaccaaccctaggccgccgagagggctgttatgggcttgtttggagtccaggccattaagtgtgcgcaaatccctgcaacccagcagggtgctcgag

SEQ ID NO: 915298 - DNA, 4001 bp, Homo sapiens
tgccgactgactccactcgggctggtggcgggcgcggtgcccccctcggcgctcgagtgccggctgactcttctgcgccggagcccagtgcggcacaaagcccgagggccggcgggcgggcggagacgcggcgagcaggttccctcggcgctccctcggcgagtcctcggagcgcccgctctctgcgcgttcgctgggcctcgggctggacaaagcagccggcagcggttgctctctgcggccgttccagggccttgggcaccacagagcctcttcgtcttttcccgcgggtcgggagcattgggcgacgctggggctaggagccgcggctgctgtcgcgcctggagtctcccttcttcccgcgagctcagcccgcgctggcgctggcgctggcgctggggctgagctggccgcccgccccgagccctgcgccgctcccgctcgccggcagtcgccctccgacgcgggctttcgctggaagtagaaagtttgggctcctgcgtggaaacttctccggcccaactctcccggcgtagcagtgggggaggggaccggcgagaggggaggaaggaaggggggaggaagggggagacctgtctgaatattgcaataaaaataaagcgagaagaaagaagcggactcacctttatgaggcatcctttctggttgtcacagcttctgtcaagagttttgtttggttggggttttttgtgctgctgttgttgcttgaagaccacaatggtttgaaatgacggtgttttaaaggagttgctggtgagagttttctccacggatgttgctgggttggtgtgtgagagcaattctcagattcctgggaaggagacagagattgacaataaaatgggctgtcagcggctggagagtgagagataaagagtgtgggtgagggaagtggctgcagccagcacacctatgctgattggtgatggctcaagtgtgttaatgtgtgtgtgccggcgcccggcctcgcctccaccgctcctcactggcccattagcgaagcctgacctctgtcatcatcctccagcaaaacacttcctcctgcgcctgaaccagagcgggaaatgaggccgagccacggttcccttttcaaacccactaatcactccgcaacatgcaaatgcaccgctcgctctcacacaaaatattgctttatgcaaagcagcgccggggcctcgcgccagccgattggatgctccctctccccgcctggtgcaattggtccgtttgtttgaatatgaatacacttgttttcggctccgccggtgggtcccggctcctctccccggcgcagggcccccgagcccgggctctggcgctcgcctgcatctccccgctccgcgcacgccgagattcggcgcggcccgccctgctgccgcgaacttgagcggtcaagtgaaggtttctgggttgggggtcgcgcccccactccccctaagctggactcgggactcccagtcctcggagggtgcaagtttctgtgctgtcctttcttgccaactccaggacagcgtggcctgccgccccgcccccgcccgcccccaccccatcccagccggggccccaagacacagagcacagcggcggccgcaccccagcccacctggccccttggaagaagaggaaaggggcgggagcgtcactgggtcctggcagctccattccagctgcggaggccgcggcgaagcctaggccgagaggaggttgccgggccgagaactaaacgaggccagaggcctccccagcccaagcctccagggcctgtccaaatcctccaccccgctctccccgccctttcttctctcctttctcctttcggaagccgcggtgcgcagcggagcagaggcacagctctggctggagaggcccgagtaaacacgccacttactttgtgtacagagggttcttgtgaaaagccctgaagagtcctcaccaaacactcaccaacttctcccacgtgccatttgttgactaagtgcggctgcttttcgcagcgcccgagaggaggggaagccaggggagataagaggggagggggagtggaagcctgggtgggggggcggatgaccaatgctgggagggattctctctctctctctgtgtgtgtgtgtgtgtgtgtgtgtgtgtgtgtgtgtgtcccactggcgatgtcggtatgtcagcgtgtgtcgtgtgtgccaccggtcatctgtgtgtggtgcgtgtgtctccgcaccacgactccctctcctgggtctgctcagtccacggaggcagctccccttcagctgttgccagaaaaccggggaggaaagtaagtaaatggcttttctcttctgaccacacaccagaagtccatttgttgaatgccgcacgattaggacacacctcagtacactccaaaggcgcccctcggagcctgcagttaaggtgacaggagagcgagcggctgcctggtcctgcgctgtcccgagctctctcggcggcttcgggccacggagccgggaaggagaaggaaggcctgggctgctgtacacaccccaggacagggcgagggggaatagggctgaagagctgaggcagggaggctgaaatgaagcagccgaagggtacgctagactcttcttgacttagggaaagtgctgaaagtcagagctcatcaataaaatctgcgcgacctgaactcgctgctgactggccgcgtcgccgcagcccctggcagccgggacagtgaggacgctgcaagccgccctgggccgccgggccacatgtgggcctcaccctctcgttcctgcctgggacccagcagccctgcgaccaaggagcccgggcagggctcccgggaagcaaaggcctccccggccctagccagaggtggggtcgcataaccctctcccctccccgggctggggagggctgccggctctaacccttccccgggagctcgcagcgccgggaggaaacctgggtcagaggtgaaggaggtggcgccgggtgtccaggtccgcggcctcctgggcgaggtttcatttcgcaggagcgcgactttcggaggatgccggcaagtggggccgcggccctgagtcccagaccagcgaaagtcggctttctctttctctctccttttactttccaagcgagcattaaagaagcttggactcaagactcaagtccgctgtgcatgagcgagggacttgcgggggggcgggggggggggaagtgattctgtccgaactggaggcgagtatcatttttacaacctctcaattagcgaccgagtggattagcaccttcttaagctttgcctcggaaagaagcagccgtaatcttgttgctatttccccccagggcactggctctttgaatcagctccttctcccacccctccaacccccatctcgctgcggagaaaagttttaacaaaaaatcagaaaaggcaaggagcgaggagtgaatgccactgacgtcattgggtggggaagggggctccgggaaagactcctggaaactcctccgcacaaacaaaaaacaaaaaggacttggctgcttcccatgtgtcaatatttggggaggggagttcaaccccagaatgaggccgagttttcaaagtttaaggagagaggggtgagagtgagatttcctcgttctctctggactggtctcaaggaaggtgggggtgctgttctacctcgtggggagcctcactccctctgccaagtaccggctctgggggcgaagcggcctaggggtgtgggggccgagactgaggtgcgggcgcggttgccagaggtgtgtacaaaaccgagacaactcgcaggtcgccattttaattgcggctaccaacacgcccgaggcccacttgctgccctccaagacgcgggggggcggcggggattgcgctttaggttctgtctcctttccccgcctccccacaggcccctgttcccccctaccctccgccccctgtggccagagggaggacctctcaggccggcgggtgc

SEQ ID NO: 915299 - DNA, 4001 bp, Homo sapiens
cagccaaaagagtaattagcaattatgatgacaaagttttactctctagggccaaataagataacaactaatcaaactgccttcacgcttttgcaaaggtcactggctataaaaaatgtaatgtcaaccgcaacaactattatttctcttcagtaaactcgccaggctcaagctctttgcctttcatttcattttctgctcccagccccttctaaaaccttcccaagttcgagttaaacgtccagaatggcttagggagcttgggagagtataagaaaaataaaaaggaagaaagaaagaaaccacgttcactttgtttttaaactttctagaaatcgctcatgaatgaagagccaggttttagcactcgaaaaagaaagcatttccacttgaaattcaactccatttcccccaattacacttgctaaaattcagggctattatggcgcagggagactgagaaaatctgcacaaggaaagaggcaacaactttatgaactttgaaaagacacttttcctcctgggatcttagaatcgaaagctctcaaattactccgactaattagccgggagaagaagtgatcagacgagggggaaggccaatgctttcatacagatttattttcaaggccttaccaagaaaaacataaggggattcggagtaaaacaaacaaaaaagcaaaccaactctgcacctcaaaacttgctgaaatcccaacacctggtgagactggatcagaggaaaacaaggaaaaatacccaccaagcgcagggggccggagaacagggaagagccccagcctccgcaaggcaagggagatgagagtcgggggaagcctggggagcagagagttttcaagttccgagctcagcgctccagtggagttgggggcaagagcccgggggctgggtggaagctgacagtcctcccgctcggctctgagctccctcggagcgcgcgttccaccgccttggcctggtggcttccttcccggctcgcgctagctcgctcttccctctacctccagcgtgcggctgccttgccgactgactccactcgggctggtggcgggcgcggtgcccccctcggcgctcgagtgccggctgactcttctgcgccggagcccagtgcggcacaaagcccgagggccggcgggcgggcggagacgcggcgagcaggttccctcggcgctccctcggcgagtcctcggagcgcccgctctctgcgcgttcgctgggcctcgggctggacaaagcagccggcagcggttgctctctgcggccgttccagggccttgggcaccacagagcctcttcgtcttttcccgcgggtcgggagcattgggcgacgctggggctaggagccgcggctgctgtcgcgcctggagtctcccttcttcccgcgagctcagcccgcgctggcgctggcgctggcgctggggctgagctggccgcccgccccgagccctgcgccgctcccgctcgccggcagtcgccctccgacgcgggctttcgctggaagtagaaagtttgggctcctgcgtggaaacttctccggcccaactctcccggcgtagcagtgggggaggggaccggcgagaggggaggaaggaaggggggaggaagggggagacctgtctgaatattgcaataaaaataaagcgagaagaaagaagcggactcacctttatgaggcatcctttctggttgtcacagcttctgtcaagagttttgtttggttggggttttttgtgctgctgttgttgcttgaagaccacaatggtttgaaatgacggtgttttaaaggagttgctggtgagagttttctccacggatgttgctgggttggtgtgtgagagcaattctcagattcctgggaaggagacagagattgacaataaaatgggctgtcagcggctggagagtgagagataaagagtgtgggtgagggaagtggctgcagccagcacacctatgctgattggtgatggctcaagtgtgttaatgtgtgtgtgccggcgcccggcctcgcctccaccgctcctcactggcccattagcgaagcctgacctctgtcatcatcctccagcaaaacacttcctcctgcgcctgaaccagagcgggaaatgaggccgagccacggttcccttttcaaacccactaatcactccgcaacatgcaaatgcaccgctcgctctcacacaaaatattgctttatgcaaagcagcgccggggcctcgcgccagccgattggatgctccctctccccgcctggtgcaattggtccgtttgtttgaatatgaatacacttgttttcggctccgccggtgggtcccggctcctctccccggcgcagggcccccgagcccgggctctggcgctcgcctgcatctccccgctccgcgcacgccgagattcggcgcggcccgccctgctgccgcgaacttgagcggtcaagtgaaggtttctgggttgggggtcgcgcccccactccccctaagctggactcgggactcccagtcctcggagggtgcaagtttctgtgctgtcctttcttgccaactccaggacagcgtggcctgccgccccgcccccgcccgcccccaccccatcccagccggggccccaagacacagagcacagcggcggccgcaccccagcccacctggccccttggaagaagaggaaaggggcgggagcgtcactgggtcctggcagctccattccagctgcggaggccgcggcgaagcctaggccgagaggaggttgccgggccgagaactaaacgaggccagaggcctccccagcccaagcctccagggcctgtccaaatcctccaccccgctctccccgccctttcttctctcctttctcctttcggaagccgcggtgcgcagcggagcagaggcacagctctggctggagaggcccgagtaaacacgccacttactttgtgtacagagggttcttgtgaaaagccctgaagagtcctcaccaaacactcaccaacttctcccacgtgccatttgttgactaagtgcggctgcttttcgcagcgcccgagaggaggggaagccaggggagataagaggggagggggagtggaagcctgggtgggggggcggatgaccaatgctgggagggattctctctctctctctgtgtgtgtgtgtgtgtgtgtgtgtgtgtgtgtgtgtgtcccactggcgatgtcggtatgtcagcgtgtgtcgtgtgtgccaccggtcatctgtgtgtggtgcgtgtgtctccgcaccacgactccctctcctgggtctgctcagtccacggaggcagctccccttcagctgttgccagaaaaccggggaggaaagtaagtaaatggcttttctcttctgaccacacaccagaagtccatttgttgaatgccgcacgattaggacacacctcagtacactccaaaggcgcccctcggagcctgcagttaaggtgacaggagagcgagcggctgcctggtcctgcgctgtcccgagctctctcggcggcttcgggccacggagccgggaaggagaaggaaggcctgggctgctgtacacaccccaggacagggcgagggggaatagggctgaagagctgaggcagggaggctgaaatgaagcagccgaagggtacgctagactcttcttgacttagggaaagtgctgaaagtcagagctcatcaataaaatctgcgcgacctgaactcgctgctgactggccgcgtcgccgcagcccctggcagccgggacagtgaggacgctgcaagccgccctgggccgccgggccacatgtgggcctcaccctctcgttcctgcctgggacccagcagccctgcgaccaaggagcccgggcagggctcccgggaagcaaaggcctccccggccctagccagaggtggggtcgcataaccctctcccctccccgggctggggagggctgccggctctaacccttccccgggagctcgcagcgccgggagg

SEQ ID NO: 915300 - DNA, 4001 bp, Homo sapiens
gagttcaagaccagcctggccaacatggtgaaaccccatctctactaaaaatacaaaaaatagccaggtgtggtggcatgcgcctgtaatcccagctactcaggatgctgaggcaggagaatcgcttgaactcgggaggcggaggttgtggtgagctgagatcacaccgctgcactccagcctgggcgacaagagcgaaactccatctcaaaaaacaaaaacaaaaaaacctctttaacaaaacctctccagaataaaactttctagctgctgaaatccaatcactgtttctccactgcagcggcatcaaaaagaggtccacaactcacctcctccacgaagccttcccaagcccatccccttccaggccatttctcctctctctcgctttagtgtgtggtttgctgtgatttactggcctctactgaacttcctcttccatgtcctcctagggccaatacctcacccactaggctctctacaaacatctgcagcaggctgccttgctgcttaggttttgtttattttctctctcccccaatgggtttgtcagcagttgcaggacaaggattgacctcatcgcccacgctgtctctcggcccagtgtagggataggaacactgtaggtgtgcaaaagaatgtgattaagagttcaacagttaaggagagcctgcaggcaggaagctgtagctgcaagtgagagaaatgctgagcacatccacccccagcacaagtgtttgcatcacatacagggaaagggtgccttgggggaggccagccagggctgatggtggcagtgggtacgggagcaatagggaggcagatggcaggcactctggaggttctggttgtcatcagcaagtgttggtacttctctgagcctgttttctcagctggagaacgggtaaggagcccaggcctacctcttctcacaaaataaagacacaatctgattttttagaatttcagacgaggcacgcctgtaatctcagcactttgggaagccagggcaggccgctcgcttgagcgtaggagttcgagaccagcctgggcaacatgacggaacctcgtctctaccaaaaaatacaaaaattagctaggcgtggtggcgcccgcctgtagtcccagcactgggggactgtggcaggagggtcgcttgagcccgggaggtcgagactgcagtgagccgagatcgcgccactgcactccagcctgggtgggtgacagcaagaccctgtctaaaaaagaaaagaaaacaaaagaatctcaaagttgccagggacctagggacttggcttccgactctgatgcgctttgtaaactactaaaagctggagaaataaggggctgagcccagccccacctcctgaatgagcggccttgggcgaatcactgcgtctgggcgcctggagcttccccgtctgaaacaaagtagaggatcctacgggaggcggagtgcgagagcaaggaacaaggaaagccctcgccttacacgccgcggcttcctgcagagctgagccacatccagtacgatggggacaacttgggctcccgatcctgacagacttgggttcgaaccctcagggacctcgcgcgaggcgctttagtcagtttctccatctgcaaaatgggcccgagagcaagaatgaggcagcccgcaggcggacgctgcggaggggcgctcgggggctgcagccgggggcgggtccgggggcgggtccagccggccgagcccccgcgcgagggggaggggcgccgtccgctgcgtcgcgtcgcgcaccgcgcacagcccgtcgctgtctcctccagccgtcactcgcggagcccgcgccgcctttgcgcgcgcgacccttacataagcgtccctcgcagcggtgccggcgcacgtccacccgctccgacccgccgcgggaagaggaccgtgcggagcgcggcggacactcacctcctcgccgtcgccagtcctcgccgccgcctctaccgctgctgcctccactgacagagaacagctgcggtctccgtgcaaccgaacttgctgcagtcccggccccgccttacggacttcctattggcccagacagcccaacccctcccgttattgggcagtgttctccgtcactcctcgcccctaggctctggactcctccctgtgcccgcctgtccgtcacgtttaagccttggcgccccacgtcagccccgcccctcccgtccccggcgagcgcctggataagtggcgaggctgggagagcccgcccctggcgcaccaccgcctactcccttgtctccggagcctcacgtgggccgccggaccctagccgacgcccgcaataggcggaagtggccgggctgtggctcgcagttattggctgtcggcgggggtggggacgttcgattcattcacccgagtagcacgtgtctcccgaagctgcaagcacaacagttcgcactggggctcaggcatcccggctagacgcagatacgcgctggctagcggagaagaggtcgcaggaaaagctaacgttagcgaagggcaggaggaaggagaaggcgcttgtgccacacgggttacatgactatgtcctttaacagctgcgtagatgatgatgggggtctacagtacgtctgtgtgaccttgggcaagcaacttaacctctgagtctcggttttgtcatctgcagagcgaagctactcaggacctagggggtttggaagccttgtttgagacacaagacacttgacaagacccaagacacttgtcaaagaggaaagctttgacaagtggaacaagtgactgaggcataagtctctgtcatcgaggcttattaatccagtttgagggcgtgctcgggaaaaacacgaaccacagacacatccgtggttgtttttccgaagaggttttcgggaggtttagtatttatgcatttccttaaagggggaatgaggggaaggcatgtaggaagaagggcaagtaggcgattaggacaatagttacattcctatgggactttagctaatgcccggtaaatctacgtaagatgagatgaatgtctgaagagaaaaagagagtaaaggaagagtcagttatgcagatgtctctgagtaggtagttttgactttgttctgcacctgggaaaataagcttgtaatgacattcttattgtggaatttttaggagctagacttagattgtagacctgaagctacaattgacctgtccttgtttatgggaggccagcaagaatttacttgtgaatgatctgtgggggcagcccttcccaaatgcctgaggtttttacctttccgtgtggatatggctgatgcctaatgctagtaacagctattcttttggaagagggtgttgcagtgactcagcttcaaggcttaatcttcactttcgcatgaattggggcgctgggggggggtcccgagatttttactttcattcaccgctgcgtaaactggggtctgtgccaaccaggggataagggagtgaccaaacaaaccaaaatcctgccttcaaaggagagcagacagattaatatatatatatatatatatatttttttttttttttttttgagacggagtctcgctctgtcgcccaggccggactgcggactgcagtggcgcaatctcggctcactgcaagctccgcttcccgggttcacgccattctcctgcctcagcctcctgagtagctgggactacaggcgcccgccaccgcgcccggctaattttttgtatttttagtagagacggggtttcaccttgttagccaggatggtctcgatctcctgacctcatgatccacccgcctcggcctcccaaagtgctgggattataggcgtgagccaccgcgcccggcccagattaatacatagtacatcagatggtgataagggcaaagagaaaaaataacctgcttccaaaaaggagaatcaaagactatgagaacatcttgctaactagaaattgtttattgagcctggagagatctgact

SEQ ID NO: 915301 - DNA, 4001 bp, Homo sapiens
cagggcatcaccactcacctgctttcctgagaagagcacaggagcagaggtggaacagcagaaatgtgaggaggagaaactgaggcaggaatgaaactgaagggatggtcttaagaggggcaaacaaatactgctagtatgtcacagcacaggagcccaaaagagaagtttcaggcagaggtgggcgggcggggagcctgcagtaacatgaactctcaaagttgtggggaagggcagcaccaaagcagacaatgacccagtgagaagctgacacggaagcaacggaagatgaatcaggaggtttaagggaacgatatgcagccccgcctaaaaagtatgcattcattcattcagtcacttctgaacgagcctttacaacatgccaggcactgtcggtcatcagagagaaagttgtgcaggagagaacaggtccctgtcctcatgaaactgacatttcattccagccaggaaaccaagcacacaaacaagaccaaagatccatcctgatcggtaagtactgtctcctggcctcagactccctcctgatggcaggtctccctcggtgtcacagagaaaggcaccacctgacagagaacaaagccacggtgctcaatccctccacccctggcctagaactcccggggtggggagaaaggcatgttcttaacaattgctaatcccgagcagtttgggactaagcagagggaaatagagctgaagcatacacagatgtccacgtcacctccatccccccagtctttccccctacgagcatgcccatgtacacacacatgcacactgcatttctcccctctccttggattgttatcccatgacctggcagggagcctggcccgtttgcagttaaagaacaagaggccatttggaacctgatcagtttctcctcctcctaaactgaggaaaaggttttcttcaaaatgggagatgttctctccccttagatctgagcagtgagtcctactcaaacgccagaggtctggtctcccaaaatacgggtagtaacatgtttttcctgcactgctgtctgggaggtctcacatgttgaacagagcatgacctcagccctcctatttcccagattcctaaaggaaagccgggcctttctgttctgtaactccagggcattttgtgaaggactgagccggctggggagctggagcacagcacacgaagggccggctggtgctgaactatgagcagggcctccccatgaccactggcagccatgccatttacacaaggaaccatgtggcctttccctcaactgtcaccatcatgcaagggtgttctggcccagagctcttggatccatggccaaggtcttctgtccaaggtctcaggcaaaacctgttctcggccaggaacagtggttcacgcctgtaatcccagcactttgggaggccgaggcgggcagatcacctgaggtcaggagttcaagaccatcctggccagcatggtgaaaccccgtctctacgaaaaatacaaaattagccgggtgtggtggcacacacgtgtaatcccagctactcgggaggctgaggcagaagaatcgcttgaacccgggaggcaggggttgcagtgagccgagatcataccaccgcactccagcctggatgacaaagcgagactcaaaaacaaaaacaaaacaacaacaaatctgttctcaggtcaagtagggtttgcctacctcctgcccctcagcttgcccatgcctgaccagaacagtccccacagctcttgagaaatgatctagtccaaccctcccctagattcctgttctctaaggactgttcccatccttctaccctctgctcttctaactgctagaaagctgccaagttccagagggaagagcaacaatggccaggatgtgtgggcacccctacccaggacaaagtgcctagaggcctctgaaagtcggttctcttaccacggcagttggtctgcagagttccagagaggccacactgttcctgtaacacccaagtctgggcctgaggcctgctgcctgtttataattgatgttctaggttaatcccctgtcaatgactttccagaactgtcccctcctttaccgctcccaggagagagaggctgcttgggagccaatctctggcttaggggtgggccttgagtagactgagggaaggataaaaaaacaaacactaggtcaggggtgagctggaagagcggcggtcaaaagccactgctcacaagttctggtggaaagatgaaagggcagtggtgttcgagtttcacaaagaagggagggccagggccagggctgggaaagccagccaggagagagacagggcatctggcctaaggaaaggagcagaagattcaatggggagaagaaaaaagaaggagtctaatgtcttcctccttcctgccgagacctcactatgccttgggttgtccacctgggaactggtgacatcatgggcctgtctccccacagggccagaagactggatccctcaccagggcacatgttacctggtgattagtgtgagctggtgacccagtacgatttatcagcaagcagatgttcacatgcttgaacatactatgaaaccacccagctcagttcatttaacaaagtgttatcctaaagggcaccccagtaagaagccagaacagagttcccacctactgggtaccaccccaccatcgcaaggaagcaaaacaccaggctgagctctgaccagctccttggaggaggcacagtcaatagctcactgttagatcttttgcttggcctcccgaacccgaggctaattggtcggaggtcttgcatggttcggcgcgctcactgtgtgacagaagctggcatctgaagagagcgggtaggctgagcctgctacgggaacgtaagtgcgccctgatccaagccaggcagaggtctgaacaccccgatgtccccgagaacacgcgttaactgaaaagtcagggtggagggatcctgcacattccttcaggtccaggatcctgaccagcactggcacctctgtttccgcctcttctctatcttttcccaagatgacaataagcagctttctgcttcccttccagcccatgaaggaagggggctacccggaaggtgagctcagaatgagactcaaaccaggggccctatctgggaataaagagtagaggatcagctggaatgccaaagtgggaaatggcagaaagtccctgttccccgtgtccagtgctacagctgctggttgtgacaattcttgtccttatcctagcacccagacaggcaccgggtgcctcttccacagctggaggcagagaggtgccaccaactcccgtactcgccttgagatttgccttctggctggtgtgctgctggtgtggggccagagctggaggaagtatctgcatggagcctgcactcagcctaagcctcacccaggagtgccattcacagtgacttgcccaaggtcatactcgtcatggaccccagccatctccactcatgcttcattcctcagcacacagagatcatgcaggacatgatcttcggaacaggtgtccctgccgctcccccccgaagagaagctgcctgagagtggggtcacagcttactcagctctgcctgcaatgagcacttcacaggctgctactggattggaccaaaaatgtcatcaccaccacgtgtcctatttggtccagcgcagcctgcctgagtctccatcagcactggggagccggagcggacaagaagacacagtccctgccctccaggagctcacgtcagggaaggcactagacacgtaaacaaagaggagaaaccaagtgtggtgggagccaaaggaagcaaatgccagtgctgaactagtgatgggaggaggggactcaggtatcaggaaaccatgggagttgagactcacagacaaggtgagtgacagaggaccggcgggaagggaaaagggaagagagtggtgtggccaggacacgggccattgtat

SEQ ID NO: 915302 - DNA, 4001 bp, Homo sapiens
aaaaaacccttccttttcgtcctctttaaattatgaaaggaccacctgaaaccgtgtatcttgtgaagaggtttacccaaaagagtggatggaacctaaagaagaatgaacccaagtcacttaaagacttttgtttaaaacacacaaccacgtagataaaaataagtcttggaaacagattctacaccttacaaaggtaaataaaaaagacaaatacatattttatatgttttattcacaaattttataataccagtcacacatttcaaaaccatttattagagtcagaccactcaagttttacactagacagaaaccgtctctaaacaatatattggtggttgttgttaaagtggcctttaaaaaggggttcactctgctaaaaggaggctcatcctgataattgcaatcactaacaactagaaaaaactaaaccgtgagtacaagcttgaaaaataaaatgtagcactgggacgctattaaaactcattgtaactaagttgaacagtaactttacttaaatgacatatcgctcccatatgaatccacagaagaggaggactacagggaaatataaggtggcagaggaccacttctgtcaaggggtaaagaaaaacactccttcgctatcagggaagggagaaaaagagaaaaggaagaggaggagggactgaacttttcagagaaactgcaagtacttgttaccctctgggccagttctccacctacaggttggataagatctcctccccccacccaaaccccaccctcaaccccacttgcccctattttgggacaaattagaccctccaataggagaataaaagttttatctagccgcccccaccccaaaatggggctgacgggagtgagcagctgcctggctggcagggaatggattctcctctcttccctttcgcatcatgtgcttttcaggcgccatgttgggctcctaacaggcggctgctccactcggggccaaatccctattcccacccaccaacagctcgctcccaggtcccccttcacctccttccaacccacagaacacaattaccaaaaagggtgcttggggaaaatgggagacccactctcccacttcccagggaattaaaatggcttatgttaactcttacttccccaaaccacaaactgcctttaagtctcccccaccccaaagggctctattcaaagcgtgtgtgtgtcgggatatacaatgcggtggcctaaaaagggagttggaaagcggaagtgggactccaccctttatcctccccactccctcccccccagaggcccatgctcgaagcctgggccaaagaccgagcctgagttggaggggggtgggggggttggagagaaggaacactgtcccccttgggatggaagcgagacctgggatgaggctgacactaaaatcagggagtattagaagtaataggaggctgcggggtgtataaaaaccttggcggtttgggcctcgatgagagagacgatctccttggcgaagggcaggttctcctcggctagaatggtcagcatattgatgtgcggcttgctattgaaggtcaggtcttcgagcgatgactgataatcccgacaggcgtcctcccgggcccccgcagcaccggcctcggccggcgtctgctctgacattgcgccgcggcccccctccgaggtccgctgcagctgaagctgaagccgctctggataccccgcctcccttccgactcctcttcctctccccggctctctcgcggctccggcttcaccacatgctgaccgcggaggggggatgggggacgacacagggggaacctcgggtatgaaacgccgccgtctcgcgggtgatctccgtccacttccagccgccacagaagcttctttctccacagacacaaaatggcggcggcagtggcggctccagctccgaaaatgtctgtgttcccaaccgctgcgtcgtgcgaaatgaactaggggaggggaaatgtgcggtaaaagggcggggccactgataaaaccaggcgtgattggctgtcccggcaacgtcacgagccccgcccccggcccttccgcaggacgccctggcaccgccttcttctccggcctctacccggactttcgcaacatctactgctcggaggcgcactggaaaagacggcccttctcattggccgattcataagggactgttcggtcatttgttaccataacaacccattcagggaagccaataggcctgggaaggcagttcccgcggcccaacccaaccactttgagaagaagactcagccgtcccctcttcgtccctccctctagcttcccagccactgagcgggcctgtcaatcatctttcctcccgcctgccccgtagctgctaccgacggtgggggttggagggagcgggggttggagggagcggaggctttctgccgccgcaccccctctcccttagcgtctcaggtgctctggagagccagggcgggtccagctgcccctctgggaactgggaagtgggagggaggtgcccaatttacccggaacttcggaaagcactgctggagagtttcttccagcacgccgcttcccacacccacaaaaatacctaggcgagcttgcctgacttgaatccccaggaaaatgccttttatttagagattaagtgtgaaaggctttttccttgggggtttggaggagctctttaaggagcccactatgagctctaggaagagtttttcacaacagccacacccagctggaccgtaatatctccactgtgaatctgcatttcagaacctccttagcatacactatttggggcacgtaggaaaacacacacgcgcatgcacttttgttttaaacttgtggggctgtcttcccaggttggaaatgatgctcgtaaaacacacaaagctttcaaatagttcaccgtggagctgcgacataacacaaaccaaacgtaattttttcattgagtagcgatattgacctaaatataagcttttaaaatgtgtcaattacgggctgggcgcggtggctcacgcctgtaatcccagcactttgggaggccgaggcgggcggatcacgagatcaagagatcgagaccaccctggccaacatggtgaaaccccgtctctactaaaaatacaaaaattagctgggcgtggtggcgtgcgcctatagtagtcccagctactcgggaggcagaggcaggagaaccgcttgaacccgggaggtggaggttgcagtgagccgagatcacgccactgtactccaggctggtgacagcgagagtctgtctcaaaaaaaaaaaagtgtcaattacctaaaattgcttttccattgccttccgtaggctactaggcatttgagagataatttgttgctccccagaagaaattgctcttaaaaaataaacttagccgggcatggtggcggccgcctgtaattccagctacttgggaggctaaggcaggatcacttgaactcgggaggcagaggttgcagtgagccgagatcgcaacaccgcactccagcctgggcgacagagtgaaactctctctcaaaaaacaaacaaacaaacaaactactctttacttgtcccatataaagtaacattttcatttcttctttttgtttctttgagttttttagcatctttattgttgtctaattgaaacataatgaactgcataaagtgtgctgcaaaggttaagttttgacatgtattttccatttttttcttagcatgatatcacacatgaatgaaaagtaaaacctggggaggaaaactggtcttccctcatttgaagctaagaagtattgttaaataagtatttataatctcaataatttcacactattgttagtggtgctatttagatatactagaaagtttcaactaataacgtccaaaggttttattttctggagggaaatgaccagggtgaaatagtcctctgttcattttcttttcattttaaaggtgaatttcattatag

SEQ ID NO: 915303 - DNA, 4001 bp, Homo sapiens
ttctcactcttgaagctgctcaatgtctccctgtcagtgccgctgaagcaggagtctgaggagccggctttctggggcgtgggctcccctgagccccgccggtcaaggggctgatagccacctgcccccctgcgttgttcccgtcgactgctggtcctcaccagggcccggtcaggctgggtcagggtcaggaagctcttgctcagctcctggctgaggctccccttcagcagggggctcatgggagtgtcagccatgctgctcccactccagggcgctccatctccagccaggggagaaggctctgaagagtctgtactggcaagagaggggtctgggacagcccctggaggcgtctggggaaggtctccaactgccaaaataaagggaaacagaaaatgaaaaaagggttttctgcaaaacaaactagtggttaagggaggtcttatgccctgtactttccctgagagcccagccacagcagcacactggggaggtcccacagaggaatacagaggagacccaggatggagccaaagttgaggggattcaacaacgaaacagctggtctagcccacaagcctcggccccataaggcccacgcactcagtttctcctgcgagctgagcttcagcatctctcggtcggcagaagtcacgatcacattgttgctgccctgctcccgcaccagctccttgatgtctgcaaccatggccccagaggtgtcagcaggaccccctggcacagcacgccagcccctgttccacagcactatgctccaaccctgaagagcagccacctacctctaaggggcccagagtcctccattcggggcagcagctcctgagtagacagagagccatgaaggaacaaacaaggcaagaagtaggctcaggatgcacccacagtagggactggctcgcagagggacaggaggacaagctgaggtccaggcccactcaccgagacctggttgaagccaaacacagagtgctgggagctgcagcgcaccgggggtgtggaactgactttccggaacactgtcatctccactccggggtccctggcggtgaaaaagagcagcagctttgagctaacctctcctctgtgtatgctacttcctcccatctttgtcactgcttctttttcagaagtcactttacaattccagggctaacacaggacaagtgttcacaatcactcagagagccaatgttccctaagcccctactccaccctgcaaggttccggcccaggcaccaaaaaccctcaatccccagcacagcccctaccccacccacctgggtggattgctgtccccctgggcaggctcttcctccagctcccccatggtagagctgcgcttctccacgatctcgccctggtcaaacatggcatgaagccgataattgacagtcttgatagtagcaaagatgacagccaccacgaggcagtacacgccggccaccatcaagctgggaggcaggacctgaagatgaaagtaagccaggtcccttttcacaaagcctcgcccccacaggatgtacctgccatcaacatcatagctgggattcacagactcacaagaaaatttcatcacctctccacacaaccagtacacagacctcgacaaagggctctgtattctgcttagctggatgagattaagtgtagggttcaaggtcactcgatccaagaaaggaagactttggcccctcttccacacagacccaaactctgcagtgattcctctctctccacgtcccagagcccagggcactgccctgaatccctgccaggctgccctccctctcccggctggagttacaggtggccgtggcgtctcaccatgtacagtaagaagggaaagatgagcaggaagatccagacatagaggtggaagcagttggagaaggtgctctggtgcgggtcgaagaaccaaccgccggtgagcgaggcccacaccccctggcgcaggatctgcaacacctgcgaccccatggccccgccgctgctgcccgcgccccccctcccgggaccctcatgggggcggcccccggcccatgccccgtctggcgcctgagggccccggggcccggcctcacgctcacgccatggcctcccccagcgggggaggggggctcggccgcgcgagggtgcgagcagggggcggggccggccgggacagtcagtggtgcaaggcccggacgcgggggtggggctgcatcaggggcggggtccgggtccccactcctggcccagaattgctccgaggggccgagccggcaggcaggcgcggggcacgggccgggtacccgtcggcggcatccagaggtggtcgtggggtgggtgctcccggggtgcaggcgacagctccctagtctccggaccagggagaaccccaggatctggggtccactttcggggtcgcaggtcacttgcttggggctccgcgctcgcccggcttctgctggtgccggcctaaggaggaggccggaagaaggagccgcgaaccgccagcctgcagtggcgcatgcgcccaacgattccaattgggacccggaaaaggaaaacttgacggcatgaatgcgcaagcgcagaaaggtgatggcgcggtaggacgcgaggggtgccctttgggcgtgcgcagactccaggactaaagcaagttcgagcgtaaaagcgtttgggcgcatgcgtagacccaggcgttgccaacccagggtagacgactgggcggaaccaaagagacagttgagtagccattgggtaacggcaaagtaattggcgcacagctcttccaatgagttacaggaggcggggaaaaggtggaggcgtggactcccctagtagcagcgagagttctgcactaccgaagcacgcccctctcggcccgccccctttaatgctggacctcgtacgtcacgaccgatttcgctcccagcggcgtctacttccgggtcagagctcagacctagggtgtagagaacaaccttccgtaacaggcaggaatagtcgaaataggatagcgtcgtctttcttaaagtgacaggctcaaagcaattggggcagccctatccagaagttgtgagggcgactcagctattctgaatccaatcctgggcaaagttctggacaagtctcaggtttctgccaatggggaagggatatgaagaagcggattgtttcccaggtgaggagaagaagagagccttaggcaatccactccaagagcttgaggtgcagccagttccgtctgtcctccagtcttccccaccccatccaactagctctacgaggcagagctttctcgtcctcatatcatatatgaaaagaatggccgggcgcggtggctcacgcctgtaatcccaacactttgggaggccgaggcgggaggatcacgaggtcaggggtttgagaccagcatggccaacatggtgaaacccgtctccactaaaaatacaaaaattagccggccgtggtgccacgcgccggtagtcccagctactcgggaggctgaggcaggagaatctcttgaacccgggaggcggaggttgcagtgagcttagactgcgccattgcataccagcctgggcgacagagcaagactccgtctcaaaagaagaaaaaagaaagaaaataatgaggctcagaatcgatggatcgcacagtcccacaacttcgcagccaagaccagactcgggttcacccccttcccaagtgtggttctgtaaccccgttttgctgccgccgatgcggatgcagagggcagagatggcccatccttagcagagaccaacctccaccctaggcagcagagcacgcagctgggggcttttctttctagatctcaaaagcctgctgtgatgggggatctggttctgccctttccctctctgcctctcctggcccgcctacccgggaactccccgcctggagcctctgggaggggagcggtgcaggccgcccgcgtcatctgatgctgtttcctgcaggaggga

SEQ ID NO: 915304 - DNA, 4001 bp, Homo sapiens
aggttagataaactccaggaccagggaccaaagaaacttcattaattgtcatttccaaagatctaaaatcggtcatagactggagcagaactggtacggtgaggccaaatcagtataacacccaaaaaacccacttcctgtgctatcgtgccaccctcttttcattttgttccccagaggcctagcaaaaaacagttaccaaaatgcctcttgaaagagtaggtaataacgtcctagaagtccaggtggtagctaacttcttgatttgtatatcccagaaggataccagggaaagtgaaaggagggaggcggcgggggcgaaacggggaaagccagagagtgcaaacaaaacagaacaggcaccaaggacaagcgggcaaccaggagagaacgaatgatgagagaacctcactaagcagctactcctgtactgagctcaggaggctggcttcaaggtgaggactcagactccagactgggactccaattgcctgggtttgacagaaccagggaattggtctcaggagccctcaaaaaaaaaaaaaaagagccaagttagaactgggggacagacaaatggggtggcaggacatgtgtgtacctatggtggctgggctcctttaaaagcctttgctctccactgggtccaccctggggcagggcttagtactcagatacacacccaagcggctctacctcaaagcattccagaaaaatgggaattttactgaaaggcttcctggaaaggagaacttatgccacctctcctttacctctaaaaatcttcatactacatttcttcctctcgttttctcttaggtttccaggcatattccctctcaatccctccctgcccccgggagcctcaattctcccaagatatttaggtgtcttccccagtctgcatactctactaagtaaacaaactaacaaacaaaacccttgttagccagacagtggccccgctaggcagactccttcagactcagtagatcccaccacagatgtcaggaagaaagagaagcaggagctccttctgtctactagtggcaaagcagcatttttatcccccaggcttctgggaaaggaaccttaaatgccttctgaaagcaggtctcaacctctcccaacggctaggcctccctttacagctcttaattgacaaggaagaagagaatgggcagcctggagtccaagatcctgctcccaagctactgtcctcgctgttccacacccggctcctagaagccagcttgggtaccgggtcagtttcccgattctccctccgtcggcctcgatcgctccgtgcaatgtgcccctctcctcattagcacccacattatccaggaattctgggccctggggccccatctccttggtcccccacgccaggacctcaggcaccctctgtgcagctccctcatcctcagacgccggcttcccccacttctggggccccctgaccacccaggtccagccccacacctagttcccaactcaccggccccgccgcagctgccgccgcctccctgcggaaactcgcggcttcccgggagccggaggagcagtgacagcagcatcacttccgcccgcggcgcagccaatcagcgcggcgcctgcggcccggcgacccccgcgggccacagcaaccggcgcccggggtccggctcccgcgggcggcctacgcaggcaggggccgtgcgggcgctgggggctgaacccgcgggctccgcctccccgagtcctcggggcatcttccacatggtccctcttcagaaggctctccttcatggcgtcctctgtaaagggcatttcggttccgacctttaaaagccactcgttgctcttctccttctgaccgccatggccccgactgtccctgtaatcttcccagaggggatcctgcccacccaggtcgccttccttctcgcagtcggctctcccttcttccccgcgccccgggagagtccacttgtatctcaggggtctcccgcagcatccccgtgccccggcggcgccagctgtcgccgccagagggcgccgtcgggggcggcgcggcgccaccgcggcctctcctctcgcggccggagcctcgccccctccgctcgtgccgccggaagtgggaggtgccgcgcgcgggccggcgctcgacccctccccccgtggctcggccgccccctccccccgctccgcccgctcaggtgcgtcccgtccctcccccactttcctcccgggggcgcggcgcgggaggtgtgtgcggggcgagcgtgggtgggggttgcggggcgagggccgggcatgggggtcgggtggggggcgtggagggtgctgtgagaaccgaggcgggggtcccggcctagaagtgggacgggggggtggctggcagcggggtggggggaccgaggggaaggggtggaggggggtctggtccgagccagcggccagcctagcagtcccctgtggggggtggccaaggccacccagcgccgcttccccccattgtccccttcccgtctgtcccctgttctcgcccgaggacccgtggctccggcgcccctgcttcgctggtggtcgccccgggttgcggagttctttttggtacactcgaccctccagccagctgttcctacccgcgccacgggctctctagccacggagttgcatgcatggcccttgtcctggggtttcgttcaccgggcgcagaggaccccccagccctgggctatgttggagacgggatgtttgcacctgagggagcagcaatggcggtttgggcccattttctcccaggagctttgtataatgagggaaactgaggcacagagggtctgtgggctgtgactgaggtgttgacacagccccatctacctatctgccctatgcgctcttcagtgttccgggggggaatacgtgtgatgctgttaaaataaaagcaagaatgcaaactaacccgatgttcatccccacctcccaagtattttgattttcttttctcctcataaggtcataagtttgctctgcggcataaaagatgaccttttgatttttaaaaaaggcgtccgtcccagttcccttacttgtgttaccatgttttttaccttgactttttcacgctagagaacccaggattcttttttgcaccactagtcactctgaagagtctgttctttgctcagttagtgggtatcaggcctttcccatctgtggggagcacgctgacagtaaaatatgcaccctggattgcccagtattgcattacttgttgacttacaggcagacacctccaaaaacttcccttaaattaatggagaatgctttgaatgtaacagccataaagtgatttaaaaacatgagatctgattgatactaggccgaaaagtacgtcttttattaaaaatgatagcagacaaggtaggcctgggaccacttggaagatcctggcagactaagatgtattgtttgaaatgactacatttctgccaaaagtgaaaataagatctttgcacagactcctagatatttatgtaaatacagtgactcctgaggattgctgcccactaggacactaggactttgcatacaatgtctcttttagtactcttaagtattttctcccggagcccaggtttttgtgtttctttactgcgacagctctgttgtgtggacattctgaggggggagagatacatttgttttaaactttggaaacttgtagcctgtaatttgtttctgaatgtacagagcataatggcagcgtctgaggttgctggtgttgtggccaatgcccccagtcctccggaatcttctagtttatgtgcttccaaatcagacgaaggtctcccagatggtctaaggtaatgtgtggactcctgactgggaagattcatttgggtaaagggtttttgagatggtcttgtgtagctggtctttctttttggctctgatggcactgcactagctttttaaaggtacaggactgtctgatctatctttgtatttct

SEQ ID NO: 915305 - DNA, 4001 bp, Homo sapiens
ctgtccatgccactcccacaccccagcctcatcctagtgctaacagagccacgagagacctttctgaaaggcaaacccgggtgtgagggtcacagagttcagctcatcctctcactgaaccaccagggactcaggccctcaggcaccatggagaacgcagaagtgtcctggccccccctcaccccttccagggaagccgctcagagggaccctttcctcacaagggttctgggattatacccctcccccgccagctcttcctagcatccttcggcccctcaaaaaacttttaaaaaagaaactcaacacaccacacccaatccagaaggctctgggggcctctgtcctaccaggggaaggacacagccccgcccaccctgcctgccggagagcacttacaagtttattccaaagtagcgtgagctgtatctctctacatttattttaactctggggcccaatccctcagcttcatttttatcttcattctttttttttttttttttttttttttgagacggagtctcggtctgtcgccaggctggagtgcagtggtgcgatctcggctcactgcaacctccaccttccaggctcaagcaattctcctgcctcagcctcccgagtagctgggactacaggagggtgccaccacgcccagctaatttttgtacttttagtagagacggagtttcactgttttagccagaatggtctcgatctcttgacctcgtgatccgcccgcctcagcctcccaaagtgctgggattacaggcgtgagccactgcgcccagactcttcattcttatataagttaatacatattcactgtaaaatgtccacttatcgaggaaaaacaaagtgcccagtagactgccgcaggctctgttcccccagctgcccgcccttccggcctcctgaagtgctgcccccagcctgctggcgctaagaccccacgtcctcaacatgccggacctcctcacgcctacctgctctggaaacaagccccaacccacccccccaggactgaaccccactcgaggctcctcccacccgcagtctgggggcatcactcaggacccctggagctcagcacatcgtgacgccacaaccccacagccccatctccccgtccacacttgaggagctacagacttcaagaggcagacccctgggtcgcaaccccggcccccacctctccgtggtgcggtgaccttgggctgctcacttccctctccaaaaggctcagaacaaggccaggcaccctcgtgctccgctgctcatccctcccctgctgccctgagaccctgcaggctcagcgccaggggacgcaccccgctgcgctccgacccgcgtgagccccaggccagtactgccctggtacccttgccccaggacgggggccgcggggcgccttctccaggagggggctccgggtctcctcagaagccggtggctcagaaggtcagggtccccgcggccgcccgacctcagagctgggtcaactcccggaatggcccctccccacacccgggctcccctctcgcagcgcagcggcctcagagaccaggcccaggcacgcggctccctccgctagaaacgtcgggcccgggccgcctcgccgggcagacgagactcggaggagcgacgcggcgccgggatccatcacgaccccccgaccccgccccgagctccatcccaccaacccgcgaccccacccccgcccccgtccccgccccgagctccatcccgacaccgaccccgctccgccctcccccggcccctgcccggcgcccccagcggcctcggcctccggcgccacgtgacgcgcgcccaccgtgtcccgaacctcccgccccgggcagccccctcgcggacgctcttcggacactggccccggccgccgggcctcaccttcggcggcgccgctggccacgagcagacaggcgggcctgttagggagccgctcggacgccatggctcgggctcggcgctgggtctgcgcgtgcgcggcgtctgggcgcgcccgggagttcgcgggtcacgtgccctggcggccgggggcggagccgggtgggactgggcgcctgcgcgttcgtacccggtccgggtcggctgggctgcccgccgctccgcgcgcccgggcggtcgcaggtcgcgcctgctttggccccggcgggttcggcatccgagcctggcaggggccaataggtagggtcgcgagggtcctccccggccgcatgcgcagtctgagcgcgcgcggggtagggctcttggcctggggtgggggcgcgggcatcagcagagccaggcggcggtgtcggggcgcgaaggtgcccgtggtgttccggtggccacacccgaggagcaggggagaccggggggctgcggggtcagaagctccgggtgtccccggagactaggagggggacggcggggtccaggaggcggggtgggctccgccggcccaggacgggggcgtcgcggggaggcctgcagggttgtggggcgtcgggctgagctcctgggaggacggagtgtcacttcctgagatggggacacctcgggcgtgctggctttggtgaggagaattgaagcagtttttctttttttttttttttttttgagacagggcctctggagtgcagtggcgtgatctcggctcactacagcgtctgcctaccgtgttcaagcgatcctcccacctcagcctgttgagcaaccgggaccccaggtgcacactccaccacgcccagctaatttttttgtgttttgggtagagagggggtctcactgtgttgtccaagctggtctcgaactcctgatctaaagcgatctgcctgccttggcctcccaaagtgcgaggactacaggcgtgagccaccgcgcctggcctgaagcagtttttccttagactgtagttggagggggtgagaccacgtggagtggttggcagacaggcaggcaccctttgaggccaaaagggcgcttgagacagagccagcaggcgagcgggccgcccaggtccctggccccctgctgccagtatgaaggtcccaccaagcctctgctccaaccaggggaaccgtcatggttgggaacagccaaggtgaggaattctgtgggtcacaccccctgaaaaccactggcctccgccgggcgcggtggctcacgcttgttatcccaacactttgggaggcccaggcgggtggatcacgaggtcaggagttcaagaccagcctggccaagatggtgaaaccccgtctctactaagaaaaatacaaaaattagcagtggcagcacctgtcatccaagctacttgggaggctgaggcgggagaatcacgtgaacccagcgggggcagaggttgcaatgaaccaagattgcgccactgcactccagcctgggcgacagattgagactccttctcaaaaaaaaaaaaaagccactggcctctggctccccctggcccagcctggagaagggtccctgacccccgtcagacaagcagtgcaccctgcctcacctgacacagagccctcccaccacaggggaagtgggagctgggagctcctggtacaggcaaggccgagagttgggttagggagcagaggacggagctgagtgagtgtccagtgttaggtgggtgggggtgttagtggatggaggtgtctgaagcctcgcaggcctgcggtcacaccacaggctgggcctagccgcttggagagctttctggatctgcacaggatcttgtcccccacagacacacactgtgggcctcaaacccgggagcaggaggggcaggttggagcaggtctacctgcttgcccagccccacctgcactggccccaaggtgtccctgatggagctgagctggaccagccacaggtgcagggctgagtctgcagcagccccctccccattcctcttcccctcccccaagttagaacagcagtatggaggaggaagctggaagccaggcttggccctcacgctggcggca

SEQ ID NO: 915306 - DNA, 4001 bp, Homo sapiens
tcagacccctcagccctggctgcaaccctttcctgtccagaatcgcgggagcagccaccacacagacacatgacattcaaacaccagcactcaggtcctaatagatatattacccaagcaatcccaggatgtgccatagtgactctaagccagccacctaggctgcaaacacattggcacacacggcaccccctgccccaactcctctctgacaagacacccagtggaaaccatcaggcccctgcagtggcccttcctggccacacacaacagccagtaacacacacaactacatatagaatcctgtatgcaagctgtccctacaacaactccactgtacaataacagacatacagccacatacacacaagttctctacacacacaacagccacacacccagctaccactccacagccacaacactgcctccccagccacacatagcacacaatgccatagacccataattcccataatctccccacaaataatcccactctcgatgacacattcatacacggcacaacacacatgattacacacaagacacacccaacacatgcaacccagcccgtgctacacacagacaggaacactcacacaaacacatacactatagacccacccagcctggacacatcccaccgcaggttgacaccagattgcagtttactcttccctatctcaagccctagccgcccccgtcaagaccagggcagctgggatgaggggctttataagttacaaaagccagtgcccaccacatcatccccccaccacctcagatccctgggcatcgcctgagggcagcacactccacatttaggcccttccacctgagcccacaccatgccatgcctgagaacatggggggcgggggtgtcccagggacactagccctgctctctgagcctgccccctcctcaccacaaagcagaggtagatacaagaggaaggggtggctgcagaaagagaccccaaaacgaagatggagacctagagaaacaggagagagaccaagatagaccaagagaggtgggcacatggggcaacagaccaaattagagagcccagaaatacttgaagagaaaccagaggagaagcccagagaataaagtgggaccactgtacctggagaggaacaagaggaggggccccccacgaggaaagactcggagatctccaacacaggagggagggaagggatcggggagtgggtcccacagagaaagccagtgaagccctgatggaaggagagatttggactctggggtaggttccaggctgaggactgaagtccagatgtttgggtgggaatctgagcgggtgtccagttgaggcttggaatggaggtttggggctttgggtgaggccggctctgaggtggagtcctggatgacagctgggggttcaggtgctccaggtgtgccgggagccccacatatatggtgaaggttccgaggcgtgggcagggtccccactaatctaaggaaagggaattcgaggcttgggcacagctctcagtgtgcactgcggtcccaccgtggactggaagctcagtgcttggggtggagccccggatccgaaaggagttcagagtctggggtgacgtgtggactgagagctggggcttcaagggctcttggtctgcgctgccgtcccagcacaggagtagaattcagaactagaggaggggtctcctccctgagaagggttcgggggcgggcagacccggcccggcgctcgccggacaccccgttctcctggtgcccagcgcgggggcccccctacctgcaggctgtcggcgcatggctgcggcggcggcggcggctcgtccggcttgaggaagacctgctggccccgcctgaggaattggacaacagcgatgaggatgtggtgcagcaccaggaccatgctcgcagccgcccgcccgcccgccggcccggccgctgcgctcggtcagcgcgtccgcgacagcttcgcctggtccgcccgagtgtccgccccggccccgccccggcccgccccccgcccgcccccggcccgccccggccccgcctatgtccccgccaccgcggaccgcacctctcggcccgtcggatcctccgaccccaccggacacccggccgctgtcaccccgcttctgtctcgccctgggttccctcggcccttccagctggcctgctgtcagcctgcgctcgctgcccctcgccccgtcgccacttctctcgcatctcgcaggggccgctctcagagcctccaccctgtctgatcgcaccctgtttccccgccaccactctggggtccggggcccggccagagccccaggcagagaccggcgcagtggggtggggtggggagggaaggggaaggggggcaggggccgcggacaccgcaggagcctcgggcttgctcctctccctcagcctaggaggcagggggaagtcgggagaatgttggaggtcgctgtgagacggacaggccctggagcagtcgcccatctgcgagggagacacgtgcgcacagacaccgagcgcacacacggcggccgccactgactggggcccccaggcctgggtgggcaggtctctgtcgccgtccccggagccggagagggtgcaggccccagggccacacggtccgcagttccgcggtgggacccgcgctccgggagcgcgtttctccgcagagcggcttctgggttcaggagcctgcggcagccgcgacgctcctgcgccccctgccgtcccatcgcggcggcgcaatccggcctcagttgccggctgcccggaggggccgcgtccggggattcagcgggtcaccggggtcagctccctgcccggaccgacccggttcttaggcctctgcttggcatgaaagcggttggggcggcaggacgtgtctggactggagggtgcgcttgggtctcgctaggcctttgccagcgacttgccgcatgaccttgctcggatcccctccccccacttcctgggcctcagttttctcatctccctcacaggacggccaggaggaccaaacccgggaatggcgggaaggtagagtcccccgacagccctcaatgtggtctgacctgaatccccccgtcaactgcactgccggcccctctctctgcagctcccctcctcaccaactcttggacggtgactcagtgagctcccagcctcccagcctcccagcctcccagcctccccacctcagctgggtgattcatcagggccctttctccctggggagtgattttctcaatgttgagtcattgtgcccattcctggacacagtccaggcagctggcacatagccttggcagagcccggccaccccaccaactcagggggcagccctccatgccagcgtttctcccacctttctttctgaggcatgctctggcatgctctcccccactcaccctcagtggctccctaccaccagcacaataaagcccgagccctgagcctggcgggccagaccctctacagctgaacccttgcttggtcatccagctctgactcccctccccaccattccttacatttctacttcttgctcttctcacatcaatgactgactgactctcacctccaggcctttgcccatgccaccccacccccaataccctcccagatccttccctcctgcctgtcatttaggggccatttgaaggcccacctcctctgggagggcttccctggttactaccttatccctctgggtagcccttttttgtgtctttcctgggagtcacatctggggacttaggagaggtgtagagtaagtgatctgggccaagtcaatgtattttactgaatcttccaaacaggggcaattcatcctacttattaacactgtagaaaaaattacctgggctaagatgtgtaaaggttctggcccccacagggcctcccttcctatttttggcctcagttttctcttccgtaaaaggggatgacccatgtaagggctgttggaaggactaggtct

SEQ ID NO: 915307 - DNA, 4001 bp, Homo sapiens
cactgcactccagtctgggtgagagtgtgagaccctgtctcaaaactaaactaaaaaaaaggacactcacatgctcacacatgtgagtatgttcacacttttatacgaacactgacccacacattctcaccctctcagatcagcatacacatatgcacaactggaagctcacattcaggtacacatacacacactgagacacaagcaatatccccagcacctcagtatcaagcaagtcatgacccaaaagaaacccagaccccaactgcaatgtcattctagatgcatttccaaatcttagcctgtcccagaaccatgaggagaaaatttcctctggcttaactcagtatgtctgtcccttctggttggggtccaacctctcctcagccttcattcctcccagtgccatttcagcagggccctcatgtcctgggctcaatggaggtggagaacaatgggctatccttctctccatccttcatctctgccacttgtccaacacttctactggcccttcaaacacaacgaagattcaggctggaatggactgtatgtgacagcacccccttctggagacatgtgatattacagcacagctctatggtataaaagtcatcactcctcagcctgaggcagagaggagtaggagagaaagaggaagatgagctgggtgcagtggctcacacctgtaatcccagcactttgggaggcccaggcaggaggatagcttcagcccaggaatttgaggctgcagtgagctattatggcaccactgtactccagccagcaagacactgtctctattaaaaaaaaaaaaaaagggtgagggaagaagatgaaggagaggagaaggaagaaactgagaagaagcatggaggagggacagcagcaaagtgctgggtgcaccaaggatgggatttagaagcctcagtctgactttggtttctccagttcaatccattcagcctaagctgcaagaccaattctctcaaagctcagctctaatcagaaaacccttgggtggatcctggtgggccacaacacaaagtccaaactctcagcctggaatcagcagctctctgctcagctgttcctctgccgagatgtctcacatccaactttagttgtccacatcttgcctgtctgccatctggaacagtaatgtatggaaagagcaggagctctggaagcagacagatttgtgccccaggtctggctccactggctgaatacctgtgggcaagcgatttcccctcctggatcctctgtttcttcatccagaaaacagcagtctcttgggtttgtggtgaggattaaatgagatcacaggtgtggaaacagtgctcaggaagctgtaaacttctgtgtgaacatgtgagaagtcgtaattatggcttaatacttctatccctgctcctacctgcaccccccaacacatagcaagccagggggtccctgagggaagaggtcgatgctgcttcacctttgggctccacacagcccagcacccaccagggccggccctcggccagccttggcagcagggtgtggatttggatcaaaagaggcagtacaaactatgcttactgcaaattcacaacagactacagctcccagaatggctcacagactgcatgggtgtggccacagacttaaccccttcttcaccaagccctttcttccattgtattatctggggattggtctcagaccagtcagaacaacttaatgaggtggccacacttctctgagaaacctcggtccctcccacagagctttgtgcttctcaccgtagccacaaccacagctctgtttcaggcctcctggtccctcccacacgatgacagccctgagctcctagctctggtctctccctctccaggccccgctaaatctttctgaaagtgtggctgatcgtgggtggttcataatgacagtagctaacctttgtgagcacctgccgcatgccaggggctaagctctgcacttccagattcttcagaatcatcctgccaagaaaggataattatctccaccccactattcacacaaggttcagagaagttaagtaacttgcccaggaccacacagctacagagtaacagtacatctttcagtatgctgaaatttgagcataagcctgtctgccaccttctctgctctatcttcaaagcctcctctgcgcccaaggcaaccatccaaagaatgaaagcccagaaatccagggtccacacatctcagcaaccacactgttgggaagtcctcccagatatttgactcaaatctgttctgctgcaccaagccccagttgcctcctgtttttcggggtgggggggcagtgagaagggtgacttcagggacttcaagaagtgggtcacatcactggggacctggcctttcccagggagcaagcagctgaacaataggagataaatgtgtgaaaacatttctgttactaaatatatcgacttcccaggaggacgagggtgctgacagggagcccacggccaccaccctggaggccacaatcctgtgtctcagaaaagctggggcgctccaaggagcagacaaggctgttccggctgtcctggaggctggggcagagggggtaggaggccggcataataaggggtgatggctcatttcttccaaccaaagctgccaagccctagccagctgatttgcatattgctttgtatttgtttgcacgccactttctggaaggggcccacattcttcagccactgcttctctctcatttccagggtctcttttgttcactgaacacccctttctcaagcaaggctgggtccctcagcaagctctggtcacgagcaccaggagagaccaagaagttgcaaacttacaataatgcctacacatcaagcctgttggagacaccttcacggaagaaagtgcttcctacagtctaggctcaattccccactcctctcctgctccaccacggcccagggcttccccccagcctggcacttcatgcctaggccactctgaactcctatagtgctaagtgaacaaaatcctgcttgcccttaccttgaggcctttgcaaatgctcttccatcttcctagtgctgtccctcaactcagcctgaagtggctcttccttataaggccagccccaatggcccctcctcctaaataccttcctgcgacattaacacaggtaggaaagactcggagcttccatccacgtggtcactggctctgtccatctgcccccaggggtgtcatgtttggtagggccagtgaacggctgctgaatgaatgaatgatgagtcctgatctccctcctctgttccctctccctggatgacttcactcactcacctatgggagagtcagaggctgacagtgcctctgcctccaattccccctcttgtcctctgagaccctccctttcacacgtacagcccactctcataaaaccaagagactcacagcccttctgcattggtaggaagttcttcctgctgtctgtcctcactcccttatttgaccatgcctgcttctttatcattatttttggagaggagtcagggcctgcacccatctcagatttttgttaataaaggctgcgcatttctcccactctctgcctagatgtgttcttgccactcctggatcattgtgccccagcctggccctacttcaggggacagtgacacaggacggagaaaggacataaggccaggctgggtagcctggagttgctgggccctgcggagaagacccaggacagatataaccaccacaagggaagggctgcccaggagggaagagatgaacatcctatgtccgggggtatacaaacagcaggctggatagatctgcagggcaagttgtagagagtactaaaacaactgctagaaaatgacccaaacgcccttactgtcttctcccacccagaggctgcactgagtcaggtgcctagccctgtgcctttcctacccaccttcacaaactgttccctctgctct

SEQ ID NO: 915308 - DNA, 4001 bp, Homo sapiens
gggattacaggcatgagccaccatgcctggcccagggcaggtttctagaacccaaatctgatcatgtctctcccctatataaaacctttctgggctccccagggctctctggataaagcctaagagtcctggatcttaaagttctattgaatgtgggtcctgcctgccccccactctatacagtgtcttcactgctccaggacatgcccagcccagggcctttgcttatgcagttcccaccccacccccacctgttagcatgacgttgatctctactgcttaattattctcaagctattttatgtctaagaagcttaggaagccccagagggcagagtcattattgcctatttcttttctgcatctttcccacagggtgtagaatgaattgtcctgagttcaaagaggcggtcatacattcagcccctccctgccctgcatcagtgggccatggtgtcccagctgtatcctcaattgccaggggaaggaaacagccacccacacacactcagatgaatacacacatatagatacacacacacaccagccacagaagcaccgatatacacactagcaccatgatcacacacccacaccagaatacttatacgcacacagccacatccacctccacacacagcaatgctattattcacacactaacaaatacacacacataaatgcacatggaacagataaaaaatgcacactgattcactctattttgcagacacaacacacataatatacaaactcaacctaatagacacacctacatacatatgcagaccaacctgcactcacactcagacacatgcgaataaactctcactcacacagggatgatcacaaactctgacaggctgctttacatccaaccaccaaggaccctagagctctacaggcccctctacacccaacatgtcccttacattccacatgtatacacacacacacacacacacataccctgcctaccacctcggcagcccttagtagaggggtgtcgccacggcgccccccactcacttgcacatgcacccccctgcacgtggacacacacgaggctggcaccatattccatctggctccgtagaaccctatcctgggacagacgctttggggtaaagtttcataaagtggtgtccctgaaccccaattcccaattccatggaaggtggttacctctaaccctctcttgctccagggccactcttattcatattttctccatctttccccctccccacctccttcacacacacatagccttggtgggccaagacactctccctctccgggtcctgaaccagcctattgcagccccgagagctcctcccaactacttggcagacctccccctccccacatacaccctcagcccttgaagaaccggttcaggttcattatcagcccctcctccaaccagcagccccttccatgggaccccagcctcatcacctactaggttgacgttagacaccctcattctgctcagaggtaacctgcccccaccccaggctgcagtctggcaacgcggggaggaggggtgcccaggaacaggatcgatccttccacgtggctcagctccatgccaaccccagctccttggagggactcccaggaccctgtctgtggcacctctcacagccgctcaccaccccagcccctcactatactcacggctcagccggtcgcgctgccgggtactgctggctcctgcagaggatggagtggccgcatgcctgccccatcactcctcatcgtccgcctccccagccagactaaggtggcacctcgccctgtccccgctgcctggagttcagggcagggcacccccagcaggcacagggaccaagagcagtgggctgccccctactcagcctggactcaacaccccaatccagctctgctgccccgctgctcccgcctctcccgctgccactgcctctgctgctcggctggctctgggaggaggttggagcaggtctgataatgcagaagggggagggaggagggaggaggaacagagagaggcccagacagagagggagagagggagagagggaggggtagagagagagtctgactgggagagaggaaaaaagactcacagacagagagactgagagataaacagagacaggaagggggacagtaacacatgaagagggagaggagagagggatcagagccttagcgagatcaagatggaagtacaaagagaccagagaggcatagagaaacacacacacagaggaacaaaggcagaaaaggaaaaaaaatcagaggcagaaatagaaagagagtggggtagggggaaaggggagtggctgacagaggagagaggggagaggacgagggatttacaatcctcatgggctaggatggggctggggacttgaggggcagcagacccagaccctctgctgccccatcgcagaagccttcaggatgaggggacacgcttgtgccctcaagtctgagagatcaggcctccatgcacagctagctgccctctcctctgggctccctcacccggtgtgtatcatctcctagcgtgcatcccagcctggagctgggtccacggaagacttagggggctttactgatggcctttggactcagagccttgtcacagggcccacctcttggtggcttggtttagctgggacttggagctgatgcgtgagcatggacttctaccaggatctgtggagacctaggccacagcctgccccacatggccttcgctgctcacagactacaggcatgggggaaggcctgttgcacccccaccctgcttccaaagaggactccctaggataaagctataacctagtgaaatagaggcattttaggccctaggacagatagagagttgtcacagcagagctactattgtatgcaggagaaacagctccacaccttgaggcaggaaatggggatttggatcctggcttcaccattaacttacttattcattggcctaccagtggctgagctcatggctcacactatcccttgtctcagagaagcactcgggctggggagtggggaggggagacttgcaggctgtgacagaaagaagcacagggtctgtgaagcccagagggacccctgacctagtttgggtggtgggggggcggttagcaagcatttctggaagagagggtccaagctgggtcttttaaggcagaagagggtatattccagggtagaggagctacagcaaaccctccacagcaaccccatctctctgagctgtggggagaatacctccccgccacacaacaggcttcaagcagagaagtccctgaggctgaatagaaacctgacccatgttgaagaacatgggggtgcacggtggagggggcaaggtcagaaatgactgagcttgtgtagatggcctgcccaggctgggtgctgcagaaagcagttgtcttgtggcctgggaagtgtcaggaaagaaaatatgaggagtctttgcttcccactgtggccccagaaggcatcatagaattttagatctctgaactctgggcaaaccattttctcaaagggaacgaggcccaggctggttgtaaagcagctgagccagcccagaactcatgtcttgcttctccacctcacctatcactggggcctcgctgctccattcctgacagctaggaaggcattctctgggctcaggaagctgcagccctggaccatggcgtcctgctccctcacagctccccttcatgtcctgggaacctgctcactggtcggaggaacctggcagcaagaagctgagtcagaagagttcaaaggagggttcctcctgggcatgcatgggtgcaggtgtgacgaggtctcacctggccctcagcctcctttctgccctcccacttcagaaacaatggtggtggcctcatcttcagaaatctcctgggaatacactcaagcaagcaggtggaagggaaggtctcctccccatcccactgccacaccagactcca

SEQ ID NO: 915309 - DNA, 4001 bp, Homo sapiens
tccaggaattaccaagtttaaagtttaaactgttaaaacagtctcctaattatgcaacaaatacaaagaacattgaattaatctgtaaaatattatattcacctatactgctgtcttttcatctaaattactctcatttgcaaagctcatgtcttgtaacgataaaatctcagatttttcctctcgattttcaataacgaaaccacactgattaaaactcatagatgtatcctctcattctaaaggctgtatgttatttttgggtaggcatcattataacagcaaacagataaatggcaccaaaaagacacatatcagaggatgccaaaagcgggagtagtcaatctattcaaccacaaatgattcacctcattcttctgcgaactcatctattgcatatacagtccttaaaaagtgccatgtgattagcgggctatttgatttctattcaatgacaaaagctacttgcttctgcatttttaaaaggcttcctgtattttaagaatcctttccagaataaaacattatttcctccccccccccccccgcaacacaccctttttccattctgaaagttaacatgctttgaaataagcgaattcaactcggaaactgcagcggtaaacccgaacccgctcgcgtcccagacctcgccttccagctaacatacctgttctctggaaatacaaggcaacgacggtctcctgaatattttgcaactgccatagtaactggctgcagtttctcctaacgacacgcagctggacctcctccggggtcggatcacaggcactttttcttcggcggcactggacagtcgaggatgaagaggcgcttccctgatttgaaagaagtgatccaaccccagggccagcaggcagccagcgccccccaccaggccggagagcagcggcctgagggcggagggcagcgacccgaggctggtgaaggagacccaccagacgaagctggccaggagcagcaccagaacgcagtgccggagccgcagcgggtgcgcgagcgtcagcagcagccctacgcagctcagcaccagcagcaacctgcccgctgccgcctccgggggcgtgtgcggggccgcggaccctgcgtcgccatccccccaaggccaagaccaccactgccacaccaagaagtcccccaggtaacagcaggcgggcagcgccagcagccaccaggagccgcagctccggcccgggccgggtccccgcttggtccgggtgaggaagcaggtgaggaagaagaaggcacaggcgatgctgaagagggggctcaagctgtgcgaacacacgctcagcagcgtccgcagccaggcggccccggcagcccagctctcgggttccgcgcccagcagcagggcgaggacaaaggcagccagggcgcccagcgagaggcgcgcccggcagaagggggagcagcgccgcggctgctggggagaggccggcggcggccgcagctccacgttgcagaagcggcagaggtggaagaagaagccgcgcggagggtcctgccgcaaggggctcacgcagctcttcacgtagccgttcctcagactctcggggggcgagccggccccatccggcggctgcagggaccgcatggctttggcgtctcgctcgtccctcctcatggctggggccgggggtggccacgggactcagcacaccccgctcgtaccgtagcggccgctcgcgctcccagaccccaacccccgcgttcggggcgccccctggttcgcaacccgtcagggctgcgccggccgccacggcccggggtccccaccgcgcggactgaggagcggcggagtccgggacatgctggctgaggagaggggcggaaggggcttctctccaggaccagtttagctgccgcctccttttccctcgggcacctctcgggactggagactcagtgtcgcctcccacctccgctggctgcaacagttacctcacggccccagcctggtccgttgggcgcgcgagcggcgggcgggcgctcctcccccgcgactgccccggccgggcgcgcgcccagcgcgcgctcacgacttgtcccgccgccacccgcgccgcggccgcccaacagggacgcgagccgggaccacgccgacccagcgtgcccaggccgaggaaagcgcggcggcggcagtccgaagacccaccgggactgaaagagaaggacgaggtcatcttcggacgggaggggcaagccagccatcctgggaccccaggcgtgcaggttctctttgagggtaagtcacggacacccagccagaatcccacaggtcactactggggtcttcgggaaagagggcgtttgtggtccccaaggggtgtgcttagtggggatgctgagctaagggtgggaggggaggggcgctgtctctaaccttagtccctttcagggtgggtcttcagactgtgaccagtttagggccagccaccaccaaggccatggcgaagaaaccctaatcgctgtggctagatctagcctcagaagcaacgtggattcttgggccacgcagcaggcccaggatccttgcagtggctcttagggaggaacgtgcacgtggagtgcactctagtagcactccacgtgcacgttcttgagtgttgctcaagaaccatcttcacaggcgaagaactaacgtctcgccttccattttgtacccttgtcatacatatccgccggttcacaacttgtatccccttccacacagcacagatttgctgtcgcaattggtctttgcaaattgaaggctttttcactgtaacagcactttctagatgggggagcggagagaactaggaatcctctccaagaccactccccagtttggatcagcaggccttgaaggaagccgaataagatgctatctgtgaagtactggtgaaactagcaacattaggaaacacagacctgaaagcgagaagaaaagaactttactacaccaaagggactgctctggaatctaaccaatcataactgccttagagagtgaactgtgtttccctccctaagctctcgcttcaacctcatgaccggactgcatttctcaaagagctaattccacatttttccaggcagatgagaaaccttactgtgtggtaaatcccacaaacaggcccatttttcaccaattaatctctgcccacagtcatgacctaaaacagaccattttcgtatatggtcatagttcacatgcatagcaaaaggcactaagaaattagcacaagaatttaaccaaaatgaaaaagttccagaattccctttcctttgcttttccttttctaatgtattacccaaatgcttgtcctaaaagataaaaattcaaaaggtcattttatccccatgacaagaaaaaaaatgctcatttcagcaaaactcagcaaatgtattttttatatgatgtgcatagaactcattaccaccagttgaagattaaagtaaaaaatggatacattttgagtttgtacagaagggcgtgacaaaactagcaccagcattattgaaattcccgttataaattccataggaaataataaattgatttgaaaattagaacaaattcagattaacaggtgtgtgtgtgtgcatgtgcgtgtatgtgtgtgggcatttaatctgaagttatcatctaaagtaggattggcacgtgatcatggaaacggtagggagtagaaatccagttttgtgagtttttgtctgggcctagccattcatactctgccattaagcaatcctataacttttactggccttgttcttctcaaatgtgaaatgaagcaattaatttagataacctttgaaatcctttctagtcttaaaaagctctgatttctgtatgccaaaaatacataggcatccttaagactcacctttcaggttgccaataatataataagagcaagagccaagagcaaccttttatattatttatactaccaaactaaaccaaagtctcagtgttgacaagtaaaaat

SEQ ID NO: 915310 - DNA, 4001 bp, Homo sapiens
tcatgcaaattacaagtggaattttactctatgtagctaaaaggacatataaagtgcaactaataacaaacctacaagatctgtccctagtggaaacattaaagagtaaagacaaaaaaccacacagtttggtgttgggcctaatccttaagtgtagtaaaaaaataaataaataaataaattacgtgcttttaactaagacagagagttaccaaaaatgcacggctggaatcttttacataaaaacgctatgaaaaagtaagatgactctgtggcttcccctgctacaaatctacaccacttcaggtgacgagtacactgatatccatagtctactcatcatcagataacataatgaaattttggtttccctgcaaagtccaaaagtcatttagtaaattccaaattaaggacataccaagaaagaaactgataagatggctaataggaatttaccaagacagtcaaatactgtcagctgaaactgtgaagccatcaacaattgcttgatggtctccttgggagatgtgttagtactttaagcaagcaggagagaaagatactgatgtaggaaaaaacaagatccaaaagcctatgggtcagttcaggtacatggcagaacagctaaaatttgctgggaacatcagctacagttttaggtggaggccccagaaagtaaataaactcagcttagggtctctggaaccagtgacccaggtgtcctctagagtaaaggaaaacaaacaagctggcttgggaccttgcttaggacagctgtttcaggagctgtgctccttgtagataattggaagccgcttctgcaaggaaactagcagcagaagcctggtgcccctgtggtactgatgaaaccccagaagccttggtctcctacactctgagcttctgagtcagggtgaacttcaataggaaagtcacttaggggacctaaagggcaataggctgcacactgccatttcccgaaaataaatagtaaattgtcactgttccagatataactgctagattgaaacgcacgatttctcctctcactcgtaaaaataaataaataaataaataaaatttaaataaacgtctatcacccagggaaagctactcttgactccttccacctatcaaaattgcctaagaaaggttgagtctgaccaaggggcggcgcagcttgcaactttcgccaactccgggatgaggcaccgcatcctggtaccagaggcttggacaccaaaatgacttctctagggtgcagcaaggtgagccacctggcttatcctatccccatcagcacgcgtcccacacctctcagtcccattccggaaatggagctctctcaggactggatacaggcaggagacctccctccccaaacaatgcattcagcccgagttcacattcaagattcaaaaagaaaggggaaaaacatagaaagaacaataacaatagcaaacatgatttttttttcagttaaaaaataaaatgagtctcttaccatctcgcctgaggttggcgttgcgcaaagctttgatggatgcgctctgcggggttgcagaagtgtcccgacagctgcaaaagtttgcgcagattagagtgtagacaaagatgagccggtgcatttgggatcagcgactagagacagcgtcgctccaagaaaaagccgggttctgctcccgggaccgacgccgcgccgccctgcgctctcgccgcctgcgctcgccctgcgctggcccgggtcgctgtgctaatcgccgagctctccccaaacttcctgcatgctgaactttccgagcgcgtgtgggtgccgcacttccttgtggtgctgagctgataaatggtgacgggacaaacaacaggttgacgtttgtttgttcgccccctccggtggccggcagctgcagcacaggctgcagggggcgggcagcgccgaatctagcggggcaggcgagcggagcagcagcgttctccagccccggccgcggcccctgagaggcgcgcactcgggctcagagcggcggcgcgagcacctcagctccccagtttcccaggccgggcctaaacctgctctgccactgagcatgcccagtttaatcgccggccgggactcttcccaccgccctgggctttaccctcctggttggacctgtaagggctcaggaaacaaactcgccaggaggaagtgggagagggtagaatcccagcacttcttcagaggtgactggcacatccacccacaagccacagctctccgccttgatggtggtgggatgtggggacagggactggagttgggagtgtttattttacaataaccaaaatgagactctacttagttaaaatttcactgtttatagtgaaaaaatacaatcacaaaggagcttaattccgagcttttctttgagctcccatcagtgtgacctttgggtgagtcaagggtaccttttcagggaataaaataaaaataaaagtatatcacccagagaaagctactcttgagtccctccatctatcaaaaatgcccgagaaaaggtcgagactgatggagggatggcgtagctttcacttttcgcgaactccaggatgagtcagggcatcctggtaccagagagtattggacaccaaaatgccttttctagggtgcagcaagatgaaccacctatcacacagggctgtagacgtgatgggccatgtggtgcagtgtacaataagggcaagaagtcttcacgagcgtttttatatgcactagctccagcccttccacaggaaagggcaacaggacagagtggggttgagcaggaacagactgagcaaggggaagaagttgcagaacactgtgctcacttgccttcacagtccataggaagaggcatgggtcgttgaggcttttgggattctccctactctgcgtctggaagctcagcagttgaaaggggctgcctctggtttacatcgtgtgtctgtctgcccatgggaggggactgtatttggaaaaggaatgagtccagactcgctgctcactggctttgtccccttgagcaaatcatctgatctttcgaaactcagtttatttatttgcaagagtagcaattgttaatttgtatggttgtggtgagaatgatgtgaaaaaatgtttagcatattgttttgtttgtagctgaatccaaatccaaatttatatgatttctcaattttccgctgatgagatctagaagagaaaattttcagtctttttcaggccttccagctcctgaaagtctggcatatggtaagtgatatccatacatagggaactttaagtggctgagaagggcaggaagttctggaaaaggtagccttgtcaagttattataccatccaacaaggacgagggttcatgtgtcccttcaacatagtcaaagatcaacatgtttcatctctattggctttttggcttaaaatggtattttacaaaatttaggtttgtgggccatgaaatcaacttcaataccagaataattgtttaaataaatggattggaatacaatagtttagaaatttaattatcagggttcattggagataataatattgttttatgaatattttgtttcagatacacgaacactacaatataatagttatttctttggggcatgatcaaaaaagtttgaaagcccctggaaaaaaagatctaattacattgtttcaggatatagtgaaaccctgggagagacactaaggatcatttattcattcaacaggtattaattaagcattagtttttccccttgtgttatgccctggtctaaaaatcttggggattaaattgtgaacaagaaataaagttcctaatctctttgagtttacattataatagaggaaagggaacataaacaagtaagtatgtaactgtgttaataagtgaaaaggggtagagatagatgggataggagtagggactaattgaaatatgtgatatcgttttttagaagtggttggaaatgctcattcaa

SEQ ID NO: 915311 - DNA, 4001 bp, Homo sapiens
ttcctctgtacagagagtctgtaacattttcaaagattctcaaaaggatctgcttgataaacaagattaagagcactcttcctagattatatccaatactaaacttttaatattccatgattttctaaggcagtgagtctcaaagctcattccattaaatgtcaaaataaaacatcaaaactcatccaacatttgtaaaatgcagattcctgagccccacaccagaccagaccgaatctctaggagctggaaaaaagtttaatttcaacaaacttggaggagggaagagaaggaattctgcacacactgttaaagcacctctgctccaaggaatatgttatgaaacattacaccaaaaatgaaataaattgttcccattaaggaacctttaggaaccccaatacactcatcttaccatatgactttgtgtgattttttttttctgagcctaaggtagctcagaatatgaaggcaacgtctactagacctatttaaattaaaattcattctgtagagtgccaggaacgatgattggcaggtaatacgtcacactaaaaaacgtcagtcctattctccatccccgcctccctccaaccttctcccaaaataaggaaaaataatacccggcctgccattttgcatactgttaaatactgcaagaattgtgttaactgcatcaatatcattactaaacaacaattttctataataaatttttggtatgatttatctcctaaatgtttgctctttcaagcgaatatttgcttgaaacattctcctggacctttgtctatcgtgatgccgtaggaatttacaaatttaagtcttccacgagtcatggcgtggggtaaaactcgactggcctcaatgaaaacacctcctaacagagagaggcctagagaataagtaagaactcccaacagtggcttttcaatctcggcaaccttgggcagctttttctcgtccgagacgtttgacaaccctaaagaaacctgagccttgattggaaagggggctgagggaggagagtttgggaaccctctctgcgcctcacaaataacccaaattccaaggcaaggtcacaaagccatacaaaccagggggcctagggcagagtcgagttctctcagctgccaagaaagcccttcacagcatgcattaggccaagtcggcggaccccaaccggagaaagaggaaagggaataaggagcccgcgcaccttcacacccaaaagcaggccctcaatcataactgcccctgtcccaggcccatcactcagctacacagagaagctgagcgagccccggccactcaccccgaagccactgcgtgctgtgaaaccatctccaattagctccgcggcttacagaccacccaagagcccccttcaccagccctacgcttcggcggccggggaagcccacaagataacgcagcagccgcggatcacagcccagcctccaggaggccgccatcttgacggccttctcactggctgcccgcagcacagcctgatgtccagcatcaaggccccgcctcccgcatggttggccacgcccccagacgctagcggtgcctttaggtctctcagacttgaacccccgccccccaacccagccccgcctccaaccacgttggccttgcctcccgggaagtcaggtgcgccgctggatatctcagccggcggggccttaccagaccccggcccccgccccgttcgccccgcccccgggctgccctcagcgccgcctgattgcatttgcggcctcgctgccgtatcccaggctaagcgccgcgcgcaaagccgtgcggagattggaggccgcgcgggtccctggtctgggccatgtctggctgtgatgctcgggagggagactgttgttcccggagatgcggcgcgcaggtaggggcggggccaccggtgcccggtattcccaggaggagaggcccaggcgggacccggcggctggagctgggcgcagggtagcgggccgggcgtttagctgcggggcggggtttcgggcctggccgttcgctaccccggcgcaccgcgaccttggcgttcggaagcaaggctgcgaggccccaggagatcagtggtctcgggcggggcgctccgatggcgggagctgggcgccaaacgttggaaagaagcaaataactgagagaggagagcgtttaggtgacctcaccgggtatttatcaggaaggcaggccagagaaggaatcgtgaagcaccgaagtggagctggggcgaagaccgcgccccccaagcttcttttctgcgccctgacgaccagttaggcgtttggggggacgtttggcactcgggagacgtttgccgaaccggagctgtgcctcagctgccagcgctttgcctttgagcagttgctccttgcctatctccgtttagatgaattgtgggatgatcatgggaacgattcttccttaagccgaagtcaaagggaaatccaccctcacgctgcatgtagttttcggtcatttacacaaaccaacagttttatggagcgccttctacacgctcagagatagggatacgtaagataaatggcccagggtctggagaactagacgaataagcagtttcagcacaatatgataaaccccacctaagaggcagggaaacccctcaaaattagtttccttattccccctatcttattcctcctatctatatctttcttagggttgaaaatcctaattaaaaagtagtaactcgcgggagatttcattgctaaacatttgtcaaccactttcttgtttgaataagtgacttccccaaattagcaaagacgactctgaaaatagaatgctgcataggcaagattggatgagagagagaagatcttggagacaggacaggtaactggagatcgttcctgggcaagtgtgtatggagaagtgtccgtaccctcaatcagtaaatcttagtgtaatgtcatcagaatgagcatcaaagagagccttaagggacccgagaataaactaggattctcaaaccaaacatggcccacagacagcttggtggacaggcatgttttttttttgctgcactcaatgttcatgaaaaatttgagccaacctttttttttttttttttttttttttgacacgttttgctcttgttgcccaggctggagtgcagtggcgtgatctcagctcactgcaacttctgcctccttggttcaagcgattttcctgcctcagcctcccaagtagctgggattacaggcgcatgtcaccacacccagttaatttttgtatttttagtagagactgggtttcaccatgttggccaggctggtctcgaactcgttatctcaggtgatccacccccctaagctgcccaaagtgctgggattacaggtgtaagccaccacgccctgccaagccaacatttcaaaatccagaatcatttcagcttcttttaaaacctcagaacacatggtgacattgggcccttattttttcatgggatctggattgcggttactagtgaacaccacctttacagagggtgctggccaggttaccacagcttccactactcacactggatttgcatatctagttaaatacatgagcccctctagatatttgtatttgtctggttttgtacaaatacataaaaacagcaataagaaaagttttaagaagtcataaaatttcattgtagttttagggggtcatgggcaatggaaagagacagtctctttggccttaaggaaggggaatgttcaactgtaagtgattaattcaacgaatatttagtgagcgcctactatgtgccaggcattgtggatttataagtgcaagctgcatctggttccttctcccctagaacatgctgtacagtggaagagacaaattagcaaagagacaaagatggtatgacaacatgacatagtttgacatatgacgatatgacttagatgggaaagttcaaggtagtttaggagtatacacttgaatgggttaga

SEQ ID NO: 915312 - DNA, 4001 bp, Homo sapiens
tgggtgacactgaagccaaaaccaccctcatctttcactatgtggcacagccggggccggacccctgggcctagggtgggacagaggtgggcatcttctcccagctgagctcgggccacgtcatgtgcatgccgtgccaatactgtcagcaacacccgagggctgctggcccggatgcggcgtaccacctggacagagggcacgtgggcgtgggtttggtctagaccctcttgccaacccccaggacctccctggaatccacatttttttgccaagggaatcggctttttttctttttcttttttttttttttttttgagatggagttttgctcttgtcgcccaggttggagtgcaatggtgcgatctcagctcaccgcaacctccgcctcccatgttcaagtgattctcctgcctcagccctcccgagtagctgggattacaggcgcctgccaccacgcccagctaatttctgtatttttagtagagacagggtcttgccatgttggccaggctggtcttgaactcctgaccttgggtgatccacctgccttggcctcccaaagtgctgggattacaggcgtgagccactgcgcccagcgggaatcggctttctagatgctttccctacccctctgacttgggcacttctaaatcctggggtgtgggggagtgaggcttgtgccctgctgccatactgcccaggggactgagcaacccgcttctctttctgaggtgctagcatgctctcctggaccacagccttaccaccgcatagtcttcgtgttccacaacatcattgttcaccgccaggatcctgtctccttcctgaagaccctggcgctgggcagaggtgcctgggtccaccctgcacaccacatgcccagccctgcccagctcctgctgcaggtggaagccaaaactcttgccctcctctttgctcagtaaacagaagcgaggccgctccaggctccagggatctggagggtgaggtgggcagcagaaaagggggaggagagggcacagcccaagtacaggttcgccgtgtgcctggcagaccctgtgtcctgatagggtgctgggcagtttctgcctggttgggtgttgggtggtggggttcgtgggcagagggactgggacaggagaaaacacccggcccctcctatctctactcccaaccaaggctgttatcagagggagaccgagtgagtggttaccaaggagatcggaggccgtgtggagccgtggtgcctccagggatagggaatggttgccagggggtgagggagttaccataggggtcgtggtcttcggccagggagaggacaggattatcaatgcccagctttgggttaaacttaaacttcctgcaaggaggcaggggaagcaggtacaagctggcagctggacttgggtcccaggatctcctttaggtgctaatggcagtgaagcgcttcgctgcctccaattatttcctccccttgccccaaccctcgtggcacttacagagttaacgaggctgtgtcctgcagatctactgggcaaagaagtgggtgagaggaggagagtcacattcttctccccagatgtgcctcttccattggcataaactaaaaggactcagggaaacccccaaactcagggcatgccccctcctttctgctccaaaggggtcttctcttctcactgccatacacacaggactattgtgcggtcccctccctttctctccccccaagtccttggcacataaatctgagcatatcagtacagggtgtggaccaggaagacagacatatcaactcattacttttctcctgacttgtttacctgcctcagggctccaagccccaaaatcaagtgtgccctggtcccaaagcttcagcctccaagtcggccccctgcctgtcccaaagtcccctgcagaggatttctcctggcctcctacctgcggctttctccatagctggatcagcaacccagtgcccggggtagggacaaggttcatcacagccactgatcctcccacccatcccctcccaggtcccgcctccttgaagacgctgtggaagcagtggggtaatggttaacgggagtgagagtctttttttttttttttttttttttttttttttgagaccgagtttagctcttgttgcccaggctggagtgcaatggcatgatcttggctcatcataacctctgcctcccaggttcaagcaattctcctgcctcagcctcccgagtagctgggattacaggcatgcaccaccacacctggctaattttgtatttttagtagagatggggtttctccatattagtcaggctggtctcaaactccccacctcaggtgatctgccctcatcggcctcccaaagtgctgggattacaggcgtcagccaccgtgccccgctgagagtcttatcctctggaaaactgtgtgggttcctcctgaatctatccctgggccccaactttttctggagaccctgaatctgacccagttgcccctctgtgcagagaaaggcagattgctggtcactaactccaagcctggggggtaagtgtgaaaagggtgataattctatggcccatagtatggtttggctgtgtccctacccaaatctcatcttgaattgcagctcccataactccctcgtgtcatgggaggtacccggtgggaggtaattaaatcacaggggcaggttttcccgtgctgttttcatgatagtgaataagtctcatgagatttgatggttttataaaggggagttccccggcacacactctcttgcctgctgctatgtaagatgtgactttgctcctcatttgccttctgccacgattgtgaggcctccccagctatgtggaactgtgagtcaattaaacctctttcgtttataaattttttttttgacagagtttcactcttgttctccaggctggagtgcagtggcactatctcggctcacggcaacctccacctcctgggttcaagcaatactcttgcttcagcctctcgagtagctgggattacaagcatgtgccatcacacccagctaattttgtatttttagtagagacgaggtctatccatgtcggtcaggctggtctcaaactcctgacctcaggtgatccgctcacctcggcctcccaaagtgctgggattacgggcgtgagtcaccatgcccagcctcctttataaattacttaccctgtcttgggtatgtctttattagcagcgtgagactggactaatacagcccagcatggccaacccccatgccaatatcttgttcatgggcccttccagcctccactgcctctgaacctagtgcccaagaaccacttgcaatagatcatggttggtagtttaaccagaaagaccaagaacagtgccctttcttggaagcaccaggcagtaaagaagaggccacaattggtagaaggcacacggctttttaatagcagcaagtcaggtgcatctgcctcgaggggctaccaagccatcataccattgtggcaaagggggcatgaggatgaggagaaagcaccaatgtgagggcatcctcggtgtccacaggtgagcataaggcaggaggggaagcttccaacacatctggatggcgacacccctggcatggcagacataagatgtgagccccttggtgacacagtcagaggctctttgagaggagggggaggcaaggttggtagtggtgcttcagggcactctggccatccaaatgccacatgctttggtccttctagctgaatggagaggaggcatgttccatctccaagcccgaagcattgattcaccatctttaacttggagattccagactcagtcctggtcaaacatgccctaggagggcaactggctcagctatgcccattcctctgcctccagacctgaaggaatctttctagagggagcagtgcaagccaggaggccacagagggaaaaggtttagggccagtggtcacatagctagg

SEQ ID NO: 915313 - DNA, 4001 bp, Homo sapiens
gcctcggtttcctcacctccttcctcacagcatctttgtgaagattgaaatgaaataatgtccatgaaagggcttggcacaggcctgcctcccagaacactcgatatgtgctaggcgctgttctatgtactttacagaaatcacctcattcatttcttccaacaaccctctgaggaagggattattatcatccccatttgcaaaacaggggaaacagaggcacagggaagttcagcaacttgcagaggcaggatttgaaccaagcagttttgctggagaaccagagttcttcaccccacaccacacacactaggtgctttaggaaaggcagctggtgttaacatttttctcatctgatcaggaagttgggtggttagagttgtcacagtactttgtgaaaaatgggaagataaaataataattatgaattgaggtgggtttggtcaattttgtctttcagctaggaaggtgaggagggacaaacagctgaaggccctatgtggggggaggaggggtcgggcccttgttctggctgcgttgggtgggtgtctggtgcttcaccccttctaggccagggatgctcaccccaggacgatgagttcaccatacttgatgggctcctcgcctggctgcgcatcttcaccgggagaggagagaacgcaagagcccttgttcccccggtgctggaggtctgaggttcggggggaccccacttcagggtttccttccagcaccattctgggcagagtgggagagaaaagagctttgtaggttcccaccccagcccggctcaattccagctgcagcctgctgcagggccgcctaggctaaggcaagggtgacctttcaccgcctctactgctatggcaaccacttcccctctgcctcctctaaactgcccgaggttgctgggataccagggaggggtggcacagtgaagagagtcaggatattcagtggtgccaaagagatggaccaacttggggtggccagaggctgctttttggccaagatcccagtctgggatgtgcttcaaagcggggcacccaatgagttgggggccgttacccctcatctcagactcagttcctgcttatagctcttagcctctggacctctgatttagcctctctgacaggttctttgaatctacctgtccatctgaatctttcttgcccctttgaggtctaggcctctgtctgtccatctgctttctcaatgactctctgtcctcccagccgctgtcctttttgccgtctctctccccccattccccatctctgcctgtctgcccgcctccgcctcaccatctgcctcagtctccccatctcggcctccccctgcgggtaggccaatagactcctcctgggtgcgcgctcttccctccctcaggtgtctgtctgcgtccccagccgcccgggtctcaggaggcctgcggaggcggcgctcccccctcgagctcgggctgcagcacagccgtctcccgcaggcagcccgtttggaaaacatccccgcgccagagggaccgcgccggggcaggcccgcgccctgcgccccgggcgggcagaacgggaaccgcggcccagcacctacgcaggtccacacccggcggcccctccgcacaacacgcgcgcgtgcacggccccgcacgccccgggcccggacggcgcagagaccacccgcacccgcgaccgcagggacgcgcgggcgcgcagcagccaccggcgcccgccctcggacccactccctccaccacccccagacacgcaaacacgccccccgcgcccgccggggcccgcctggcgcagcccccgccccctccgccccggcggcctcacctggccacgctccgggccccgctgggcgccgctccctccccgcctagcccctgctcggccccgggccgctgcggcgggatgggcccggcccgcggcggctccgcgctgcctcgtcacggggacacccagggccgggggagggggatgagcgcgaacagccacgctccgccccctgtccggaggccccgccccattttccccgcccctaggagagctccgcctcgctccagactccgcctcttgcggcgatgctcagccttcgtaggcggagctccgccccttcgcaggagaccacgcccttcccctggtaccgccctctgaccagggaagccccgctctccactccgtctgagggactcccttgcccctcctagccggctcaggactcccccgtagtctacacgacccctcccccatttcagactccccaaactccgcctccatttccggggactccggggttctcccagagacatgggcgcccctccccactgtcggtcagggccctcacacggcgctggaggccccttccctagccttaggcccgggactacgcacccccagctccgacaccccgcctaccatctggggacgccacgcaattagaggagaggaggaaaatgctaaaggcaaagggggtgtgcggcagcggtggaggccggggaaagcagctgcagttgaccagagtcgcagacctgtcttccagcccagctcgggcaccccccattcccctcccctcagtcccctcccctccgccaggatgcacacaccccccgctgtgctgcaaaggaaagagagttttgggggagcaccgccccttctgggcctggggcttgcgagagatctatcagtctacgttaggcgctgtgcgctgtgctttgagcaaattaaaccctttactttaatcctgggaggcaggcacgatagttgcccattttacagatgaggaaatagatttacaaaagtgacttgcttgttgtagtttgctagaaacgggccaagagagaatctcagctgtatgagtggcttcagtctcaactcctaacttcgtaccttgtcgttctgactagggatggagcctcagaggtgcagaagagaaaccttgtctgcatcaggtaaggtccctattgctcagtactcttggtctggaactataaaggctggattatagttccagatcaagtctttggtcttgtggggggcggtgggggtgtttaatgagaaaatcaaggaagactgcacagaggaggtggcttttgacttccattatgaaggatgcatgtttagtttgcctaaacattcctgagagggagccgctgccactcccacccccacaaacttgttgcacctgaagttccccatctaccagactcccctggggccctactatatccaccccgctaactcctccacctaaaaatagccaaagataccaactgctttgccaactgttctggggcccagcggctagatgaaacaagaaagcagccgacggcacatcctttaggggaaaagacactcgttagtcacagagaatctccctgcgagacttccaccaagcaggacaccaccagaccgctgggctgctggctgcaggtcacacaaaccctgtgacacaggatagctgccctcactgatgccaccagaggcgtccattgtgctgggtgtgcacggggaccctgggacagcctcactcccttgtgtacccccagcttttaatgcattgcctgccagagcaggtcctcagtgaatatatactgaatccctgttataatccccaatttacacaccaggaagctgaggctcaggcagaagaagaaacttgccccaggtcacaagccaggcagatgtggagctgatgcttcacaggagccccagtgcttccacctgacactggactgcatggaggaaggtctgagagggatcaccaagactcactggaggaggaggcagggatttctcctggggcagtactgggattggagctgcatggtggcacagccagaccatcaggcctcagggaggctgaggtgggcccgacaccaggattgcccaagtaagggagaggaagggagagttaggacaccagtagcagatgcctaagttccaaccttggcttctggctctaaatccagcgctctgctccaagaactccagcttctt

SEQ ID NO: 915314 - DNA, 4001 bp, Homo sapiens
tgggtgggtgtctggtgcttcaccccttctaggccagggatgctcaccccaggacgatgagttcaccatacttgatgggctcctcgcctggctgcgcatcttcaccgggagaggagagaacgcaagagcccttgttcccccggtgctggaggtctgaggttcggggggaccccacttcagggtttccttccagcaccattctgggcagagtgggagagaaaagagctttgtaggttcccaccccagcccggctcaattccagctgcagcctgctgcagggccgcctaggctaaggcaagggtgacctttcaccgcctctactgctatggcaaccacttcccctctgcctcctctaaactgcccgaggttgctgggataccagggaggggtggcacagtgaagagagtcaggatattcagtggtgccaaagagatggaccaacttggggtggccagaggctgctttttggccaagatcccagtctgggatgtgcttcaaagcggggcacccaatgagttgggggccgttacccctcatctcagactcagttcctgcttatagctcttagcctctggacctctgatttagcctctctgacaggttctttgaatctacctgtccatctgaatctttcttgcccctttgaggtctaggcctctgtctgtccatctgctttctcaatgactctctgtcctcccagccgctgtcctttttgccgtctctctccccccattccccatctctgcctgtctgcccgcctccgcctcaccatctgcctcagtctccccatctcggcctccccctgcgggtaggccaatagactcctcctgggtgcgcgctcttccctccctcaggtgtctgtctgcgtccccagccgcccgggtctcaggaggcctgcggaggcggcgctcccccctcgagctcgggctgcagcacagccgtctcccgcaggcagcccgtttggaaaacatccccgcgccagagggaccgcgccggggcaggcccgcgccctgcgccccgggcgggcagaacgggaaccgcggcccagcacctacgcaggtccacacccggcggcccctccgcacaacacgcgcgcgtgcacggccccgcacgccccgggcccggacggcgcagagaccacccgcacccgcgaccgcagggacgcgcgggcgcgcagcagccaccggcgcccgccctcggacccactccctccaccacccccagacacgcaaacacgccccccgcgcccgccggggcccgcctggcgcagcccccgccccctccgccccggcggcctcacctggccacgctccgggccccgctgggcgccgctccctccccgcctagcccctgctcggccccgggccgctgcggcgggatgggcccggcccgcggcggctccgcgctgcctcgtcacggggacacccagggccgggggagggggatgagcgcgaacagccacgctccgccccctgtccggaggccccgccccattttccccgcccctaggagagctccgcctcgctccagactccgcctcttgcggcgatgctcagccttcgtaggcggagctccgccccttcgcaggagaccacgcccttcccctggtaccgccctctgaccagggaagccccgctctccactccgtctgagggactcccttgcccctcctagccggctcaggactcccccgtagtctacacgacccctcccccatttcagactccccaaactccgcctccatttccggggactccggggttctcccagagacatgggcgcccctccccactgtcggtcagggccctcacacggcgctggaggccccttccctagccttaggcccgggactacgcacccccagctccgacaccccgcctaccatctggggacgccacgcaattagaggagaggaggaaaatgctaaaggcaaagggggtgtgcggcagcggtggaggccggggaaagcagctgcagttgaccagagtcgcagacctgtcttccagcccagctcgggcaccccccattcccctcccctcagtcccctcccctccgccaggatgcacacaccccccgctgtgctgcaaaggaaagagagttttgggggagcaccgccccttctgggcctggggcttgcgagagatctatcagtctacgttaggcgctgtgcgctgtgctttgagcaaattaaaccctttactttaatcctgggaggcaggcacgatagttgcccattttacagatgaggaaatagatttacaaaagtgacttgcttgttgtagtttgctagaaacgggccaagagagaatctcagctgtatgagtggcttcagtctcaactcctaacttcgtaccttgtcgttctgactagggatggagcctcagaggtgcagaagagaaaccttgtctgcatcaggtaaggtccctattgctcagtactcttggtctggaactataaaggctggattatagttccagatcaagtctttggtcttgtggggggcggtgggggtgtttaatgagaaaatcaaggaagactgcacagaggaggtggcttttgacttccattatgaaggatgcatgtttagtttgcctaaacattcctgagagggagccgctgccactcccacccccacaaacttgttgcacctgaagttccccatctaccagactcccctggggccctactatatccaccccgctaactcctccacctaaaaatagccaaagataccaactgctttgccaactgttctggggcccagcggctagatgaaacaagaaagcagccgacggcacatcctttaggggaaaagacactcgttagtcacagagaatctccctgcgagacttccaccaagcaggacaccaccagaccgctgggctgctggctgcaggtcacacaaaccctgtgacacaggatagctgccctcactgatgccaccagaggcgtccattgtgctgggtgtgcacggggaccctgggacagcctcactcccttgtgtacccccagcttttaatgcattgcctgccagagcaggtcctcagtgaatatatactgaatccctgttataatccccaatttacacaccaggaagctgaggctcaggcagaagaagaaacttgccccaggtcacaagccaggcagatgtggagctgatgcttcacaggagccccagtgcttccacctgacactggactgcatggaggaaggtctgagagggatcaccaagactcactggaggaggaggcagggatttctcctggggcagtactgggattggagctgcatggtggcacagccagaccatcaggcctcagggaggctgaggtgggcccgacaccaggattgcccaagtaagggagaggaagggagagttaggacaccagtagcagatgcctaagttccaaccttggcttctggctctaaatccagcgctctgctccaagaactccagcttcttaatctcactaagcttcagtttccttatgtgtaaaatgggaataataatgatacttgtggtgaataggattttgcagtattgctttgaaattcctttgtcaaccctcccttttctctcttcaatctagatcttgtccctgttggttcaaagaaaggaataaaatagaaactttatttctttcttaaaaaattttattattattatactttaagttttagggtacatgtgcacaacgtgcaggtttgttacatatgtatacatgtgccatgttggtgtgctgcacccattaactcatcatttagcattaggtatatctcctaatgctatccctcccccctcctcccaccctacaacggttcccggtgtgtgatgttccccttcctgtgtccatgtgttctcattgttcaattcccatctatgagtgagaaaatgtggtgtttggttttttgtccttgcgatagtttgctgagaatgatggtttccagcttcatccatgtcccctacaaaggacatgaactcatcattttttatggctgca

SEQ ID NO: 915315 - DNA, 4001 bp, Homo sapiens
tgtctcatactccatgagacatgtgctgcacgcatgggctagctgctactatttcattcctgagtccccatgcttcccaccctgttcttggcagaattctcaccacaggcaactttttccgaagctccttccgtaggatcccgtcattgagcagcacaagcaggttagaggcagagtacactgaggggtagagagtggccttgagaggctggctctgcagcctccatccctctcaccttctccccagagctgcagggatcacctgtcacatgctctgctcagacacccacagactatgtggaaaccaaccttcttctccacccacttcctcagcactcccctctccccaacatgatctcacaagggtggctggaccaagaaaggatgggtcaatctcagtgacaagccagttactgccctgctggatggcactggtcatccagctgcccacaactgcccatcgctctctgaactgccacagatacacggtcccacctcctggccctttctctcttggcagcctgttcctgagggtctattccacctccacttttcttttttctgagtcggagtttcactcttgttgcccaggctggagtgcaatggcacaatctcggctcactgcaacctctgcctcccaggttcaagcaattctcctgcctcagcctctcaagtagctgggactacaggcacctgctaccatgcccagctaatttttgtatttttagtagagatggggtttcaccatgttggccaggctggtctcgaactcctgacctcacgtgatccacctgcctctgcctcccaaagtgctgggattacaagtgtgagccactgcacctggcctcacctctgcttttcaaaacccagtgcattctttcaggactgtgacagcagtcactgggcaaacactcttgaggtagttacaatctgggaatcctggaatctgggagatctagacttgaatcttggttctgggaccatcagtgactgttctctaacctcactgagcttcttccttaaatggacagtgatgacaataagtaccacttaatatgactgtagggaggattaacaagtaaaggtaagaaaggcacttagtccagcgcctggccagtagtgaatactcagataaggtccccagacgtgtctcttgacttagggacatggagggcccaggacaatgaacaacagaccttgtgccgattcagtcatagcacaaggtgtctaacgggcagcccaggtcctcgggctggggtgctcaccctctctggggaactcaccaggggccaggcagccgatcccccatcccccacccccagagcccggctcacccagctctgacagctcgtgcgaatcggcgaatcgacctggggagagggtacagaaggaggtgtgagtgagcatctgcctcacatttcgtcttcgggtcccggaaatcccctccctacgccctttgggaacctggacgggtcttctcaagcacagcgatcactaccctgactccgcagggaagggggccactggggtcataggtcagggcccagaaggaactgatcaaaggtcagggtggcacctgccagcaggtaactgaagccccgcactgctgtctccagctgggccgtggcggccgggtgacgagtcacgtactcctggtagcggaggcccaggagccgcagcttctccatcctgccctcggcaccgacagacccacagaaggaccgtacgacaggctgcggcgccctgcttcctgcgccctccttcctgcttccggtcttaggcccgcctcttggttgcttaacttccgcgggccagaaggctgaggacttgaagaaccggtgaaccacccttcaccccatctcttgaaccgcttcccactcgggtagcccttagcaactgagggcccaaacccggccccctactccctcaagtcattggttagcacgctctccgcccctgacccgcccagcgccgtcagcacccagctcttccgtttaccgggttggctgcccttgcgcctgcgcagttaaagctccggtaaagccgggcggcagtcagagcagttcattctagagaagggagctggagccccgagtctttccaatggaacgccgagagactcgaacggcagggccggattttaaagggctgagagatagcgggtgcttgaaaaaaggagcctcgatcagatttggggaggtgcggggcgtctaaatacagttgcactgtgtctcagcaggcgcgcgttcggccagtatccccatctccgtttcctcaacaaaggtagtgctggggaaactgaggcagtaaggagtccagccctctagtgccgtctcgatcccctagacagcacagttagtgctccggcttcggcctcagctcccgtatggactgtgccccccaaagggctcgcgcctgcattcccacatacgcgaagaaagccctggcccgggcttctctcggctcggtggcccttgggcgggagtatcccttctctgggtctcggatttcccgatctgtaaaatggtttgagggcagacttgatccttgaactcagaatcgatctcagctttctggccctcggacgcacctcgcagtcctcagctgcgcccccaagggaaggggagacccctggggagtatcttcccaaaccaagcagcctccctggaacgggtggcaccgggagatctgcggcgagtggtggagggaacgggcgctctggggaggtagcgctgattggctgcggggaaaggggcgtgacatgggtggagccgtgggccagtggcctgagggagcgggccagcggatttatggtaccctgagaatagtaatacattattttacctaatcctctccaccagatatctccagatgaagaaagcatccttttaagaacgcccagccaaaatttgagtgttggtcttttctgacctcagagactaggcggttttttttaattcattttttttaactttaattttatttttagagaccaggtctaagcatcacacctcaccaggaaaccacaaccttccttccactccctcactccaccctactccacagcttagttttcttctctatcaggtgggggattaaagctgccctcttctcacatcaaagaacgaagacccagggaaaggtgaccaggggcctgaggagaggcaaaggtcttggagaacagaggaggtggtcatgggcatcgtcgacatcatttctggccacgctctgggttccaggcttgcttgccctcctcccagcagccccaagttgctatgaactgttcacagatgggaaattagggcccaataaggaggggaaaggatttgtcccacatggcacagcaaggcactggccaaagaggccacagcgcaggtctccagtggcagtgccctctctcctactgcccacagcccacaaaagctgtgacatgttgaggctccttggtcataaggccagttagcaactgggattaggacctaggctcagggccctcaaggtgaggctccttctcccttcctctgccccaccttgttttttgtttgtttgtttgtttgtttttgagacggagtctcactgtcgcccaggctggagtgcaatggtgcaatctcagctcactgcaaactttgcctcccaggttcaagcaattctcctgcctcagcctcccgattagctgggcctacaggcgcccgccaccacgcctgactaatttttgtatttttagtagagacgaggtttcgccatgttggccaggctggtctcgaacttctgacctcaggtgatccgcttacctcagcctcctaaagtgctgggattataggtgtgagccactgagccctgcagggccctgctgtgcaccaacaccttagtgaacttgttcctcaaacctccagtttggccactcctccagccctccctctgcagctgtggagagggtacagagagagaatttgaggttcttcagcactccttgggctggaggtcctgattctgagagcaag

SEQ ID NO: 915316 - DNA, 4001 bp, Homo sapiens
ccctctcaatctttttgttccccatagtccaattaattaatttgtcatggtcctcatcattatctgaaattctcttacatggttgtttatttgtcatcccctttagagtataagctccaggaactttgattattcaccatcattttggcaacttgcatagcctctggcacatagagaggtgccaatatttgttaaatatttgtgaactaaataaatgcgctaattaagcctcttaccaagggcctggcagaccccatgctaagcactccagaaaacatgatcgtgttaattcctggcaacatcctctgacggtagatattagtggttctgttttccagaccaagacacaggctcagagtatttaaatgacttggccaaggtcctgtggcttagaggcactaggacccatatttgcaccaggtctgctggatggcagaggccagtctctgaaccacgggcatcactgctttgtgccctgtgccctgtgccagtcacagaggggacatacaatatctgcaggagggcagggtgtttgctatcggatctcaaataataaagtcagggtgatctttctgaaactcagatctgatcttgtcacacccctgtttaagataaatcagaggcagttaggatggagcctctctgcgtccacccctcggctcctcggaccgcagtctgcagcacccttcttccctccctctcggctccccttcaaaggcactgtgctcccgcctgctacagggtttggcacaagggatcaggctatgcggagttctgtcttgttgtcttggaaactgccgctcttcctgcgtggctccagggaggctccctgcccaagtggcagactctcgcagtgtgacaccgtcactctgtagtcctcctgctgcctgttcctttcattgctttgcgagaccccttgatgactgtgtttgtctcctaggctatgagtttgctcactgctgtctccccctgagcccagcacaggccctgaaatagaatgaggcgctcagagaaattaacattgcatgaacgagtgaacgaatgaatgaatgaactctgactgtgagctttcctgcctgccctgggccactgacatctagggggcagactctgggtcactgcctggagccacagagcccaggcccgtcctccaagacccctgggacaccctctttcctgcgggccaagtcctcagagctggccccaccacttgcccgcacactcacatccaggtagttctccaggggctgttcatctaccagggtgggagccttccactgggggaagtactttctggctgggttgaggttgtgcttcttcaggaagtccttcagcaggccacgctcggacagggtgcgcctcaaggacttctttctgatgagggggaccctgtggtttggagaaggaagaggaattaggcaaggattctgctgaccgggtgctgtggcagccccagaagggaagggaagctggtctaagagaggaagaaggaaggaaaggagacgccccctcttctgcccaacaatgcaaagaagttaagttgactagtgctggagctgggagccaaacccaggctggactcttaaccagctgatctaagagaggaagatggaaggaagggagaagctcccacttctgccccataatgcaaagaagttaagctgactagggctggagctgggaaccacagtcaggctgggcccgagttttaaccatgtctgcagggctgcctcccaaaaaggcagagagagaggcggaaaagggggatggagacagctgaatagagagggagaaaaaagggaagaaggaagacacgggaggaaagaaaggtgatgtgggaggcagcgtcttcacacccacaccacccggactcacttgtacatgatgcactcagagagtgccaccagacccagcagcagcagccacttcatggttcttcccgggtcccaactcgagggagaaggcaagacgggaggaaggtgcagagcagcagcatgagctgccccttatatacaagttgggtcccgccttatcggcctctgaaagtcaccggttcccctgatcccaaacagagaagctcctgataagattgtggctgccctaagccacattctgagatctttccagctgaggcactttccactataactttgcaccatggggaggggggagggtgccatggggatggacccgcagagagagagaggagcaatgaccgggaggcttttttctttcttttttcttttctttttttttctttctttttctttctaagcaatgacctggaagcttatttgttttcttttcctttgtttcctttcttttctttcctttctttccttctttctctttctctctttccttccttccttccctccttccttcctttcctttctttccttactttcctgacggagttttgctctgtcgcgccgccagaggcttatttctgaagcattgacaagggcctacgttaaaactttaccagctgagcattttgacaaagttggttaaaagtgcgtttaacacagcattggagagatgtgaaggagccccaggtggcctgatttgtcccagagggcatgcagctggggttcttagagagcagcccccgactcagtcataggtggtactggttgtggtcactgcttattcacagcacattggggggtcagtcgtttgggtctcaggacacaattccccacataagtgtcattgtgtggggttgttgggcgtctgactagcctatgggccttgtggcttgcttttggtgcaactgggctgagtctgggaaggagatgtgcacagtacacgggggaggagggagacagcaccgggagaatgctgccttcccttcctggaggaggcaaacttcagacaggccaggtatgtctttggaatctgtgtccctccctttctgcaccccttctctttcttttgctcctttcccaccctctccacctttgagatcccacctgggtctgatttctccaggtgctccaggcttacaactgggttgaaatcagctacaatggagtgaagcaatctgggcaaacaattcatactcatgggtgagtgacttagaaagaggatgcttggccgggcgccgtggctcacgcttgtaatcccagtactttgggagggtgaggcaggtgaatcacctgaggttaggagttcaagaccagcctggccaacatagtgaaaccccgtctctactaaaagtagaaaagttagctgggcatggtggtgggcgcctgtaatcccagctactggggaggctgaggcaggagaatcgcttgaacctgggaggcagaggttgtgagaggtgaagccctctgggcttctgagtcgggtggggacttggagaacttttgtgtttagctaaaggattgtaaattcaccaatcagcactctgtgtctagccaaaggtttgtaaacacaccagtcagcactctgtgtctagctaatggggtggggacttggagaacttttgtgtctggctaaaggattgtaaatgcaccaagcagcactgtgtctagctgaaggcttgtaaatgcaccaatcagcattctgtgtctagagaatcaggtggggaattggagaacttttgtgtgtagctaaaggattgtaaatgcaccaatcagttctctgtaaaatggaccaatcagcaggatgtgtgtggcgccaaataagggactaaaagcaagccactggagccaacagtggcaacctgctcgggacatcttccaggctgtggaagctttgttctttcgctcttcacaataaatcttgctgctactcactccttgggtctgcactactgttatgagctgtaacactcaccgcgaaggtctgcagtttcattccggaagccagcgagatcacgaacccaccgggaggaataaacaactctggacgcgccacctttaagagctgttacactcaccgcgaaggtctgcagcttcactcctgaagccagcgagaccacaaaccaactggga

SEQ ID NO: 915317 - DNA, 4001 bp, Homo sapiens
atttgccccctctcaatcttcttgttccccatgctcccattaattaatttgccaaggcccttatcattacctgaaattatcttacatggttgtttatttgttatcccctttagagtataagctccaggaactttgattattcaccatcattttggcaacttgcatagcctctggcacatagagaggtgccaatatttgttaaatatttgtgaactaaataaatgcgctaattaagcctcttaccaagggcctggcagaccccatgctaagcactccagaaaacatgatcgtgttaattcctggcaacatcctctgacggtagatattagtggttctgttttccagaccaagacacaggctcagagtatttaaatgacttggccaaggtcctgtggcttagaggcactaggacccatatttgcaccaggtctgctggatggcagaggccagtctctgaaccacaggcatcactgctttgtgccctgtgccagtcacagaggggacatacaatatctgcaggagggcagggtgtttgctatcgggtctcaaataacaaagtcagggtgatctttctgaaactcagatctgatcttgtcatccccctgtttaagataaatcagaggcagttaggatggagcctctctgcgtccacccctcagttcctcggaccgcagtctgcagcacccttcttccctccctctcggctccccttcaaaggcactgtgctcccgcctgctacagggtttggcacaagggatcaggctatgcggagttctgtcttgttctcttggaaactcctgctcttcctgcgtggctccagggaggctccctgcccaagtggcagactctcgcagtgtgacaccgtcactctgtagtcctcctgctgcctgttcttttcattggtttgcgagaccccttgatgactgtgtttgtctcctaggctatgagtttgctcactgctgtctccccctgagcccagcacaggccctgaaatagaatgaggcgctcagagaaattaacattgcatgaacgagtgaacgaatgaatgaatgaactctgactgtgagctttcctgcctgccctgggccactgacatctagggggcagactctgggtcactgcctggagccacagagcccaggcccgtcctccaagacccctgggacaccctctttcctgcgggccaagtcctcagagctggccccaccacttgcccgcacactcacatccaggtagttctccaggggctgttcatctaccagggtgggagcctcccactgggggaagtactttctggctgggttgaggttgtgcttcttcaggaagtccttcagcaggccacgctcggacagggtgcgcctcaaggacttctttctgatgagggggaccctgtggtttggagaaggaagaggaattaggcaaggattctgctgaccgggtgctgtggcagccccagaagggaagggaagctggtctaagagaggaagaaggaaggaaaggagacgccccctcttctgcccaacaatgcaaagaagttaagttgactagtgctggagctgggagccaaacccaggctggactcttaaccagctgatctaagagaggaagatggaaggaagggagaagctcccacttctgccccataatgcaaagaagttaagctgactagggctggagctgggaaccacagtcaggctgggcccgagttttaaccatgtctgcagggctgcctcccaaaaaggcagagagagaggcggaaaagggggatggagacagctgaagagagagagaaaaaaaagggaagaaggaagacacgggaggaaagaaaggtgatgtgggaggcagcgtcttcacacccacaccacccggactcacttgtacatgatgcactcagagagcgccaccagacccagcagcagcagccacttcatggttcttcccgggtcccaactcgagggagaaggcaagatgggaggaaggtgcagagcagcagcatgagctgccccttatatacaagttgggtcccgccttatcggcctctgaaagtcaccggttcccctgatcccaaacagagaagctcctgataagattgtggctgccctgagccacattctgagacctttccagctgaggcactttccattgtaaccttgcaccatggggaggggggagggtgccatgggggtggacccgcagagagagagaggagcaatgaccgggaggctattttcttttcttttctttttctttcttttctttctttcttttttctttttctttctaagcaatgacctggaggcttatttgttttcttttcctttctttcctttcttttctttccttcctttccttctttctttccctttctttctttttctttctttcttttctttctttctctttctctctttctctctctctctctctttctttctttctttctttcttttcctctctttctccctttctccctttctccatttctttcctttctttcctgagggagttttgctctgtcgcgccgccagaggcttatttctgaagcattgacaagggcctacgttaaaactttaccagctgagcattttgacaaagttggttaaaagtgcgtttaacacagcattggagagatgtgaaggagccccaggtggcctgatttgtcccagagggcatgcagctggggttcttagagagcagcctcccgactcagtcataggtggtactggttgtggtcactgcttattcacagcacattgggggggtcagtcgtttgggactcaggacacaattccccacataagtgtcattgtgtggggttgttgggcgtctgactagcctatgggccttgtggcttgcttttggtgcaactgggctgagtctgggaaggagatgtgcacagtacacgggggaggagggagacagcaccgggagaatgctgccttcccttcctggaggaggcaaacttcagacaggccaggtatgtctttggaatctgtgtccctccctttctgcaccgcttctctttcttttgctcctttcccaccctctccacctttgagatcccacctgggtctgatttctccaggtgctccaggcttacaactgggttgaaatcagctacaatggagcgaagcaatctgggcaaacaattcatactcatgggtgagtgacttagaaagaggatgcttggccgggcgccgtggctcacgcttgtaatcccagtactttgggaggctaagacaggtgaatcacctgaggttaggagttcaagaccagcctggccaacatagtgaaaccccgtctctactaaaagtagaaaagttagctgggcatggtggtgggcgcctgtaatcccagctactgggtaggctgaggcaggagaatcacttgaacccaggaggcagaggttatgagaggtgaagccgtctgggcttctgagtcgattagggacttggagaactttcgtgtctagctaaaggattgtaaatgcaccaatcaacattgtgtgtctagctaaaggcttgtaaatgcaccagtcagcactctgtgtctagctgaagggtttgtaaatgcaccagtaagcaccagctattacactccccgcgaaggtctgcagcttcactcctgaagccagtgagagcacgaacccaccagaaggaagaaactctggacacatctgaacatctgaaggaacaaactccggacacaccatcttgaagaactgtaacactgatcgcgagggtccacggcttcattcttgaagtcagtgagaccaagaacccaccggaaggaaccaattcaggacatagttgcaatgagacgagatcttgcctctgtactccagcctgcgtgacagagctagactccgtctcaaacaaaacaacaacaataacaaaaaaaaaaagacaaaagaaaaaagaaagaggatccttaccaacccaatggatcctccactttgtgagcttttattcagtgaagaaagtagagtgaaaactctgatg

SEQ ID NO: 915318 - DNA, 4001 bp, Homo sapiens
atttgccccctctcaatcttcttgttccccatgctcccattaattaatttgccaaggcccttatcattacctgaaattatcttacatggttgtttatttgttatcccctttagagtataagctccaggaactttgattattcaccatcattttggcaacttgcatagcctctggcacatagagaggtgccaatatttgttaaatatttgtgaactaaataaatgcgctaattaagcctcttaccaagggcctggcagaccccatgctaagcactccagaaaacatgatcgtgttaattcctggcaacatcctctgacggtagatattagtggttctgttttccagaccaagacacaggctcagagtatttaaatgacttggccaaggtcctgtggcttagaggcactaggacccatatttgcaccaggtctgctggatggcagaggccagtctctgaaccacaggcatcactgctttgtgccctgtgccagtcacagaggggacatacaatatctgcaggagggcagggtgtttgctatcgggtctcaaataacaaagtcagggtgatctttctgaaactcagatctgatcttgtcatccccctgtttaagataaatcagaggcagttaggatggagcctctctgcgtccacccctcagttcctcggaccgcagtctgcagcacccttcttccctccctctcggctccccttcaaaggcactgtgctcccgcctgctacagggtttggcacaagggatcaggctatgcggagttctgtcttgttctcttggaaactcctgctcttcctgcgtggctccagggaggctccctgcccaagtggcagactctcgcagtgtgacaccgtcactctgtagtcctcctgctgcctgttcttttcattggtttgcgagaccccttgatgactgtgtttgtctcctaggctatgagtttgctcactgctgtctccccctgagcccagcacaggccctgaaatagaatgaggcgctcagagaaattaacattgcatgaacgagtgaacgaatgaatgaatgaactctgactgtgagctttcctgcctgccctgggccactgacatctagggggcagactctgggtcactgcctggagccacagagcccaggcccgtcctccaagacccctgggacaccctctttcctgcgggccaagtcctcagagctggccccaccacttgcccgcacactcacatccaggtagttctccaggggctgttcatctaccagggtgggagcctcccactgggggaagtactttctggctgggttgaggttgtgcttcttcaggaagtccttcagcaggccacgctcggacagggtgcgcctcaaggacttctttctgatgagggggaccctgtggtttggagaaggaagaggaattaggcaaggattctgctgaccgggtgctgtggcagccccagaagggaagggaagctggtctaagagaggaagaaggaaggaaaggagacgccccctcttctgcccaacaatgcaaagaagttaagttgactagtgctggagctgggagccaaacccaggctggactcttaaccagctgatctaagagaggaagatggaaggaagggagaagctcccacttctgccccataatgcaaagaagttaagctgactagggctggagctgggaaccacagtcaggctgggcccgagttttaaccatgtctgcagggctgcctcccaaaaaggcagagagagaggcggaaaagggggatggagacagctgaagagagagagaaaaaaaagggaagaaggaagacacgggaggaaagaaaggtgatgtgggaggcagcgtcttcacacccacaccacccggactcacttgtacatgatgcactcagagagcgccaccagacccagcagcagcagccacttcatggttcttcccgggtcccaactcgagggagaaggcaagatgggaggaaggtgcagagcagcagcatgagctgccccttatatacaagttgggtcccgccttatcggcctctgaaagtcaccggttcccctgatcccaaacagagaagctcctgataagattgtggctgccctgagccacattctgagacctttccagctgaggcactttccattgtaaccttgcaccatggggaggggggagggtgccatgggggtggacccgcagagagagagaggagcaatgaccgggaggctattttcttttcttttctttttctttcttttctttctttcttttttctttttctttctaagcaatgacctggaggcttatttgttttcttttcctttctttcctttcttttctttccttcctttccttctttctttccctttctttctttttctttctttcttttctttctttctctttctctctttctctctctctctctctttctttctttctttctttcttttcctctctttctccctttctccctttctccatttctttcctttctttcctgagggagttttgctctgtcgcgccgccagaggcttatttctgaagcattgacaagggcctacattaaaactttacaagctgagcatttcgacaaagttgtttaaaagtacttttaacacagcaatggacagatgtgaaggagccccaggtggcctgatttgtccccgtggtcacgcagctggggttcttagagagcagcctcccgactcagtcataggtggtactggttgtggtcactgcttattcacagcacattgggggggtcagtcgtttgggactcaggacacaattccccacataagtgtcattgtgtggggttgttgggcatctgactagcctatgggccttgtggcttgcttttggtgcaactgggctgagtctgggaaggagatgtgcacagtacacgggggaggagggagagagcaccgggagaatgctgccttcccttcctggaggaggcaaacttcagacaggccaggtatgtctttggaatctgtgtccctccctttctgcaccgcttctctttcttttgctcctttcccaccctctccacctttgagatcccacctgggtctgatttctccaggtgctccaggcttacaactgggttgaaatcagctacaatggagcgaagcaatctgggcaaacaattcatactcatgggtgagtgacttagaaagaggatgcttggccgggcgccgtggctcacgcttgtaatcccagtactttgggaggctaagacaggtgaatcacctgaggttaggagttcaagaccagcctggccaacatagtgaaaccccgtctctactaaaagtagaaaagttagctgggcatggtggtgggcgcctgtaatcccagctactgggtaggctgaggcaggagaatcacttgaacccaggaggcagaggttgtaagaggtgaagccgtctgggcttctgagtcgattagggacttggagaactttcgtgtctagctaaaggattgtaaatgcaccaatcaacattgtgtgtctagctaaaggcttgtaaatgcaccagtcagcactctgtgtctagctgaagggtttgtaaatgcaccagtaagcaccagctattacactccccgcgaaggtctgcagcttcactcctgaagccagtgagagcacgaacccaccagaaggaagaaactctggacacatctgaacatctgaaggaacaaactccggacacaccatcttgaagaactgtaacactgatcgcgagggtccacggcttcattcttgaagtcagtgagaccaagaacccaccggaaggaaccaattcaggacatagttgcaatgagacgagatcttgcctctgtactccagcctgcgtgacagagctagactccgtctcaaacaaaacaacaacaataacaaaaaaaaaaagacaaaagaaaaaagaaagaggatccttaccaacccaatggatcctccactttgtgagcttttattcagtgaagaaagtagagtgaaaactctgatg

SEQ ID NO: 915319 - DNA, 4001 bp, Homo sapiens
ttggttaattttttgtataggtggggactcactatgttgcccgagctggtctcgaactcctgggttcaagtgatcctcctaccttgaactccccagtgctgggattacaggcgtgagccaccactcccagtctcccattttttaaacaaacaaataaatcaattatctctaatcccttgccatcaccgaaaacccagatggctttaaactcatttacattttaggtaaaagcccagttcaattttgcattcatgtctcacaaaggagtagtggtggaggttttttaaaaattttttttgagatcactctggagcgcagtggcaggatctccactcactgtaatctccgcctccctggttcaagccattctcgtgcctcagcaaaccgagaagcagctgggattataggtgcccaccaccatgcttgaccaatttttgtattcttagtagagacagggtttcatcatgttggccaggctggtctcgaactcctggcctcaaataatctgcccgcctcagcatcccaaagtgctgggattacaggcatgagccaccagcccggccagtatacgctttgctttctgcgcacagttcctgctatgagactctcagtcactaaacaggtctagtttctagaaaatgcccacctttcactcttgtaatatcagttttctgctaatgggctaggccccagaaggacttccaagaagagcccaaggcacagaaaaccgagggtaaataataggatacaaagtgacaaggctttaacagaggcctgcccaagcattagctcaactcgctgtgaaagcttggcaaatgtatcactgagaagatgggaacatttgaaatacccgtcctttaagaataagtaggggttcggctgggcgcggtggctcacgcctgtaaggccagcactgtgggaggccgaggcgggcggatcacctgagttccggagttcgagaccagcctggccaacatggtgaaaccccatctctactaaaaatacaaaatcagctgggcgcggcggcgagtgcctgtaatcccagctactcgggaggctacgacaggagactctcttgtacctgggaggcggagattgcagtgagccgagatcgtgccactgcactccagcctgggagaaagaggagacagagcaagactccatctcaaaaaaaaaaaaaaaaattagttcatgggcgaggtggctcacgtctgtaatcccagcactttgggaggccgaggcgggtggatcacttgagatcaggagttcgagaccagcctgaccaacacagtgaaatccccgtctctactataaatacaaaaattagctgggcctggtggcggacgcctgtaatcccagctacttgggaggctaaggcgggagaatcgcttgaacccgggaggcagaggttgcagtgagccgagattgcgccaatgcactccaccctaggcgacaacgcgagacttcatctcaaaagaaaaagaaaaaaaaagaattaggggttctccacgtgcagctgggaaagacgttccaacaatcctcatttgtaccaggccctttggtgggccagtcccttagggcatctctaatgctcctaatgtccatcctagaaattcagggagggaaagaaagtgctggggcgagcatgggtcaggagagaatagggtcaggatttagggccctgaagaagcctcgggcaaactctttggacagacagaccttccaagagggccctcaggctccgcacgtggtctgggcgggaagtgcgggcagagagactaggaagccttcccagcagcgccggcggaccggggcaaggaaagggtcgaatagttaccatgccattctggggccgtccctctgattggcccgagctccctcagcccgagtcgcggcgctccaaggaagggggcggagtctctatgttgcgtcaccacccttcccgacaccccgccggtgcttcccaatctagccattcacaagcccacttcgagaggccctgtgtgacgtcacgacacgctcccgccaaccgcggcggcgaggggcgggactccacggccctctcaccgctcctaccctgtgcctccccgaactccttctgcccctcctcttccctctcgccccttcccccttcagttcggtttcaaaagacgcgttgcccaatgaataacagggtcgacccagagtggcggccgcgtccaccaattcgcggacggcgagggcggagcgtccgcaacgagcctctgacgccgggcggcgtgtgacgcagtcgggccctctgcgcgctgcgcccgaagcggcggtcggtggcaggggtggtagcggcggcggcgacggtttcgtgggggccgcgcgctgctctgtgagcggcgggtggcagcaggggactcctgacacttccccttccccaccgaaccgcggtaagtcgggagcccgagctgcagcggccgagaccggcaggtttctccccccttccgggcgggcggacgcgcggggcgtctcagggcctctccgcttcgaagtctagcgccgctgcgcgcaccttctggcctgagagaggggcggtgctgaggacccgggggcccggagcccgggaggcccggctttggaggccctgggagagaatggacatcagtggggtctaggcctggaggtctccagttgctgcccacgcgagtgggtgtctgtctggttgtactcattcattcagtggtgtaaggaccccacggtgggctggcctttccggggtcagcgccttgaaaccctgaatacggtctgccccgcacttccttgaccgtcatgtgggactgggctttatttgccttggcttctccataagggaagtgggcaccccgaggattagggtgagtccgaagtttgggagatttttaagataatatctgagaataggagtcggttcggtggagcaaaaggttcttttctattttcccacgtgttcagtgtaaagccagatgaggagacagattgagtttctggattactatagccataaggactttagaaattgtttaagtcaatccccctaccttacatcagttttgtagatggggaaaccgaggcccggagtaacaggcaggattagccaatgccagatttttgacagtctaaacagttttctactacctcaccctccctggatatttcagtctcccattattaagaattccctttaggaggtcggtgcggcatggacattaggtagctaaacgtagatgtagtcttcacagcgttttccgtttagttgctaccagctctgttcacgggtaaggtggaagcttcgttagtggtaccctaacctagagcttgagaactaaacttagaagatggttaaagaacgtcagcgttgttatgtatcggaaacaaatcggtaaaactacaagccattgtttccctttctaaatctgaattttttgacttgtgtcagctgatgaggactcggagtcagttagggatttataacagtactggaatagaaagcaggaaatattgataagacttagaaagccaggtaggagtccgtttgtagtagttgtacctcggaactcatggctcctttcaggtacagaattcaaagtgaagtattatagtagaataaggtgaggaaataaaactccgttttggaggaagaagctaactggaataaagagcaaaaagagagcagtgatcattccctgtgacggtcttacaaattcgaaaagaaactcgagttaactgggttacagtatgtttacctggtggaggaagttagggtatttaaaaaccaaaactagaggttggacaggataaaggtactgggaaatacttgggtaaaattattctttttgactcttcagatttgatgaaattgaattagttgacacttggttctgtacacatcagtaagattgttactttgttcttgtatagatgacaaagcataaactcagaactagtagtgcagaagagaaccgtagtctaaatagtaaagcgtgaacagggta

SEQ ID NO: 915320 - DNA, 4001 bp, Homo sapiens
gtgctgggattacaggcgtgagccaccactcccagtctcccattttttaaacaaacaaataaatcaattatctctaatcccttgccatcaccgaaaacccagatggctttaaactcatttacattttaggtaaaagcccagttcaattttgcattcatgtctcacaaaggagtagtggtggaggttttttaaaaattttttttgagatcactctggagcgcagtggcaggatctccactcactgtaatctccgcctccctggttcaagccattctcgtgcctcagcaaaccgagaagcagctgggattataggtgcccaccaccatgcttgaccaatttttgtattcttagtagagacagggtttcatcatgttggccaggctggtctcgaactcctggcctcaaataatctgcccgcctcagcatcccaaagtgctgggattacaggcatgagccaccagcccggccagtatacgctttgctttctgcgcacagttcctgctatgagactctcagtcactaaacaggtctagtttctagaaaatgcccacctttcactcttgtaatatcagttttctgctaatgggctaggccccagaaggacttccaagaagagcccaaggcacagaaaaccgagggtaaataataggatacaaagtgacaaggctttaacagaggcctgcccaagcattagctcaactcgctgtgaaagcttggcaaatgtatcactgagaagatgggaacatttgaaatacccgtcctttaagaataagtaggggttcggctgggcgcggtggctcacgcctgtaaggccagcactgtgggaggccgaggcgggcggatcacctgagttccggagttcgagaccagcctggccaacatggtgaaaccccatctctactaaaaatacaaaatcagctgggcgcggcggcgagtgcctgtaatcccagctactcgggaggctacgacaggagactctcttgtacctgggaggcggagattgcagtgagccgagatcgtgccactgcactccagcctgggagaaagaggagacagagcaagactccatctcaaaaaaaaaaaaaaaaattagttcatgggcgaggtggctcacgtctgtaatcccagcactttgggaggccgaggcgggtggatcacttgagatcaggagttcgagaccagcctgaccaacacagtgaaatccccgtctctactataaatacaaaaattagctgggcctggtggcggacgcctgtaatcccagctacttgggaggctaaggcgggagaatcgcttgaacccgggaggcagaggttgcagtgagccgagattgcgccaatgcactccaccctaggcgacaacgcgagacttcatctcaaaagaaaaagaaaaaaaaagaattaggggttctccacgtgcagctgggaaagacgttccaacaatcctcatttgtaccaggccctttggtgggccagtcccttagggcatctctaatgctcctaatgtccatcctagaaattcagggagggaaagaaagtgctggggcgagcatgggtcaggagagaatagggtcaggatttagggccctgaagaagcctcgggcaaactctttggacagacagaccttccaagagggccctcaggctccgcacgtggtctgggcgggaagtgcgggcagagagactaggaagccttcccagcagcgccggcggaccggggcaaggaaagggtcgaatagttaccatgccattctggggccgtccctctgattggcccgagctccctcagcccgagtcgcggcgctccaaggaagggggcggagtctctatgttgcgtcaccacccttcccgacaccccgccggtgcttcccaatctagccattcacaagcccacttcgagaggccctgtgtgacgtcacgacacgctcccgccaaccgcggcggcgaggggcgggactccacggccctctcaccgctcctaccctgtgcctccccgaactccttctgcccctcctcttccctctcgccccttcccccttcagttcggtttcaaaagacgcgttgcccaatgaataacagggtcgacccagagtggcggccgcgtccaccaattcgcggacggcgagggcggagcgtccgcaacgagcctctgacgccgggcggcgtgtgacgcagtcgggccctctgcgcgctgcgcccgaagcggcggtcggtggcaggggtggtagcggcggcggcgacggtttcgtgggggccgcgcgctgctctgtgagcggcgggtggcagcaggggactcctgacacttccccttccccaccgaaccgcggtaagtcgggagcccgagctgcagcggccgagaccggcaggtttctccccccttccgggcgggcggacgcgcggggcgtctcagggcctctccgcttcgaagtctagcgccgctgcgcgcaccttctggcctgagagaggggcggtgctgaggacccgggggcccggagcccgggaggcccggctttggaggccctgggagagaatggacatcagtggggtctaggcctggaggtctccagttgctgcccacgcgagtgggtgtctgtctggttgtactcattcattcagtggtgtaaggaccccacggtgggctggcctttccggggtcagcgccttgaaaccctgaatacggtctgccccgcacttccttgaccgtcatgtgggactgggctttatttgccttggcttctccataagggaagtgggcaccccgaggattagggtgagtccgaagtttgggagatttttaagataatatctgagaataggagtcggttcggtggagcaaaaggttcttttctattttcccacgtgttcagtgtaaagccagatgaggagacagattgagtttctggattactatagccataaggactttagaaattgtttaagtcaatccccctaccttacatcagttttgtagatggggaaaccgaggcccggagtaacaggcaggattagccaatgccagatttttgacagtctaaacagttttctactacctcaccctccctggatatttcagtctcccattattaagaattccctttaggaggtcggtgcggcatggacattaggtagctaaacgtagatgtagtcttcacagcgttttccgtttagttgctaccagctctgttcacgggtaaggtggaagcttcgttagtggtaccctaacctagagcttgagaactaaacttagaagatggttaaagaacgtcagcgttgttatgtatcggaaacaaatcggtaaaactacaagccattgtttccctttctaaatctgaattttttgacttgtgtcagctgatgaggactcggagtcagttagggatttataacagtactggaatagaaagcaggaaatattgataagacttagaaagccaggtaggagtccgtttgtagtagttgtacctcggaactcatggctcctttcaggtacagaattcaaagtgaagtattatagtagaataaggtgaggaaataaaactccgttttggaggaagaagctaactggaataaagagcaaaaagagagcagtgatcattccctgtgacggtcttacaaattcgaaaagaaactcgagttaactgggttacagtatgtttacctggtggaggaagttagggtatttaaaaaccaaaactagaggttggacaggataaaggtactgggaaatacttgggtaaaattattctttttgactcttcagatttgatgaaattgaattagttgacacttggttctgtacacatcagtaagattgttactttgttcttgtatagatgacaaagcataaactcagaactagtagtgcagaagagaaccgtagtctaaatagtaaagcgtgaacagggtatgttttccgtgacattttctcagttcaggcatcaccctcttctgggaagcttttcttggcattctcttctctgcaagcttccataacacttattt

SEQ ID NO: 915321 - DNA, 4001 bp, Homo sapiens
tctgggctcaaagaccttgtcaaatcaagtcccaactcttcctgaccccacccacaagactctccctttagtcccaccctcaaaaagaaccctgatctcagttaggttgccatcctggcattccagaacaagccaggtggctacgcctccacattctcacccattttcccccagctgccagacctgatcaggcagcctgctccaattgctcaagttcctctctcccttttaggagcatcagggatcccagggagctggaagtggctctggtgaccctcccagaaaaaaaacacattccctggatcatccctaaatggactctaagtcccttagggccctagatggggaacattttcctcacccagcccaaacctagactctgcagttgcagtagcactagtcttccctcccagtatccctccctgaaggctgcagctctagatccctgaggaaccactaggattcccaaattgaagactagatcttcagggaatgaagaggcactgcccaaatcaggagttgatgaggaggttcaagggataatccattccaattcttggaggtatgcctggcctcccatttagctgtgtgacctttggcaagccacttaagcactctagatctgtttccacagttctgcaacatgggaatcacatggtttagattacctctaaggtccttccaacttggtcattctactccacacctcagggtggagctgaagggcaattgttcagcctgcagatagttctacattcctcacaggtactacttagctgaaaattgctttctttggagctacctcagctccaaagtccctagagatctcctcagcctcgagtctgaacccacatttactgagtgcctacggaatactaggccccctgctctgtacttgatatacattgtctcttttaatctcaccataattctatgaggtaggtgctacagcctgtatatttccattttacagatgaggaaactgaggctcagggaggttcaaaacacttactcaaggccaaggctaataaatggcacagctgccattcaaaactactctatggggttccaaccccggggccccatcctccccacctaggactcctgaccaggaggccccgcggaataaagggagagctcaacccctgcacacccggccccacgctggggagggagaagaagggggccagctcggcaagtccagagagcagcagttcctgggaaacagagtgtgtgcgataggacggcaggtaccaggactcccacagcgtggggcccggccctgcagaggccagaccgcgcggccaagctcccgagtggggctgcccggcagcccagcacatccatgcccatactcacccacgcggtggtggcgagagtgccggcggaacccgggggcccaggtggcccggggtcgggggctggctctgcgggctggtcagagcgcgaacggcgggggcggggccggcgctctcggggcggaacttagagaggaaactgcgcccagatcctccgctggctcctccccgcttctggagaccccgacccctggctctcctcctcaatctggcgtgtcctcaaaccatgctttacagcccgggtctgcccccactaatttcggctgcgtgagggcagccggaagagctctggatacctgagtttgagcatgttggataagccaccttgtcgccttacctctcagctgcgttccatctacctgttgaaagaacacaaaattaattcaacaggggccggatttctttctcatccgcccgtctctcctgcctcgcacctccattctaaccgaactatccagcctcgcccttctgaaacattaagccagtttcctcccagccctggcgcccctcccccaaactttgctcgtcagggcggttggggacatttcagcaatgggaagagcacctttgcaggcagtgagacccggtgaggcacatcccagaaactctggcctagagctgttcccgcctttgttcaggagagggcgccctgtcctacgtagcgcagaaaggatttccagccaccagccttgggtctccccacaatgagaggattgatcccccaaaaccagctgccagagttccctccctaccctgaccatgactgacccatgaaagaacttgagggggacccctggctccctttgcaaagaccatcccagcccaacagggaaggagggtgaagggaccaagaattcctcctgcaagcacactggtgggtagtcagagcatctgcagcgggtggaggacctctaagttagccatacctaacatcgcacttttccacttaaatcctcacagcaataacacattctgaacacccagtatatcccaggcactcttacttcttatctcatttatttaatcctcataaaaaccctgtgagggccaggcgcggtagctcacgcctgtaatcccagcactttaggaggccgaggcgggcggatcacctgaggtcaggagtttgacaccagcctggccaacatggcgaaaccccgtctctactaaaaatacaaaaattagccgggcacggtggcgggcgcccgtaatcccagctacttgggaggctgaggcaggagaatcgcttgaacccgggaggcagaggttgcagtgagctgagatcgtaccactgcactcaagcatgggcgacaagagcgaaactccattaaaaaaaaaaaaaaaaacctgtgaaaatagatacgatctcggctcactgcaacctccgcttccagggttcaagcgattctcctgcctcagcctcccgagtagctggaattaacaggcgcccgctactgcgcccagctaatttttgtagtttttagtagaggcgaggttttgccattttggccaggctggtgtcaaactcctgacctcgtgatctgcccccgccttggcttcccaaagagctgggattacaggtgtaagccaccgcgcctggccttttttttttctttctttctctctttttttttggagacagagtctcactctgtcacccaggctagagtgcagtgccacgatctcggctcactgcaacctccacctcccgggttcaagcaattctcctatctcagcctcccgggtagctgggaatacaggcggcaccaccatgcccggctaatttttgtacttttagtagagatggggtttcgccatattggtcaggctggtctcgaattcctgacctcaggtgatccacctgccttggcctcccaaagtgctgggattacaggcatgagcctccgccagtagatactatttaatatcctcattttacaatggaaaacagggaaaccaagttacctacttacacagctaatacatgccagaaccaggactcaagtctggtacctgagataattcacataatccactatatgctgttaatgccacttagcatttgttgattaatttgccagagctctttttcatgtgttcacttttgttcattcacccagtctaggccctctctttgacaggcctcatgtggagcaatggtggaggacccagagatacctcagacgcactctgaggggctccgaagtctggagaaggtgcgcactcagagtgtcttgttctaaaaactacttttcttgattttgagttctcccctatcctgttctttaaggtcccaggacaaatggactagcaaaactttacaaaaagaactacctctctccaaatttggcaactagattcaggttttctgccttggggcttcatgtcatcctctttgtctagctccaaccaggggtgtctgctcctggctattgttccctatcttgacaccttgtctgttctcttggccctaagtaccattccctgaggctgggtcccctctccctgcctctagactacccccaatgcccaaaccttgaggtgctctaatttagattaattctttaattctctggtgatttgggaaatatgggcaattctccatatagccctgagcctctgtttcctcgtctataaaatggtttt

SEQ ID NO: 915322 - DNA, 4001 bp, Homo sapiens
ccacatcaccctcctgtgaacagatgagggttcctgggggctgtgatttcccccttagataagggtagctaaggtcaggaactataacaaataagtgtataccaacaatcctagcccagctccgcacagtatacagaagggaaagttggagcaggaatctgctcaggatcacataacaaagagatacatgtgggacccacgaagagttacacactgcaactctggccttccttgaccccttcctctctgtgtctgaacttgagaaaggtcaggttaggactggagtgagagaggcagaagaggcacctgttcacaggaggaagaaaaggaaaaaccaaaatctacatagatgaggcagttagccctattcccattgtaaagatagagaaaccaagacactcagagagagagaagggctggctcttcctcaaagccctgtgctgagctgaagggaaagccatccctggaacgttggcttgttgttgccaagctagggctggctccagacacataaagaatatacccttctgggctcaaagaccttgtcaaatcaagtcccaactcttcctgaccccacccacaagactctccctttagtcccaccctcaaaaagaaccctgatctcagttaggttgccatcctggcattccagaacaagccaggtggctacgcctccacattctcacccattttcccccagctgccagacctgatcaggcagcctgctccaattgctcaagttcctctctcccttttaggagcatcagggatcccagggagctggaagtggctctggtgaccctcccagaaaaaaaacacattccctggatcatccctaaatggactctaagtcccttagggccctagatggggaacattttcctcacccagcccaaacctagactctgcagttgcagtagcactagtcttccctcccagtatccctccctgaaggctgcagctctagatccctgaggaaccactaggattcccaaattgaagactagatcttcagggaatgaagaggcactgcccaaatcaggagttgatgaggaggttcaagggataatccattccaattcttggaggtatgcctggcctcccatttagctgtgtgacctttggcaagccacttaagcactctagatctgtttccacagttctgcaacatgggaatcacatggtttagattacctctaaggtccttccaacttggtcattctactccacacctcagggtggagctgaagggcaattgttcagcctgcagatagttctacattcctcacaggtactacttagctgaaaattgctttctttggagctacctcagctccaaagtccctagagatctcctcagcctcgagtctgaacccacatttactgagtgcctacggaatactaggccccctgctctgtacttgatatacattgtctcttttaatctcaccataattctatgaggtaggtgctacagcctgtatatttccattttacagatgaggaaactgaggctcagggaggttcaaaacacttactcaaggccaaggctaataaatggcacagctgccattcaaaactactctatggggttccaaccccggggccccatcctccccacctaggactcctgaccaggaggccccgcggaataaagggagagctcaacccctgcacacccggccccacgctggggagggagaagaagggggccagctcggcaagtccagagagcagcagttcctgggaaacagagtgtgtgcgataggacggcaggtaccaggactcccacagcgtggggcccggccctgcagaggccagaccgcgcggccaagctcccgagtggggctgcccggcagcccagcacatccatgcccatactcacccacgcggtggtggcgagagtgccggcggaacccgggggcccaggtggcccggggtcgggggctggctctgcgggctggtcagagcgcgaacggcgggggcggggccggcgctctcggggcggaacttagagaggaaactgcgcccagatcctccgctggctcctccccgcttctggagaccccgacccctggctctcctcctcaatctggcgtgtcctcaaaccatgctttacagcccgggtctgcccccactaatttcggctgcgtgagggcagccggaagagctctggatacctgagtttgagcatgttggataagccaccttgtcgccttacctctcagctgcgttccatctacctgttgaaagaacacaaaattaattcaacaggggccggatttctttctcatccgcccgtctctcctgcctcgcacctccattctaaccgaactatccagcctcgcccttctgaaacattaagccagtttcctcccagccctggcgcccctcccccaaactttgctcgtcagggcggttggggacatttcagcaatgggaagagcacctttgcaggcagtgagacccggtgaggcacatcccagaaactctggcctagagctgttcccgcctttgttcaggagagggcgccctgtcctacgtagcgcagaaaggatttccagccaccagccttgggtctccccacaatgagaggattgatcccccaaaaccagctgccagagttccctccctaccctgaccatgactgacccatgaaagaacttgagggggacccctggctccctttgcaaagaccatcccagcccaacagggaaggagggtgaagggaccaagaattcctcctgcaagcacactggtgggtagtcagagcatctgcagcgggtggaggacctctaagttagccatacctaacatcgcacttttccacttaaatcctcacagcaataacacattctgaacacccagtatatcccaggcactcttacttcttatctcatttatttaatcctcataaaaaccctgtgagggccaggcgcggtagctcacgcctgtaatcccagcactttaggaggccgaggcgggcggatcacctgaggtcaggagtttgacaccagcctggccaacatggcgaaaccccgtctctactaaaaatacaaaaattagccgggcacggtggcgggcgcccgtaatcccagctacttgggaggctgaggcaggagaatcgcttgaacccgggaggcagaggttgcagtgagctgagatcgtaccactgcactcaagcatgggcgacaagagcgaaactccattaaaaaaaaaaaaaaaaacctgtgaaaatagatacgatctcggctcactgcaacctccgcttccagggttcaagcgattctcctgcctcagcctcccgagtagctggaattaacaggcgcccgctactgcgcccagctaatttttgtagtttttagtagaggcgaggttttgccattttggccaggctggtgtcaaactcctgacctcgtgatctgcccccgccttggcttcccaaagagctgggattacaggtgtaagccaccgcgcctggccttttttttttctttctttctctctttttttttggagacagagtctcactctgtcacccaggctagagtgcagtgccacgatctcggctcactgcaacctccacctcccgggttcaagcaattctcctatctcagcctcccgggtagctgggaatacaggcggcaccaccatgcccggctaatttttgtacttttagtagagatggggtttcgccatattggtcaggctggtctcgaattcctgacctcaggtgatccacctgccttggcctcccaaagtgctgggattacaggcatgagcctccgccagtagatactatttaatatcctcattttacaatggaaaacagggaaaccaagttacctacttacacagctaatacatgccagaaccaggactcaagtctggtacctgagataattcacataatccactatatgctgttaatgccacttagcatttgttgattaatttgccagagctctttttcatgtgttcacttttgttcattcacccag

SEQ ID NO: 915323 - DNA, 4001 bp, Homo sapiens
aggctggagtgcagtggcgcgatctccgctcactgcaagctccgcctcccgggttcaagccattctcctgcctcagcctcccgaatagctggggctacaggcgcccgccaccgcgcccggctaattttttgtatttttagtagagacggggtttcaccatgttagccaggatggtctcgatctcctgacctcgtgatccacccgcctcggcctcccaaagtgctggaattacaggcctgagccacggcgcccggccggaaattcattcttaggcagaatccaaggccccaccccaggcctcctgaatcagaatttgtatttcaagatccccaggtgatctataagcacattaaggtttgagaagcattagtttagactgtagaggaagaattattcgtccaatatacatatgaccaattaacaccaaatacctcattgtagttgcttatttgttggtcttcctcatctgctaactgaggcttgttgagggcaggaaccctttctattttcctcacaagtatttcctgggtctaacaagacctaaaacacgcactcagcattcaatatttttttgctgaatgaatgaatgaataaagtaaaaacaaaactttcagaaagtgaagccttaaggaaattcatttgtacaacataatgtcacatactaccatacaaattccttaattcagtgtcattaattccattttaaatgtgctgccttctctacttcaacaaaggtattttacgcacttgacaaagcaaaagcttggattatcttcctctgttggagctaccagggacctcttttacaagtaagatagctgcattttaattctgattgtcacaaattcatcccaaatgcccgcacgaggtttaattaccaccacaacttggaggtgggggcggagggtgggtggggaggtgttggtagagaagtaatggttaaggcaaaaacaatcctgtattaagagtaccacatgaaacctggaaaacacgattccttgaacagattaattccagaaaatagctgccagcaggagaaagaagaggtaagcgccttgcctttcccaacagcaaaaggtgatactagacaataccagggagtgataaaaggccagcaactacctagcgacagaaggaggaaacacaccagaccagaactaaagcggatagcggttagaaacgcccagtaagggtgccagaaaccactttcaggtatgtggagaaggaagtcaagggagaaaaagggaaaggaaatcgttgtttagggtataacttacaatgatgatgatttttttttttttttttttgaagaaagagggaagacagcacttgaaaggaaagagggtaaagaagaggaagggaggttacaattgagagcactgcagaaggaagcgatgcagatgttgccgcccggctctggcagtccgaaggagcaaccccacgcataggtgggtggcaacgccctgctccgctgccccccgctcggtgtcccgagccatctcctctgcagcccgcggggcgctgggtgggcacaggaaagagcagactgtgtgggggaggcgacggcgtttgccgggctgaccaggtacccaccttatcccagcggagccactgcccgatggccgtgtccagctgagggtccccggtgtggtagggggcgtggagcaggttggagttcagatccccctctgtgttttcagccatggcgaccagacaggcgtacgggccgggggccggcgaagacactgagttggggtggggggtggcttggggttcgctcaccagggtccaggcgtccccacctcactgaagggcatcggagaccaaccgcagggtgttcgtaacagctcctgccgcggcgtcagggaaccgggagagagggggtttatggccgcctgctccccagcggaccaggtccgggtctctgggcgaagtgactgaggcggtcgcgccgcgagagaacaacagtcccagatgtctgggtcctggctccgccgccgccgccgccgcccgccccgcctacggccccgccccgcgccttaggccccgccccttcccgcccttgctgatttaagtccccgaagttctagactggagcccgggagcgcgctccccacgcctccgaagtagtgggggtttacagcccgtccgggtggtgaggcaatagtgcacggttctttttattttttaatttgccaagggtctcctttcctcgatctgctctcacggctaccactagcaagctgcctttgcgcttgccctgcaggtccccagcgcgcgcgcaggcccccagtttctcttgggggcacgcgccggttgggggaggaggggcagtgcgagctgtccgcgcactgcctcacgggagttgtagttctttcctttgtctgagctcagcggagaccgccgccgagactacgactcccagcagctccgcgttccccctttcctcaaaagaaaaagatctacctcgaggtagttccctacagacacgccctatccctattagttatgctgcgctgtgtggccctggcattaaattaaacaaggaatgacatagtaaggggacaaagtggtatccgtttagtgctgtgcagtttacgaatcgcgttctatcgcctcaatccctcagtaaggtacaggggcgtagtccttttccgtttcacacacaaagaagaaactgactccctgagacacctctcctaagaggccgagttcgtgagcggtcaaactagggttccaatctcatttcagatcccctcagctggcagttattttattaggtcggtgcaaaagtaattgctgtttttgccattaaaaataatggcattaaaagtaatggcaaaaacggcaatgacttttgtaccaatctaatatctctgctgctatagtaaactaggaggtagggagaacaagattactggaaaatagataaggaagttgttgagggaagatggtcggcatttaacctaaatataagaatgtataagcatcacaagataccaagagcaatggtaatgggaatacggaggaaaaggaaattggttcacccaaattgaaatagtcttccgttacttcttagccgtctctcctatggaaagctcacctaagttgaggtctgggaaatgctgagaagtgctgacctgtcagccacctagctactcctccgtttcttggtttggccttcttagaatggctatgattttgggcaagtacattacaactctttccctagtcagcttttttgtaaggaaggtatgataatatttacatcatggctgtacagtaacttaataaatggcattaggctgctttgaggttcacagataaaagacatattaagttcaaagtattactttatttcctttaaagtgccatttaccataataaaattcaaactaccaaggtacaaaaggattgtggtaccagtttctgaaaaacgtgccatagttgggagttgcagtttttgctaacgattgtttcttttgtggagtcagcaggactcttgttcttttaatcacacaaggcctgggcaacagtcacgtgtcctggagagaaattcatcttccactaccatcaccattattatccatgatacatattaaacatttactctctgctaagcattatggtaggagctgaggctacaagaatctatataattgttcacttcgagaagtaacatctgaggagacaggatatatgtaagaaaagaaagcccatgataaatagcaagtgctgccaacaactgttaatgaatttacatctgaggtggtcaatgaaaaaagcatcaagcaggagggacctgcactgggctttcagaaacaaaataaacaagttgagaataagatagaggatatttcaaacccatagatcagtggttctcatatctccctaggagtttgtttaaattaatattcctggacactgcctccagagattctgaatcaatacattggcatagggcctaggtacctgcatatttgaaatatctattgactgtc

SEQ ID NO: 915324 - DNA, 4001 bp, Homo sapiens
caacgggaaatccgggaaggctgcggggttggcaccggccacaaggtaggaacgcggggagcgcgcggaggcctccgcgccttcctcctcctcctttatctttagagcgggcggctggaagtcgctatagagagggtacgcgtcgtccttgggctcggcgtcgggcgggtacgcgcagtcggggaagtcgcctacagcgaccggggtggacgaggcacagggtgaactccgcggcggggcaaaggcgctggcagccccggccccgccgtcgtaactttcgtcttccagcagctgccgagtgcgggctgccaataaggcgtgattgagaggcaggataggcacgtggatgaaatccatcaccgtggtggccagcggggagcgcccgggcgccatcggcgcgtcctgctccaccagggcgaccctgggcgctgagaagcgggaatcttccttggggaccagggcgacgcctcctgctgccgcccccggcgggacagccgcggctcctcctccagccgccgcgccacccagagcccgaggtttgcccttcagaagcggacccgcagactcctcggactcagagccatcctcctcctcaacctccaccgcagcggcctgcggagacggcttcactggggccccggaccagtgagggctctcagaggccgggagcagcagctgccgggctggtgacaggccccggggcagcactttatgggcagctgccgtcccggagctgtctccaaccttgcacccggaccggctcatgagcggggacaacacccgctgggtggcgggggcagccggtggatcttcgggaagttcggggccaaacaggcaccaagagctggtgacctcgcaggcgggagggctgggttggctctgcccgggacctgagggcgccaacagagtgtccaagacactgtccagcagtccgctgtccttttctgggggactagaactgctgcctccagcaccccttgtagcttcagctctggaatatgcgccctccacgtccgacagcgactgctggtcctgcgtcttttcgtcggaggggtcctgtccctggcagggccgagggaagagtagcccgtccagggagataggtatggccgaaacttcaggcaaggtgtccgaggtctggctccccgggaacggacctgcggctgggcgacacagcagtggggatccgacctcgggggagggcgggccgcccgccacgtggggagcccggggaccctttgccttcagctcagtcatgacgactggactccccttttctcctcccccgtctccaggaggagggaaaagggaaggaggagggggtttcgggaatataggggcagagggaggagaaagtgggtgttgaatgtggctggaccggagggatctccacctcctgggtcgggggcgggggagggcggcgctggtcagctcctgcccttggcctccatcctgtcgtcaggggaactgtggctgtcgtttgtcccagcgagcggcaagtggggagcgcaagaaaaagtagtaattgttaggagatctcgtctcctaactcggggagttctccaagagagttctccaacttctgtccgaggactggagacgcagagtactcacaagtccggcacttgagtggctgcggctgcgacggcaatttagtgacacgcggctcctttatctcccgactttttctctggcatcaaactcgtgcatgctgtgaagctctcagtccctcgctgagttccactgccccctcactaaaaccctggggctagtcggacctctcggtacagcccattcccaggaagggtcggacttctgctggctccgtactgcgggcgacagtcatctccgaagatctcagatcccagtagtgcgggagcactagccgcctcgggttgtagatttcactcaaatgacaagtgaagctagttctcattgagaatgccacccacacgcacaaatacaacaaggcttaccccgattagtgacagctgtggactggccagacagctttctaacaacgcctcctcctctagggaggccccgcccaaagcccctccctaccccaattaccggtaggatctgaaactctggagttggcatttccacccgttattctgaatgctactctcaatagcaggttctttgggatggaacctcataagcatattacgttttgttttgcaaattaagaattatgccctatctaattggaaaaatgaatagattctatcagaagtagaatttttgtcaccattttaagatttcagttttgtaaagatttaacacagaggaagacatttggctacattatcttttaaaataataaatgtatcaaggacgatactaaataagagattctctcccttatgagttccataaaagtgaatgctttcaagtttctcctgctgcgaccaacatgtcctgctcctcttgagtatcctcagcgtgacaaagaaatttgggagtgggagatggtaacacctctgtatctatgatggaagtttggatgttgtgtgccacacttcgatttgtcttaaggaatgtgttccaatttttagtaaatagcactttaaggaaagtttcctttagctccagcttatacagtgtgctacatcataacatcctcagtagagatgttgaacagtactttttaccctaaatattcttagtctgaaaagtaattatctttgagcttataaaatggatccccgctaaattcatgaagtcagtagaaaaagggaagaatattgcaatatatattttagatacacagtcataaactgtatttgacccaagaccattgggtattttaacatcatcttaaatataccttgttcaaaacagagtgaatgatttgcaaattttcttgtaggacctcaaggtctagctgtgctaatgactcatagtttatctcaaccatgtataaagaatgcagaagactccagaaggtgggggagccactagaggtaaggagcctggacccctcgatcatctggggaggggctatatgagtgagaaacaaacctttatcatgttaggttactaggatttggagttggttgttctagtaaatagtttactctgattaattttagatatgtggaagttaggcagatagaggaaaggtaaagagaattctgggaagcaggtatagaatgttcaccgggcatcaaatggcaggatataatatggcaactgcaaggggaccattatgaatagaacaggagcaagtgtgggcacagaagtatatgagactagagaagtaaactaatttattaatatcattattgttgttttcaggctttctctttccagcctatcttaaaacagttaccatgctttattgaggtgtaattccagtatcatacagctcactcaaagtatcagttcattgatttttcatgtactcagagttgtgcaaccatcagcactattaattttgtaacatgagtatgactctaaaatctcaatacccactagcagttattccacatttccgcctaaatctcccagcagccactaatatgctttttgtacctgtgatttggctattttggatcaaggttcatccatgttccacatgaatcagtacttcactccttcactcctttttattgacaaataatatttcattgtatggataaaccacattttatttatccatctctatcagttgttggacatttgggttgtttacaccttttggctaccatgaaaaatcctgctaatgaacattcatgtacaagtttttgtgcagcgtatattttcctttctcctggatatatgcataggagtggaattgctggttcatatggcaactctaggtgtggtctttggagtaactgccagactatggttcaaatgattgtacttcttacatttccaccagcagtgaataagggtcctagtttcttcacatctttgacaacattttttatctgtcttttttgttatagccccccaagtgtgtgaagtggtatctcactgatttatttata

SEQ ID NO: 915325 - DNA, 4001 bp, Homo sapiens
gccgcgcactttctgccccactgggctacagcggacctagtgtgacgctgcacgttttaaatcggggttggttctgcttcggaatctggaagattcggaaagttaaaaaacaaacaaaaaaacagctttcagggaggcacgccccaaaaatagtatattctgcgcccaccttcgtgtccccaagagtgaggagaggagggaagaagaagggaggcaactgcccctgtgctgtgtcccgctgcccaccctctccggccgccccggggagcgcagcggtgcgctggggctggggctgagggttggcggccgccgccgccaacggaaccgctactcccggacgcgctgggcgtgccccgtcccgggccctcacctcaggtagttgagatagggcgggtagacctgcggcaggccctccttgagcacggcggcctggtagccgagctgcgggagcccgttgaggccgagtgcagggtagagcgcgggggccgccccggcggcggcggcagaggcggaggtggagggcaggccgtcccgcgggagcaggcagccgctcgcgcccggcgccttgcagggcggcggcgcgaacgggccctgctggggcggcgcgccctccgctttgtacaggatgcactccagggtcgaccccgaggaggacgcagacgagactgaggcactggcgggtgcggccgtcaccgccgcttccccgggtctggatggggtcgctcgcggcggcagcgggggcggtggccccaacgggaaatccgggaaggctgcggggttggcaccggccacaaggtaggaacgcggggagcgcgcggaggcctccgcgccttcctcctcctcctttatctttagagcgggcggctggaagtcgctatagagagggtacgcgtcgtccttgggctcggcgtcgggcgggtacgcgcagtcggggaagtcgcctacagcgaccggggtggacgaggcacagggtgaactccgcggcggggcaaaggcgctggcagccccggccccgccgtcgtaactttcgtcttccagcagctgccgagtgcgggctgccaataaggcgtgattgagaggcaggataggcacgtggatgaaatccatcaccgtggtggccagcggggagcgcccgggcgccatcggcgcgtcctgctccaccagggcgaccctgggcgctgagaagcgggaatcttccttggggaccagggcgacgcctcctgctgccgcccccggcgggacagccgcggctcctcctccagccgccgcgccacccagagcccgaggtttgcccttcagaagcggacccgcagactcctcggactcagagccatcctcctcctcaacctccaccgcagcggcctgcggagacggcttcactggggccccggaccagtgagggctctcagaggccgggagcagcagctgccgggctggtgacaggccccggggcagcactttatgggcagctgccgtcccggagctgtctccaaccttgcacccggaccggctcatgagcggggacaacacccgctgggtggcgggggcagccggtggatcttcgggaagttcggggccaaacaggcaccaagagctggtgacctcgcaggcgggagggctgggttggctctgcccgggacctgagggcgccaacagagtgtccaagacactgtccagcagtccgctgtccttttctgggggactagaactgctgcctccagcaccccttgtagcttcagctctggaatatgcgccctccacgtccgacagcgactgctggtcctgcgtcttttcgtcggaggggtcctgtccctggcagggccgagggaagagtagcccgtccagggagataggtatggccgaaacttcaggcaaggtgtccgaggtctggctccccgggaacggacctgcggctgggcgacacagcagtggggatccgacctcgggggagggcgggccgcccgccacgtggggagcccggggaccctttgccttcagctcagtcatgacgactggactccccttttctcctcccccgtctccaggaggagggaaaagggaaggaggagggggtttcgggaatataggggcagagggaggagaaagtgggtgttgaatgtggctggaccggagggatctccacctcctgggtcgggggcgggggagggcggcgctggtcagctcctgcccttggcctccatcctgtcgtcaggggaactgtggctgtcgtttgtcccagcgagcggcaagtggggagcgcaagaaaaagtagtaattgttaggagatctcgtctcctaactcggggagttctccaagagagttctccaacttctgtccgaggactggagacgcagagtactcacaagtccggcacttgagtggctgcggctgcgacggcaatttagtgacacgcggctcctttatctcccgactttttctctggcatcaaactcgtgcatgctgtgaagctctcagtccctcgctgagttccactgccccctcactaaaaccctggggctagtcggacctctcggtacagcccattcccaggaagggtcggacttctgctggctccgtactgcgggcgacagtcatctccgaagatctcagatcccagtagtgcgggagcactagccgcctcgggttgtagatttcactcaaatgacaagtgaagctagttctcattgagaatgccacccacacgcacaaatacaacaaggcttaccccgattagtgacagctgtggactggccagacagctttctaacaacgcctcctcctctagggaggccccgcccaaagcccctccctaccccaattaccggtaggatctgaaactctggagttggcatttccacccgttattctgaatgctactctcaatagcaggttctttgggatggaacctcataagcatattacgttttgttttgcaaattaagaattatgccctatctaattggaaaaatgaatagattctatcagaagtagaatttttgtcaccattttaagatttcagttttgtaaagatttaacacagaggaagacatttggctacattatcttttaaaataataaatgtatcaaggacgatactaaataagagattctctcccttatgagttccataaaagtgaatgctttcaagtttctcctgctgcgaccaacatgtcctgctcctcttgagtatcctcagcgtgacaaagaaatttgggagtgggagatggtaacacctctgtatctatgatggaagtttggatgttgtgtgccacacttcgatttgtcttaaggaatgtgttccaatttttagtaaatagcactttaaggaaagtttcctttagctccagcttatacagtgtgctacatcataacatcctcagtagagatgttgaacagtactttttaccctaaatattcttagtctgaaaagtaattatctttgagcttataaaatggatccccgctaaattcatgaagtcagtagaaaaagggaagaatattgcaatatatattttagatacacagtcataaactgtatttgacccaagaccattgggtattttaacatcatcttaaatataccttgttcaaaacagagtgaatgatttgcaaattttcttgtaggacctcaaggtctagctgtgctaatgactcatagtttatctcaaccatgtataaagaatgcagaagactccagaaggtgggggagccactagaggtaaggagcctggacccctcgatcatctggggaggggctatatgagtgagaaacaaacctttatcatgttaggttactaggatttggagttggttgttctagtaaatagtttactctgattaattttagatatgtggaagttaggcagatagaggaaaggtaaagagaattctgggaagcaggtatagaatgttcaccgggcatcaaatggcaggatataatatggcaactgcaaggggaccattatgaatagaacaggagcaagtgtgggcacagaagtat

SEQ ID NO: 915326 - DNA, 4001 bp, Homo sapiens
actgaggcactggcgggtgcggccgtcaccgccgcttccccgggtctggatggggtcgctcgcggcggcagcgggggcggtggccccaacgggaaatccgggaaggctgcggggttggcaccggccacaaggtaggaacgcggggagcgcgcggaggcctccgcgccttcctcctcctcctttatctttagagcgggcggctggaagtcgctatagagagggtacgcgtcgtccttgggctcggcgtcgggcgggtacgcgcagtcggggaagtcgcctacagcgaccggggtggacgaggcacagggtgaactccgcggcggggcaaaggcgctggcagccccggccccgccgtcgtaactttcgtcttccagcagctgccgagtgcgggctgccaataaggcgtgattgagaggcaggataggcacgtggatgaaatccatcaccgtggtggccagcggggagcgcccgggcgccatcggcgcgtcctgctccaccagggcgaccctgggcgctgagaagcgggaatcttccttggggaccagggcgacgcctcctgctgccgcccccggcgggacagccgcggctcctcctccagccgccgcgccacccagagcccgaggtttgcccttcagaagcggacccgcagactcctcggactcagagccatcctcctcctcaacctccaccgcagcggcctgcggagacggcttcactggggccccggaccagtgagggctctcagaggccgggagcagcagctgccgggctggtgacaggccccggggcagcactttatgggcagctgccgtcccggagctgtctccaaccttgcacccggaccggctcatgagcggggacaacacccgctgggtggcgggggcagccggtggatcttcgggaagttcggggccaaacaggcaccaagagctggtgacctcgcaggcgggagggctgggttggctctgcccgggacctgagggcgccaacagagtgtccaagacactgtccagcagtccgctgtccttttctgggggactagaactgctgcctccagcaccccttgtagcttcagctctggaatatgcgccctccacgtccgacagcgactgctggtcctgcgtcttttcgtcggaggggtcctgtccctggcagggccgagggaagagtagcccgtccagggagataggtatggccgaaacttcaggcaaggtgtccgaggtctggctccccgggaacggacctgcggctgggcgacacagcagtggggatccgacctcgggggagggcgggccgcccgccacgtggggagcccggggaccctttgccttcagctcagtcatgacgactggactccccttttctcctcccccgtctccaggaggagggaaaagggaaggaggagggggtttcgggaatataggggcagagggaggagaaagtgggtgttgaatgtggctggaccggagggatctccacctcctgggtcgggggcgggggagggcggcgctggtcagctcctgcccttggcctccatcctgtcgtcaggggaactgtggctgtcgtttgtcccagcgagcggcaagtggggagcgcaagaaaaagtagtaattgttaggagatctcgtctcctaactcggggagttctccaagagagttctccaacttctgtccgaggactggagacgcagagtactcacaagtccggcacttgagtggctgcggctgcgacggcaatttagtgacacgcggctcctttatctcccgactttttctctggcatcaaactcgtgcatgctgtgaagctctcagtccctcgctgagttccactgccccctcactaaaaccctggggctagtcggacctctcggtacagcccattcccaggaagggtcggacttctgctggctccgtactgcgggcgacagtcatctccgaagatctcagatcccagtagtgcgggagcactagccgcctcgggttgtagatttcactcaaatgacaagtgaagctagttctcattgagaatgccacccacacgcacaaatacaacaaggcttaccccgattagtgacagctgtggactggccagacagctttctaacaacgcctcctcctctagggaggccccgcccaaagcccctccctaccccaattaccggtaggatctgaaactctggagttggcatttccacccgttattctgaatgctactctcaatagcaggttctttgggatggaacctcataagcatattacgttttgttttgcaaattaagaattatgccctatctaattggaaaaatgaatagattctatcagaagtagaatttttgtcaccattttaagatttcagttttgtaaagatttaacacagaggaagacatttggctacattatcttttaaaataataaatgtatcaaggacgatactaaataagagattctctcccttatgagttccataaaagtgaatgctttcaagtttctcctgctgcgaccaacatgtcctgctcctcttgagtatcctcagcgtgacaaagaaatttgggagtgggagatggtaacacctctgtatctatgatggaagtttggatgttgtgtgccacacttcgatttgtcttaaggaatgtgttccaatttttagtaaatagcactttaaggaaagtttcctttagctccagcttatacagtgtgctacatcataacatcctcagtagagatgttgaacagtactttttaccctaaatattcttagtctgaaaagtaattatctttgagcttataaaatggatccccgctaaattcatgaagtcagtagaaaaagggaagaatattgcaatatatattttagatacacagtcataaactgtatttgacccaagaccattgggtattttaacatcatcttaaatataccttgttcaaaacagagtgaatgatttgcaaattttcttgtaggacctcaaggtctagctgtgctaatgactcatagtttatctcaaccatgtataaagaatgcagaagactccagaaggtgggggagccactagaggtaaggagcctggacccctcgatcatctggggaggggctatatgagtgagaaacaaacctttatcatgttaggttactaggatttggagttggttgttctagtaaatagtttactctgattaattttagatatgtggaagttaggcagatagaggaaaggtaaagagaattctgggaagcaggtatagaatgttcaccgggcatcaaatggcaggatataatatggcaactgcaaggggaccattatgaatagaacaggagcaagtgtgggcacagaagtatatgagactagagaagtaaactaatttattaatatcattattgttgttttcaggctttctctttccagcctatcttaaaacagttaccatgctttattgaggtgtaattccagtatcatacagctcactcaaagtatcagttcattgatttttcatgtactcagagttgtgcaaccatcagcactattaattttgtaacatgagtatgactctaaaatctcaatacccactagcagttattccacatttccgcctaaatctcccagcagccactaatatgctttttgtacctgtgatttggctattttggatcaaggttcatccatgttccacatgaatcagtacttcactccttcactcctttttattgacaaataatatttcattgtatggataaaccacattttatttatccatctctatcagttgttggacatttgggttgtttacaccttttggctaccatgaaaaatcctgctaatgaacattcatgtacaagtttttgtgcagcgtatattttcctttctcctggatatatgcataggagtggaattgctggttcatatggcaactctaggtgtggtctttggagtaactgccagactatggttcaaatgattgtacttcttacatttccaccagcagtgaataagggtcctagtttc

SEQ ID NO: 915327 - DNA, 4001 bp, Homo sapiens
agatcctctacttccagacctaaacaaagaatatttcaacatatgaccggaatatgatgacaccagattcaccaatgaaaacaaaacctgccgaccattagcagtcgtaccctcatcacaacaactcaactacttagaaatcactctcggcacatctgcacccgacaaccggcctgtggccttctccgggggtgcaagccacagacaaagttgaaagaaggcgttctcctccggtgcccaatctcgataccaacccctcccctaccagggccaccttgctgctacccaccatcgcgaacgtggtcaggggaaaaaaaaaaaaaagaaatcctaacagcaccgctcagcagaataaagagaccaaagagaggatgacgagaagtgttgggaactgcgtgcacgacggggctggaccaaacggaaagagtcccactccgcgcgcccctccccccggcgggggcgcgggcgggggaggggcggccgcggcccctctcggagcggcctgtccgccccggcccgctcggggtcccgggggcgccccgcggccgccggcggcgggggcgaatgcgggagggccggccccggggtgaggggtgcaggcagactctccggaataacaagttgcagaagaagaagaataagcggaatttccccaacgctgctccggccacccaagacaaatgcaccaacacactcacactcacacacacacaaacacacacactggggcccggcagcgtcagcagccgcagcttttttttttttaaaccagatccctcagtcaacaaacaagatggttttccaaaaaaaaattttttttaattaaataaataatcataataaaaacttccccccgacagcatcccggggtggggtgggggggatggaggagccccagctacctccccggccgagggacagccgagggggggcgggcgaggctccgtgccccccgcccccgcccgcagcccccggccggccccccgccgggacaatgtgacgccccctccccgccgcccccggcacgccgcctctgtcaccggctccggccctgcactctgcgcccaggcttccgaggctgctcataaacttacttccaatttatcctggggaggggtggagggcagaggggaggggggggagccaaggttttcccattgtcttttttttcgggggggaggtatgggaagggcacgcaggggggcgccccgaaggggaagttattgctcaaatctcaagttgactgaggggtcctgacgagaacacccccctttccctcctccctcccacacacccctcccctccccctacctccccccacaacaaactccaagcaggcagcccctgatcctcccagagacaaacaccagcgacaagacagagggagagaggagagaggcagagggggaagggggagggaggggaaatagagctactccagaaaaaaagagagagaggagagtgagaagaagagagaatggaaaagctgggatactgcaccctcctgctgctggctggctgtcccccctggcagctggaggcaggaactctgagcaggagaagcaggaggaggaggaggagggaactcttcttcatggggagggagggaagaagctggagctgctgctgctgcttctgctgctgctctgggcctctcgcactttttagatattagtgtgttaagatggtaggttgttcccttctccctcctcctcctcctcctctcctctcctctctctctcactcactctctctctctctctctctctgggctgtttctttcctcctcttccccaggcaagggggggtggggaggagggggttggggggaggaactggatcctcctcctcctccaggagggacacacacaggccccgggccggaatcgggaggggggaatcagagcagcaggagagaaactgtaggagacaaacaagcccaactcttcatcctcctcctcctctcagcagcagcagcgagcaccaccagcccattcaccacccggccccgggccgcagcacctccgccgcctcagcccggggatccctccgcccaggcccagacacactcgcccgcgcgggagcccgccgcgcggccccgccggcccgccgccgccgccgccgtgcgcgcccccgccgctcccgagagccgggcgagagggactggggctgggaaagcggggacgagggcgaggggagaggaggcgccgggggagagcgggccgcggcggggagggagggggccgccgggcggagtggtacggcggccggcccgggcccccgcgcctcggcccgcggctcccgggacgctcgggtccccccaccgggggcggtggggcgtcggcggggggggcgacgggggcccgcggcggcgctcgggcgggcggactacttgacgtgtcggtgcggcgaatttatttcactttgcctaaggaacggggtgtgctgcggcacccattgcctagggaaaaaacccggatgtaaagtgagtgaaactaaactagagtgaagtagggcagcggcagccaaactccagtgcagcggcggcggcggcggcggtgatggggccgagcaccgagcggcggcgaaggcagccaaactccggggcccgtgcagcgccgcagctcggctcccgtgcagccgcagccgaggcgaggccggagcccgcggcggcccccccaactccgcggcccgagcccaactcccccctcccgccggcgggagctgcaaaggggctccagagcggccccaactccctccagtgcaacagcagtttgaagggggggggggaaagccgtgaggggcaggagcgaggagaagtgatggggaagcactgcaatgggggagcgtggtccaggcaacaggagaaagatgcaacctcaagtcgaatgcaacatgcaatccccggccgccgctcgcccgctccctcccctcgccaccccgccccctttccaaataactacccttgaaccactttattagcagtacttagtccagcactcgctcccgggaggggcgggggacgggggccttcgctcacctttatttattgctgctttctcccccctctccatgttttttattcctaagttcttttgttctaagggggatgatggcatttacttttctgctttgtgtagcagggcaatcactgggaatcggccacgtataatccggcggtttgtcatattttattagtgaaagtattttatgcctattctacctccaaggactgtaacatggagaattgcagggaggagaaaaacatcagaagaattcttgttttgagagatttcttggcggggcgggggagggcctttttttttttttttggagggggtttatttagattttcgaatcgatagttttcaacttgaagcttaacgtttttgtatggatgtattaccggattctaaacccccaaccacaataaattttttaaaagtaaaaaatcttagattaaaaaaaacccctactggacagtgatattatctgatctgtgcagcactctggacttaacatagtgttggccttcgaatgttaaataacaataaaccccaacctcaactgaatacaaatgggggggtggggggttttgtttttaaagctcagcacttttgtagcaactgccactacgcattttccaggcattgattagccatgcaactcccataggcatgaaatccagtttttgcagataaagagcaacagtggtgagatgatttgcccaaagtcaaagtgagtcattcgcagaaccagaaatagccttggactttactagtcacatcttttccattaaataatatttctattaccttgttatgtattttcacaagaggtgctttgagatcattggatatgaaggtatttttttactttcgtgacctgcaaaattaagtttagtttctcaagaaaaagcaatttttaaaaattctgatttcttaaaaaataaaatatggactttatggtacatgtgtaggccatttagtagtctgagcttt

SEQ ID NO: 915328 - DNA, 4001 bp, Homo sapiens
caggggcttcacaaattgcgttcgggagaaacttccttgcaggcaatagtttcttctggacctagcaccaagactcctgcgggccatgcagcgaagggatagcaccctccccgccctgagcccagaccagctaccaggcttcgtcggcctcctagcaacagagattagggtccaattctggtacttctctgcctcccctactggcatccctccaaccacgaaggttccagaaatgaaggccccattgtggggtgaggagtcatgcctgtaccccttatcacctcctcagcttgttcatcaccaggagcccttctgggtgggggacacacttcctgaaccctaactgtctcagaccatccctgtctttcaaagagcacagccagaccggagggcagaaagccgtggtcagctatctcagaaagaggggcagggatttgctgcactcaggcctctccaccccaatgtcctgggccagtacctggaggtgcagggacctctgcctcctgccccaccatcggagacagcccagaactctctcctgttcccccagaagcaaaggcgaccctgcccgccccacactgcgggcactggcaaggagcggctggcggcgggcagccagagggctgagggattccttctggtctgactgcgcgggtggtttgtgggcaggaagtgctgctggggaaggttcccccaccacaggcagcagcagctcggacccagggcccttgtcctccccaggttcaattcctcaggacacaccaaggagcagaaggtagccagggtcaagccccagggcacttcctggcctctggggaggctgcttggaaaagagggtgtggaccaggcccagcagatgacacgattcatttattcattcaaagccggttcccagcgcctttcacaccagccccgcaggactggatgagggtgtcctgcccgcccattcctgggcctccaccctcccagcaggagtctcactgagccacagccggatggtagaaaagcaaactggccaagtgatttatttgcaatgggcacagtgatgcaaaaacaagatattaagactataaaatatgtgactacaaagaaccagcgaaataaatacatagatattagatagtccaataacttaaggcgcccgtgcaacggagcgaggatccgcgcgcacgggaagttcttctgctgcagggctggagagcgccggccacgtcctagcctcggtccgactcgtccagcgtatggccctgtggggaaaggactgggtcagagagctgtgccagggccggtccgggtccagcctgaggggccccgagaccctgacgcgagggggccagcgcgattgcggggcgccgggtcccccaaggaggtgcagcgcccccgccccgccgtctggggttgaagtggtttttcccaaaggccccggtcccggctgttagggcgcagggctcgccgggacgcgggcagtcactcaccgcggcgggctcatggcgtgcggggtttgggctgcggggatggcctggagggctccgagggctcggagggtgcggcggccgcggcagccacggcgtcctcggcgggtgcggcgggtgcggtgcgttcctggcggctgcgaaagtcctgcagggcgcggcggttctggaaatcgatgagcgccagcgcgatggccgcgttccagcagctctcgcccgcgcagcggaagtcgatctccttgtggtcggtggtgacgatggtgaagtacacgtacttgcccgtgcgctccacgcagtccaccttgaggatggagtggaagcgcagctccttggggcgcgcgcgggggctggcggggaacaggctcaggcggtcggaggtgagcaccccgcgcttcttcttccatagctggaagaggctgtcgctgcgcttctccaactcgccctcgcgtagcacctcgtcgggggatttcatgtcgtgccgagcgcgggactgggagcggcaatgcgggcggtgacggcgccggctctgctcctcgtggccccggcgcggcctttatagctgcccctccccgccccgcccctccccgccccgccccggccctcgggccaccccgcccgcctgagccccgcgcgccccgggccataccctccccaagcccagccgtccgggcccgcaccgtcgcgtccgcgctctggtcggtccccggccgtcccctcccatctcagaagcccgcgctcctcttgccccccgtgccccagctgtccggccccgtggggtgactcgaggtcccgccccgcccgggcgctcgcccgcaccgtctcgcaggccggccccgcggaagaatgcgctgcagccagccctgcccgcgatgactcacgccggggagccccgggaagcacccgcgggcccggggccggcccaccgtggggagacagccgggaccagaccttcaccctccaggcgccccaagtccagccctgccgctctcgggctcccggggcagaaggagggtcgaggcccccttccttactcccgagccctggccgttccgtcctgttcgggggcctttcccagggccgcccagagaccctctccgaaagtggccctgccctagcggaccgagctcctatcttgccacccacgggctgcgccaagaacgaccacctctcttagcctcggttttcgcttctgtgaaatgggaacagtaacctttgctggattagggaacacgtggaaagggctagaccagcaacccatagagctcagaaaatggaaggggaagaggaagcccgttctcctccctgcgccctcgtagtgtcccgaactggggtacggactgctccgaccgcgcccccacgacccggaccggagagaggtcccaggagctgaggggttcgggctgggccgcgacgcccgctctctgggatcagcctgggggcgagggtcggcgggggcggctgagtcatcgctttccagctgggcagacgggcggttttatttaccctcttcctttaaagggtttaatagacaggaagcgaaagccggctcttcccgggttcccaggggtgggggtggagccggccgagaggaccccagagaccccggctactactccacgtctcccaccttcccgcacccctgccccctagctgcgccctggggtggttacagcaggaagtcccaactctggggtcagaattggcctcaatgacggggctcacgcaaaatgaaaacgagagtcccctgattcaaaatgtatttaaaatgtcaagacagtggcagcagagcgtaaaacccagacctgggaccagccctacctccacctgcccttcagggtcactgtaaaggataaagagacgtccggctcagaggagcgccccagacccggttctgtgaatggcatgcaggtagcagctgcccggtggtcccaccggtgtggccagaggacctggcagtgggcagggatgtggtgtggaggggcagtgccggcagagggcagggttgggctgtgccagggttctggcctgggagtgagacacctgcctggggccggcgggtcaacactgccccctacctgacacctgtccttgcagcagggctgggatcctgtggtgagggagcagcaggtagggtgggtgggtgaggggaggtcagcctttggcggggagaggggattcgagcattgttccggagaggctgcaggaaggattcggactctggtgtcccttcttttgcttccagagggccctgggctgccggacagtgggacctgggcaagaggcacctctgggcagtgggagaccaggagaagcggccgggggcagagcgctctgtcactgcgccagcccacaggtgcctggaacacctccaggcccaccagcctgcctaccccattgaggggccagccagtggaacttcggctccaggcaaatcccccgacactcgtggttgcttaagcacctactgtgtgcctgcaggcctggctggtgctgggaccccagaggaggggagaggaatccctctaaacc

SEQ ID NO: 915329 - DNA, 4001 bp, Homo sapiens
gtgaggggccgcgtgtgtgagctggggctgcggtgtgagctgggctgtgtgtgtgactggggctgcatgtgtgagggggctgcatgtgtgagctgggctgcgtgtgtgagctgggctgtgtgtgtggctggggctgtgtgacgggctgcgtgtgtgagctggagtgtatgtgtgagctgggctgcgtgtgtcagctgggctgtgtattgagctgagctgtgtgtgtgataggctgtgtgtgtgatgggctgtgtgtgtgagctgggctgtgtgtgtaagctgggctgtgtgtgtaactggggctgtgtgtgtgagctgggctgtgtattgagctgagctgtgtgtgtgacgggctgcgtgtgtgagctgggctgtgtgtgtataactggggctgtgtgtgtgagctgggctgtgtgtgtgacgggctgcttgtgtgagctgggctgtgtgtgtgagctgggctgtgtgtgtgacgggctgcttgcatgagctgggctgtgtaactggggcagtgtgtgtgagctgggcttcgtgtgtgagctggggcctcgtgtttgactggggtgtgtgtgtgagagctggggctgcgtgtgtgagctgggcttcgtgtgtgagctggggcctcatgtgtgacgggtacgtgtgtgagctgggttgtgtgtgtgactggggtgcgtgtgtgaggtaggctgtgtgactggggtgcatgtgtgagctggggcgcgtgtaagcggggctgcgggtgtgaggggctgcgtgagcgcggggcgctttcctgtgaggcgtaaggcatggagtgcgtgggaaggcctcggcgtgtgggcgggtccgggtgtgtctgggtggcgtgacgcagggacgtaggtgtgcgaagtgtcgcggaggcgtgcgtgtgtgccgcgtgggagcccggcgtggtggggcgcctgcgtttgcgtttgacggctggggggtgagcccgccgcccgatgagtcagcctcgggaggctccaggaccgctgagctaacggcccagaatgcagccccgccccagagccgtgggtccccggcagggctgtgcggtcgcccggccaagtccccactcgagcctgcctcggcggaagcgctagcgggcgactcggccaccctgcgccggcgcccctacccagccgcccgcccgcacttccctatcccgggggagcccggatgacttgggtcagcctccgctcggggaactccgctagggattccaatagggaccgcgcgggcgtggcaaggcgccccaggcggcctccccggcccccgaggacgtggggccttggggagtgcctgggaggccccaggcgggcttcccatctcctggacacccccaggcagccctcctagacgctcaagactctgagccggactccgaatcccttcctggtccatcaaggcggccggcctggggacaggcggggagacgtcacaggagatacccccgccccaaggtcctgctgtgggcggagagggggaggtgtggggcgctggaggacgaaaacccgcgcgcgcgctcgccgcccgataccccgcgagtgtccgcccggccgcctgggtgccggcgggagagtctggatagggccaggatcagagtttctccaagggggggagagcgtcacggccccctctggcggtggcgttggcagcggccgaggaaggcaaaagcaagaggctcacaggaaaactccccataacgctcctttcgcccccacgcactcacctggggtgccctctctcccccacgggtttctgccgagctccctagcctagagctgatctcagggctctcgccaggccccggggacttccccttatccagtcctagcaccgcagcgaatgggacccgcaagtgtagtgggacggggcgctcttacctagaggtggggggggggcagggagacactggtcccttagcctggctcggctcggtcgcggtggcctcaggcttaggaggacaccgttgcttttccccgggagctcgctaagtaggaggagagcgagcctgtcccgcccccctcccgccagtccccgcccccgtcccccgtcccgtccgcctggccagccaaagaagacgcccttgtggggctggagcccaaggtccccccacccaccctttcccacagcagcacctcccccagcctgcacagcgcccgctttgttcatctttgcagctgggctctccaccatcaccaccaccaccaccaccaccaccaccaccaccaccaccaccaccaccaccaccacacatccccctctcctcccaccctgccctcccgactctcctagaccaccctccactcccaggctttaacacgcttttgagagggtgtttttgacaatccgttctccctcccccaaactctcccctctttctttttgccttagatgcctgaaacctccacgggctcccactgaacctcccaaatcgaagcccctacaacatgctctcaacatctccagaacatctactgagggtacccaggtcttctccctgtcacctcctcccctcgccctattccaagccccaccatgaagagctgtaaatgacattgatagccacgcacatcaggcttcacagactttcttaaggataggcacaagaagactcgttaaagtgtcatgcaaactccaaagcacaggaaaaccgaatggaattatcatcttgcccccatggagctccacacccctccaccccgacagacttgctggattacagattgggagatggaggcaggctatagacatacaattgagcacaccaacctgtagtaggagtgggagttaataaggaagagaaggaggcactaaacacctaaaagcagcccccaaattgagctaggttgaagtcattctccatctcaacctccactccgaaatccaacgctgacagtggatccttaccttgcaaagccagctcttggtccaggagactggctggggaggccctagggagctgaactcagctggactggacttctttgacctgcactagagggaccctggagactcttcttcactgaaggaaggagcagaaagcctgtaagtctggtctaaattccagctggggtggatagcaaaaaataatttatcctctttgagatggacaagtgctgttctaattcaatgagtttagtttgtgccgtctctccctaacccaggaacagcaggaggctgaactacaggaatctctggtcactcattgacagggctggccttagcaggggaccccccacggctggagactgaagctgaccggggccaagcagcagacaaggagggggaggggagaggccgccctttgctgccacctgctatagctaatggaggtggaacactcaagatccagaatatgctgtgggtaccaggaagtcctaggatttgaggagcgagactctagtttttcctctcttcatactgtttgaagtcatgaaagtaattctgatgaaccttcatgaggcagatcacaacagtaatattcaggctatttgggtatgtaaaaaaaggaagaaggaaaaaacccaaactgttgtatcccatgtgccaagacccagcactgaggggaggggtccagattgcagtacctcagaggcttttcacttcattctgtttcacggcccccagctcctctttactgtactgggcaggaggaatttcagggaataatcaagcctgccatggaggcagtggatgctgaggcagagggtcgaaacagcacccaacttctctcactgacctcccaacacagggaccagctgaccctatgataaaggcgctgtgcaatgtgtcctctcccctgctgtgtcaggcctctatgttcccacagttagagcactcaggggactaaagacctaccgcccccactctccatctccgccctgctccacatctggagcccatcaaaaaactcagcgctctctcacagttacgcaagaggtcgagcagctgggagctcaggaaagggggaggaagagagggaaagaaag

SEQ ID NO: 915330 - DNA, 4001 bp, Homo sapiens
tcggcggaagcgctagcgggcgactcggccaccctgcgccggcgcccctacccagccgcccgcccgcacttccctatcccgggggagcccggatgacttgggtcagcctccgctcggggaactccgctagggattccaatagggaccgcgcgggcgtggcaaggcgccccaggcggcctccccggcccccgaggacgtggggccttggggagtgcctgggaggccccaggcgggcttcccatctcctggacacccccaggcagccctcctagacgctcaagactctgagccggactccgaatcccttcctggtccatcaaggcggccggcctggggacaggcggggagacgtcacaggagatacccccgccccaaggtcctgctgtgggcggagagggggaggtgtggggcgctggaggacgaaaacccgcgcgcgcgctcgccgcccgataccccgcgagtgtccgcccggccgcctgggtgccggcgggagagtctggatagggccaggatcagagtttctccaagggggggagagcgtcacggccccctctggcggtggcgttggcagcggccgaggaaggcaaaagcaagaggctcacaggaaaactccccataacgctcctttcgcccccacgcactcacctggggtgccctctctcccccacgggtttctgccgagctccctagcctagagctgatctcagggctctcgccaggccccggggacttccccttatccagtcctagcaccgcagcgaatgggacccgcaagtgtagtgggacggggcgctcttacctagaggtggggggggggcagggagacactggtcccttagcctggctcggctcggtcgcggtggcctcaggcttaggaggacaccgttgcttttccccgggagctcgctaagtaggaggagagcgagcctgtcccgcccccctcccgccagtccccgcccccgtcccccgtcccgtccgcctggccagccaaagaagacgcccttgtggggctggagcccaaggtccccccacccaccctttcccacagcagcacctcccccagcctgcacagcgcccgctttgttcatctttgcagctgggctctccaccatcaccaccaccaccaccaccaccaccaccaccaccaccaccaccaccaccaccaccacacatccccctctcctcccaccctgccctcccgactctcctagaccaccctccactcccaggctttaacacgcttttgagagggtgtttttgacaatccgttctccctcccccaaactctcccctctttctttttgccttagatgcctgaaacctccacgggctcccactgaacctcccaaatcgaagcccctacaacatgctctcaacatctccagaacatctactgagggtacccaggtcttctccctgtcacctcctcccctcgccctattccaagccccaccatgaagagctgtaaatgacattgatagccacgcacatcaggcttcacagactttcttaaggataggcacaagaagactcgttaaagtgtcatgcaaactccaaagcacaggaaaaccgaatggaattatcatcttgcccccatggagctccacacccctccaccccgacagacttgctggattacagattgggagatggaggcaggctatagacatacaattgagcacaccaacctgtagtaggagtgggagttaataaggaagagaaggaggcactaaacacctaaaagcagcccccaaattgagctaggttgaagtcattctccatctcaacctccactccgaaatccaacgctgacagtggatccttaccttgcaaagccagctcttggtccaggagactggctggggaggccctagggagctgaactcagctggactggacttctttgacctgcactagagggaccctggagactcttcttcactgaaggaaggagcagaaagcctgtaagtctggtctaaattccagctggggtggatagcaaaaaataatttatcctctttgagatggacaagtgctgttctaattcaatgagtttagtttgtgccgtctctccctaacccaggaacagcaggaggctgaactacaggaatctctggtcactcattgacagggctggccttagcaggggaccccccacggctggagactgaagctgaccggggccaagcagcagacaaggagggggaggggagaggccgccctttgctgccacctgctatagctaatggaggtggaacactcaagatccagaatatgctgtgggtaccaggaagtcctaggatttgaggagcgagactctagtttttcctctcttcatactgtttgaagtcatgaaagtaattctgatgaaccttcatgaggcagatcacaacagtaatattcaggctatttgggtatgtaaaaaaaggaagaaggaaaaaacccaaactgttgtatcccatgtgccaagacccagcactgaggggaggggtccagattgcagtacctcagaggcttttcacttcattctgtttcacggcccccagctcctctttactgtactgggcaggaggaatttcagggaataatcaagcctgccatggaggcagtggatgctgaggcagagggtcgaaacagcacccaacttctctcactgacctcccaacacagggaccagctgaccctatgataaaggcgctgtgcaatgtgtcctctcccctgctgtgtcaggcctctatgttcccacagttagagcactcaggggactaaagacctaccgcccccactctccatctccgccctgctccacatctggagcccatcaaaaaactcagcgctctctcacagttacgcaagaggtcgagcagctgggagctcaggaaagggggaggaagagagggaaagaaagcagaaaacagctttccaggcctgcttcagactttccgaagtggaagcagggggagagggcaaagcctgggtgtggaaggaagagtggatttttctaaggccctttgcattggctacaagtgtcaggagtgaatttccatactcctgcttttgccttggcacattccccactttgtcccacctctcaaattgtactccctctagccccagagaggtgattattgctcatacagcaagcaatccttgtagatacacaccctcttccagaaagctgtccgtttctggcctctggatcctgaagtcaggcatcattggtgtaggcgtggtggtagcaatgaccctgcagcaacttggggaaaagttcaaagctctcttttcagctgtcttagaaattgcatagtctgcttcgacccaaagctaacatgcatccaagctaagtgggaaatttgggtaggacagaagactggtcttgtgtacctccaaggctaagggctttcctaatgagctaaaagaacaagcattcatttgggcaaaagaatgggagacaagacctatttcaatttctctcattgtcttgaatttctaatgcttctttcaaacagcccctgtcctggtttggtaatcaatctgatcacccagagtaaacctagggaagctttccagtattggtttagaccctaaataaccacttagcccctgccctaagaacagcagggcaaaaaaactgcggtgggggatgggagaagtggtccaagcttctgaaaactgcctaatagcttgacttgtgattgtgagagggaaaacagcctggtttggaaagatagtctaatttttctaaaggcctacctccgtatcaatccccaactccccaggataagacgttaaggcagctatttgtagtgttgctgtctgcccttgggtaacagcaatgcacagcaaccaacctacttgtggatcttctaggacaagggaattgggggtaagggggttgtaataagacagatgtgcatagcaaaagaaaatcatttgtgaggttttgcttgagattcctctagagcctacaagacagaagccatgttacctactctcatata

SEQ ID NO: 915331 - DNA, 4001 bp, Homo sapiens
ctccactgccccataggtagtgtttctgacagtacttcccttccctgtctgtaaccctggtttaagtcttcatattcaccaggggtctccaatctcatctttgtcccatccaggcctccatctcccctgattcttgtctccagcaccccatttgtattcttatcttcgtcatctctatttctaatcttctttggtccccatcgcctgatacttatctctatctccccaaccctgagtccccatttctcctaggatttccagtgcttccatctctgctcccatctctctgtaccttatccccatctctctggtctcaaaaccctgtatctctggaggctgtctcccctcttcccaatccctaccctcatctggctcagggtacccaatctccccaccctgggcctcatttctccaaatccaggttctcatttctcgtatctcttccccaaaccccagcctagggcccagtcttcttcttcttcttcttcttttttttttgagaccgagtctcattctgtcacccaggctggaatgcaatggcacagtctcagctcactgcaacctctgcctcccaggttcaagcgattctcctgcctcagactcccaagtagctgggattacaggcgtgggccaccatgcccagctaatttttttttttttttgtatttttaatggagatggggtttcaccatgttggttaggctggtcttgaactcttgacctcaagtgatccacccgccttggcctcccaaagtgctgggattacaggcatgagccaccgcgcctggcccttaggccccagtcttctacttgggtccccggcagtcttcccaggagggaaggcgataagattacatagggcaggctgggactctaatcagagggctgagatgactgagaagctcagtgaggttgagggtttggacagggacttggatctaaagtcttggggatgcaggagctgcttccgggttctacagaactctagctgggagagtctgggggaatggggaaatacaagtggcttaaaaacccgggcccctttattgcgggctacgggatctggttttggtggctacagaagggttcggtcccaggcagcgtgggtccaagacagggcaggaggggcctgatggccacgcgagctctaggaagcttcccgtctgggcagctcagctgcctggagaggtccttgctgggggtcatgcatctcgtggggcagcggtgatggggtggggtgataagtggtgatagggctgggctgggagcctttttcaaagatccagcgcttgtagaggtttagtggtcagtctttgcaggtggtgaggggaaggcctggtaaggggcccagagctggatggggatatatttccttgacctgaagggcacgagacagagatttggcaacgagaaaaaggaacaggagagatgagagggtgaggctcattcctgcggaggagaacctcgtattctgggggtctctcggggcattggagggtctggccaaggcaggaatgggggcggctgagggggacagtcgcattcacttggcgagcgggcccagggattctgcaggaattggagggagggttgggccggggctgcgctcacctgccgagtagggcgcgggctggtggtcgcgtagggcgccaagtgcgcagttggaggagccgagcgcggggcagggcggccctgccgcggggaaagcgggccgcagggggctgtattggaagccgccgggctggctgcaggcgccaaagtcgccgtaggcggacgcctccatggccgccacgcacgagtcgtacgaattgaggtaggagtagtccatcggcccggggggcgggggcgggggccgggccaggccgggtcggggtcggggtccgggtggaggtcggaagggaggttcgagcgccaggctccgaggacccgaggccagctctgagcgcccgagagtccgcccgccccgtcgcggccgcactcagcccgggtgcaacgcaagtgcagccagcccggcccgcgcgccttttaacgcgcaggaccccgcggaggggggcggggcggggcgagctccgaaggggcggggcctaggaggcccagacaccgcccaaagccgccccgacccccaccccgaagggtccccgccgccgtcttagggctcagaggtgtggagctgggatgcgcgggaccctatccccggagtccctatcctgccccaatccggaccagaccttcggtctctacacagcgtccgaggccagagggtcccgacccttttcccgggcctccccacctgcggccccgcggaagggaggggaggcaggcctggcggcgctcgtgtgaagaagttaattcaattcgctctgataaccgagttattccgatctggcccctcagccccgcccccagcgaggtcccatcccggcggagactgcggaggcggcccaggaagggggatggagaccgggaagagacggagcctgggatggggacagggaagggacgtggatagacagaggaaacagagaccgggagagaaaggggcagaaacagtgatggagacagggacaagagatacaggtacacagagggagacaaggacggaacatacacagcgaaagacaggatggagcggggacagggcagagacaggagatgagggtaagagagagacaggatggagcggggacagggcagagacaggagatgaggttaagagagagacaagaggagacagggagacagggggacgagaaagagagtgagggaggcatggagacagaaggggtcgggatgagacatggacggcaaccaggactgcggtggagagcaagggagggatgagacaaaacagaggcaggaatcgtgagacagacacatatgcccagggacagtctgagagagacagggccagggacagccacaagcgcgggagcagaggctgagagcggagagaaaacgcctccggggagcttagacacgagggctggagcgcagaggggcccagggatgatgctggaggctctggggtgcggcctccacggggctgcggagagggagggtcgtgggagccaggtccctctaccctgacttgtcccgaggcccacacgaccttgcaccttcagggcccgcctgcctctccccccgttccctcagctccatctgcagtatgcgaccctctcctgtgaccttgggctcaggatgcgatggatgtcagaaagggaacgtaccccgtgacctctttattgttcttcagtctcttacccctgttctccagggccccccgctttttttctccagggaaaccacctagactcagtctgcacctggcccagacatccctgcacagattcagtcaccagctccctcgtgctgtgggacagcgggacacattcagaatccttaccaagagaagggaacagataacttttccgtcgctcctgagctgggttgggcagctcgtccactcaacccccagcctcttccaccgatcttggcaggtcttgtagatggggagtcctagacccatggagaagccgcgggaagggcgtgtctttgtttccagctgaagtccttgggggttgatagaaggactcctggaattctccccaagtttgtcaggacagaggggagtgcgcctctcctcaggtaatccttcccccatcatccgttctgggcttcccaggaggactctctatccccaatctccggaaccactccatgccaggggatttctttgaggtttctcaaattacctcttgtcaaatgtttttattgtggcaaaatacacataacataaaatttaccatcttagccactttgagctatagttctgtggtagtaaatacattcatatttatgtattaatacatccatctccataactctttgaatcctgtaaaatcaaaactctacccgttaaacaacaccttccatttccccatcctacctgcaaaccgccattcctctttctgtccctatgattttgtgtttttttttttcag

SEQ ID NO: 915332 - DNA, 4001 bp, Homo sapiens
aactttgcgagtccatgcacctgtggggctaagtcctgaggcctttgaactttaccacagctggtgagggaagactccacgggcctcttacactcctccaccacagcagcaggaacgttcaggttacgtgaggctgaacaacatccttcctcgatatcacacaaaagtaaccaggggctattttgccagagaacacaaaataacccaggaagcctccgcaggtaccctctggcacaagcaccaggcacaagacctgtttgggaccaccaggacctgtagttaggatgctgggttaatgggagcccctagcttaggacctcctggttgcaccagcagccccaactccaacaaatcttcccttccccatacccacctctgccatgtcccaggccacaggccaggaagccatttctgcagaaaagaccacagcccttcccagctgctggccacctttggctgggctagcagagctctggggtggaggaaccactgtgactctcctgcttagcctccagatttgggggattaaagaggaaaacaaaaaactggaaaggctatttctctctcttttcaaattcaggggaaccaatgcattggcagtcccaactgttactaaggaatgaaaagggcctctggtgtccggggtgcctgcaaccccgttccacgccagtctcggcacctgagtgcccatcccaggcactgaacaagcctgcagccaagtccaacacctcaactcaggccgacttttattcttgtattcaccatctgctgtatcagctaggagaactcaaaattgtcaactgcaatggaagtcaaaaagtcaggcacgcacaaaggtctccgcgggcctgagataaacacagccctgctgagggccaaggccaggcttgtcatggccatgatgctgaggtgccatccatccactagcactctgacttaacattcttccaataagaaagaaaaccggatggtccaggagagagatcaactatgccaaacccgaagtcaaacctcagctcggcctcagagcctgtccattgaccactggccagaacgtggttcacccagctgactgctgttctgctgttgtcgaaacaagtaaagcacataaactccgaagaaggggcaacacaagccccgtcaaaaggagcatggtaggagtcggggctggcgcggatccccggctgccggcgctggccagttacttagcctttctgggctccaatcccctcctctgtaaaacgggaacaatacctacacctgagaggctcttgtgaggactgcaagagttaaggaataggaaaaccgccagccacacaggcctgtggacatgcagacaaggccagaagcccacgacggcaaccatgcacaggggccggacacaaggcaacgaagtcacagctctctcccaaacgcggcagggcggactcgcagggggcatgggcgtgggtgccacagagcgaggcgagtgggctctcgccgcgtcctcgcaagcccaggacgtccgcccgcaggccacgggcctcccagtctcggcggggcctcccagtctcggcggggcctcccagtctcggcggggcctcccagtctcggcggggcctcccagtctcggcggggcctcccagtctcggcggggcctcccagtctcggcggggcctcccagtctcggcggggcctcccagtctcggcggggcctcccagcgcgcgcgcgcccgcccgccctcccggcccgcggccagcgcggcgcaggcctcgccccgcggtgcaggccgcagacaaagcgcgtggcgcccacaggcggcccgcggcccggaggagcagggcccccagggccggcgcggccgccgcacttacccggaaacctcgcgtcccgcagccgctcgcgagcgctcgccgccgctgcacgaccgagagtcgctcctaggcccggccgccgccgcctctgccgccgccgtgcgctcttcgacccggaagtgcacggcgcctcttccgggctcctctgtcctgctcgctgactggaaccactgagaccagagcgggaaagaaatgactgaagtgaggaaggtgccactccttgcagccgggggtctcgaggcgttcaaacggcctcccttccaccttggaaacactctttaatgcaggactgccgcccggggagaccaatatcctggaagagctcgtactgtttaacccgcgaccatgggctggtccaggccgtcccccccgcggccgggacagctggtaccgcccggatctccgcccaccgcccagagcgaatgggagctgcttcctgtacgtcagctccgcccccacgcccgcagccccgtccctcctcgggcccgcagccccaccccgcccccacgcacgtagccccgcccccacccccgcagccccgccccgcctcgcgcccgcagctccgcccccacgtctgcagccccgccctgcctcgggacggccgcccacggccccgccccctccctcgcagccccgcctcacgcccgctgctccgcagccccgcccccaccctcgcagccccgcccccacgccgcaaccccgcccgcagctcctccctagccccgcgcgcggcgggagcacctggggagaagagtcctggcgtcgcctgctaccagcgccgcgctcctctgaacaaacactgccggagccctccgtgagccggctattccagcccagccccgcgtccgcccgtcccgcagcaggcgcggtgaatcgtgcgcgctggcggacgaggcgggctcggcaggacgctgctgtgccgtcccgtgtggatttggctccaggtcgtcctgaggatgccgcgcagaagccgtgtgggcctcgggacgcaggcctgcgtggctgcagcgcaccaggggaggctccggggatcccgagctggcgcggactcgcgagaccccctggccgctctgcggggagcgctggggaggcgtcccgagcgggcgccagagacccgcgggctccccgtgcaggggctgcctgggctggggcccgggtgggtctgcgcaggtgtgggaagtgccggctcccggtagatgctgaaggcggagttgccaggatttgctgcggacttttggagaaatgaggcggggaaggacgagcttgagaaccgacgccggagagacggggaagacgggggaggcctgagcgcgggctggcatggctggggaggttgtgcactgcccaagaatgctcactgaggagcgtgttcacgtctcatcgtgggtgtctgtgtttattatgacaactaccagcagcccccgaggagcagcgacagatggaggtcgggggctctaagctgaacacaggcggtcggtcctccttcccaggagcctcagcgtgtgtgtccgcaggtgcccctttatctagcgcccttgggggaatgggacgtgtcagaggagatgcagtgggcagaggctgcactggatgaagagaactatgtgggaatcgcatgtggggtgtgactggggaccagtgcctgaactctgggactccaacttgaagaggtttggaatctgcaaaggagactaggaaggggcacagggggtgctaggggtgggggccggaggacaaaccaggagaggggcttctggaagccagagagggcgtgcacacacaggcgggggagggagcctgggtgcagcagggtgggccactgcgactcaccgagggccagcggcgctggggccaggggctggagtttggagagtgagcagagagcacgcaggggctgtgaacaccaacttctctttcaggtcaatttgctgcaaaggggaaggtaaaggtggaggtaactaaggagcagggcaagagaggggtgtggttttctgtagggtccagccctacgggggcttagcaggtgtcctccccgtgtgcagagaccagagattgtaataaagacacgagataaagagcagctgggccccgggggaccactaccatcaagacgtggagaccggtagtggccctgagcgcctaggtgcgct

SEQ ID NO: 915333 - DNA, 4001 bp, Homo sapiens
ataggcttctgtgtagcaaaaacttgttctaacagcattcatgagcacagtaacttggaagaatctacatttcgtacattttttttaaagtgcaaactttacggccaaagtccaaatgagaaatcaaaacaggcttccagacagtgaattatctttcagggcatgctcactcttgcttcaaacagtaaaacaaagtaactttcatgtatgatgaaagtcagtcagactaatgtgtccagtcatttaaaaagggaacttacttatcgtgactattgccctatttttccctgaaaagtttcaggtctaagctccattggcttgagtgatccaatgagctttgtaccctggggtaaaagagcgcaaagaaaaaggagggtattacaggtgacttccaggttagaaaaaagttacgaggagttagctctactaattgtatctacgttagcgaatggacgaatactatgtcgtgtaagagaagctaaagctagttcctcaaaaggtaactggcataattaaaacatccaaactcaagcatcatcaaacatcattttgccaatttttttaagggatgtatgttatttgtaagtaaatttattaatccatttggaattccaacagtctacgcttaacactcaagcttctgaattcaagccgccagaattaacagttccaggaactgataagagtatcagcaaaatgcctttttccatatccccatgtgaaaagctggggggcagagctgacagtcacaaactcaccccagtcaaaagtatggacaacacaacgattaaattccaccagaggcaaataaaaatcccaactttccagaaagctttccctacaccaaattgaatccttttactttcactcccacaaagaaggtaatctgaaataaaagtcgggtaactgggtatggtatttaaaatgagtcgaagaaactacactgaagctactatagaggcgatgaaaaggtaacccaaaagcaggagggaaggtggaacagaaagccaggaagggatgggcgaagcagctagtggagcaaaggaagtgggggatcccttccagggaggcagcccggagggataacaaggatctggatgcaaggaaccaggcgtttactgaaacccgaaggaggctgatgaagaaacaatggggcttggagacgctcagacgagggcgacgaggcggcaccggacgggtgggaaggaagagcagaaggctgcagtggagacgggtagggggtgagaagccaggtggggaagcaagttggttgggtatgatggggtgtggtagcgcaccgggcagggagacgagggtcccctaggaatagggaggggagtggcttgtcagattttgagacggggagcggaggccgtgaaggcaggtgtgatggaagcaaaagaacacagctcaacgggcacaggaccggccgtgccagagaagacgcagggagggaagaggcagtagaagggtgaaagacaagagagagagagaaggacgcgcgcgggtcgcgcgggcgccggggagcgggggccgcggtcggcttcactcacagtccaggtgctttttcttgggccccatgatctcgtgggtcgtggccttgcatactgtcttggatacggcagagccggtgacactgtgctgggcggcagtgattcggtccgtcaggctctggccggacatctctgcagctcctccaccaccccacccgctcagcagccggcggggactgggacccccaagagccggagggtccccaccccccaccgcaccccctacccccaccggctccttccccgcctgccggcctggggcgcggttcggggccgcgcgctgccaccagtccagagagaaccggctcgtgtcacccgcggagtcggacaagatgtcgggcactcccttgcccccgcctcagttcagcccaccccttcccgggtcagctggagccgggcagggtaagaggaacaggcagctgcaggaaaatggcggcgccaggctcctcctcggagctttccgggctgccccgggtcacgtgactcggacaccgcccctcctcccttctcccgcccctttccccttccctttcctcttcgacgcccgccctccctcgctcagcgagggaagagctgggcggcgcccgcgcgttacgtgatggaactcgccaggcgggcgcaacaggaggcccgcccgaggggagtgcacagccggcgcatcacgtgactctccctgccaacaggtcgcctgaggctcggcccgcggggtcacagacgccgggcggggcggggcgggagaggaatggcgagggcggtgtgctggcgggggtggggcggggcggcaggcttctccccttatccccccacctcaagtgtgtcctcgtgtctgtggttgaaaccaacagcttgacaaaggaggtgcagctgccttcacagcttcccctgaagtggggggtattaggcctctggctccccgagctttcccagcagagtcaagaatgtatttcaagacgcctcccaaagccgccctcctggcttaaaggagaaggttccaaacggcctattttctgaaccttccagcaggcctctctctaccatggaactattgaagctctccttatttacttaccccagaaaggttttttcccccctttccttgagaggcttggaaatgtcacctggttttgtttatctctactccgaaaacccgacacgttgctgccattctaaatttagatactagctggccggtattcattctctagggtgtggaataggacaggaaacacatagcttcactggaatttgaaaagggaagtagtaggatgatgtcaacagcgattagcttgaccctacatggctgactgctgtggtgattaaaggtccagaccatagaaggaagtgagaggggcggtaaatggagaagtcccattcaaacagtccagacatcactgcctgccatctcccctggtttagtctttcttacctttggcctcttttctcttattgggtgagccagatttccatggaaagacgttgacactgccctgtggacattttaaaagaagtattacatcctgaaatactattcaatgagacccagaccatacattaacaaagccttttatatgttattagagcctctacattcaacccagggttagggataagttgaaaaatatgtgagtgctaagttaccatgatagtcacatgtaatcttgctagtttcaaatgaaatgctaacattctcagaaagtctgtgtacaccatctgccagccaaatccaaaatactgtgcttcaatctggtgactctcaaaggatgcaaagctgatagatatttaacattttatgtatcatatcaggaattttgtggtctcccattttccccacgccccctcacccctcttttttccccactatggctggtgaaattctgcagcaacatgctcttgccaagaacacacaagtttttaatcccagcaggcttcatctttgtcaagccagcctccaatttcacaaaactataatgaattccttcagtgtactgcaatccatctgtggtttggtgcccagtttgctgccccacgtccactgggcagtggaattaccaaattctcaagacatgttatcagccatcattgctactggtctatgggttccactgtataagttactgattggcctgagcctctgcattggtaaaccccaatctgaggtcaacactaacatggtctagctatcaacagctgaatattttatccttagggaaaatgccagtcattcctaagtacataacaggaaagtattacactattacttttaccaaagaggttctttcagaccacttttgtgacaataattgttgacatgtttaccctattaacaaacaagctgctgttagaaatattttatttttttccaagtatacatagtagaatttctaactatgtaaataatcagtaatcattgaagaggtttatgtgtggttgtgaactgaaatatatgga

SEQ ID NO: 915334 - DNA, 4001 bp, Homo sapiens
cgattaaattccaccagaggcaaataaaaatcccaactttccagaaagctttccctacaccaaattgaatccttttactttcactcccacaaagaaggtaatctgaaataaaagtcgggtaactgggtatggtatttaaaatgagtcgaagaaactacactgaagctactatagaggcgatgaaaaggtaacccaaaagcaggagggaaggtggaacagaaagccaggaagggatgggcgaagcagctagtggagcaaaggaagtgggggatcccttccagggaggcagcccggagggataacaaggatctggatgcaaggaaccaggcgtttactgaaacccgaaggaggctgatgaagaaacaatggggcttggagacgctcagacgagggcgacgaggcggcaccggacgggtgggaaggaagagcagaaggctgcagtggagacgggtagggggtgagaagccaggtggggaagcaagttggttgggtatgatggggtgtggtagcgcaccgggcagggagacgagggtcccctaggaatagggaggggagtggcttgtcagattttgagacggggagcggaggccgtgaaggcaggtgtgatggaagcaaaagaacacagctcaacgggcacaggaccggccgtgccagagaagacgcagggagggaagaggcagtagaagggtgaaagacaagagagagagagaaggacgcgcgcgggtcgcgcgggcgccggggagcgggggccgcggtcggcttcactcacagtccaggtgctttttcttgggccccatgatctcgtgggtcgtggccttgcatactgtcttggatacggcagagccggtgacactgtgctgggcggcagtgattcggtccgtcaggctctggccggacatctctgcagctcctccaccaccccacccgctcagcagccggcggggactgggacccccaagagccggagggtccccaccccccaccgcaccccctacccccaccggctccttccccgcctgccggcctggggcgcggttcggggccgcgcgctgccaccagtccagagagaaccggctcgtgtcacccgcggagtcggacaagatgtcgggcactcccttgcccccgcctcagttcagcccaccccttcccgggtcagctggagccgggcagggtaagaggaacaggcagctgcaggaaaatggcggcgccaggctcctcctcggagctttccgggctgccccgggtcacgtgactcggacaccgcccctcctcccttctcccgcccctttccccttccctttcctcttcgacgcccgccctccctcgctcagcgagggaagagctgggcggcgcccgcgcgttacgtgatggaactcgccaggcgggcgcaacaggaggcccgcccgaggggagtgcacagccggcgcatcacgtgactctccctgccaacaggtcgcctgaggctcggcccgcggggtcacagacgccgggcggggcggggcgggagaggaatggcgagggcggtgtgctggcgggggtggggcggggcggcaggcttctccccttatccccccacctcaagtgtgtcctcgtgtctgtggttgaaaccaacagcttgacaaaggaggtgcagctgccttcacagcttcccctgaagtggggggtattaggcctctggctccccgagctttcccagcagagtcaagaatgtatttcaagacgcctcccaaagccgccctcctggcttaaaggagaaggttccaaacggcctattttctgaaccttccagcaggcctctctctaccatggaactattgaagctctccttatttacttaccccagaaaggttttttcccccctttccttgagaggcttggaaatgtcacctggttttgtttatctctactccgaaaacccgacacgttgctgccattctaaatttagatactagctggccggtattcattctctagggtgtggaataggacaggaaacacatagcttcactggaatttgaaaagggaagtagtaggatgatgtcaacagcgattagcttgaccctacatggctgactgctgtggtgattaaaggtccagaccatagaaggaagtgagaggggcggtaaatggagaagtcccattcaaacagtccagacatcactgcctgccatctcccctggtttagtctttcttacctttggcctcttttctcttattgggtgagccagatttccatggaaagacgttgacactgccctgtggacattttaaaagaagtattacatcctgaaatactattcaatgagacccagaccatacattaacaaagccttttatatgttattagagcctctacattcaacccagggttagggataagttgaaaaatatgtgagtgctaagttaccatgatagtcacatgtaatcttgctagtttcaaatgaaatgctaacattctcagaaagtctgtgtacaccatctgccagccaaatccaaaatactgtgcttcaatctggtgactctcaaaggatgcaaagctgatagatatttaacattttatgtatcatatcaggaattttgtggtctcccattttccccacgccccctcacccctcttttttccccactatggctggtgaaattctgcagcaacatgctcttgccaagaacacacaagtttttaatcccagcaggcttcatctttgtcaagccagcctccaatttcacaaaactataatgaattccttcagtgtactgcaatccatctgtggtttggtgcccagtttgctgccccacgtccactgggcagtggaattaccaaattctcaagacatgttatcagccatcattgctactggtctatgggttccactgtataagttactgattggcctgagcctctgcattggtaaaccccaatctgaggtcaacactaacatggtctagctatcaacagctgaatattttatccttagggaaaatgccagtcattcctaagtacataacaggaaagtattacactattacttttaccaaagaggttctttcagaccacttttgtgacaataattgttgacatgtttaccctattaacaaacaagctgctgttagaaatattttatttttttccaagtatacatagtagaatttctaactatgtaaataatcagtaatcattgaagaggtttatgtgtggttgtgaactgaaatatatggagaaatttaaaagaagatggggaattgttctaagggtagacattactgacctatgttgtcttatatgcttaagttttctgtgtcagtttccttggtctattcaggaaatatctctacctgaagttccacagatgccaactcaccatggccaatactgaacttctcttgcccttgcccagcatcctacatctttaatccatactgttccctatatccgttaatggcctcaccacatgtccagaagctccgctcagaaagctgtgattctgagttctccttctgtcttatttccctcatcaagcctaatctacttttatctctcaaacacatcccatctctaaccccacttctgttgccttagttccagcctttatgatctctgttatactagactgttttagtaacttcttagctgattctctgtcttttataccctgactctccaattcagatccttctgaaaccaaaatgtgattgtcttttctttgcattaaaatcttccagtaactcccccatcgctaccctaaaggatgaaattaagaactctcaacctggcatacatggttcttcatgatctggcctcattttagaagtttctaagtatgtaaataatcagtgaccattgtagaggtttatgtgtaattgtgaaatgaaatacatggaccaatttagaagaagatggggaattagaactaagaataggcattactgacctactttatcttatatacttaagttttctctgtgtcagtttcttcagtctatttaagaaatatcttacctga

SEQ ID NO: 915335 - DNA, 4001 bp, Homo sapiens
ggaggtagcgtgtccagcagattctgagagagatcgaggcgctgcagggtggatagggcccccagtgctgggggcagcgtctgcaggcggttgtgtgtcactgtgaggaaggtgagggcggggagggcccccagagcctcaggcagctcagagaggcagttgtgagacagcaagagcgcacccagacctcgcatctgcaggacacaggccggcagtgtctccaggctgttgaagctcaggtccaggtgggccagatgggccaggccactcagaccagcgggcaggttggtcagggcaccccggagacaggcacccagtgtgtcccggcgttgccctcctgggaaggggggaggcggatgtggccctcagagccagggtccgaggtcccagatcgaccctgccagccagagaaacagctgctcgagaggcacagacctcccaccccacccccaccccagccagacagggacagacagacagaaacactggagaggtgcccgcaaatggaaggaggcaggggtggagaccaccggctcatctcagctgacaaccatcacccacaaccttccccaggaacaacatctgcactgtggtctggagagacccccactgggcagcgtcagggtccaggagccagggcccagccagccccacactgggggtggtgatcaccgaggatggcgatggggctggacaggaccaagagcagaacagttcacacctggggagccgggaggggcggcctggagctggggctgggactggggtttgcctttgagaacatgcagcagaggcagggcagagcgagagatggagacagggcccagaacaggtggaactcacctttgaggaccagggagcggaggcaggacaggctctgaggcagctgggccagggtggcctccagcagctgagggtcctcgtgagtgctcagacgcaagaattccacctgcagcagctgcagaggctgctggacacacaggtgcagcagctgctggcagcccccggggtacaggtccaagctcagccggttgccgcccaggaaaggcagcgccctggaccctgcgtccgaatcctctgaagcatctcctgcggcagcagctgcctccagctctggcccctccaccgttgcagccatcgcccaccgacggtccttggaggccagacatgtcccagcacgcaggcaggcctgtccaggcagcgcccggggaagctgcagaggcaggaggaggagtgagcgggagccggggtgggcccttctctttggggaaacagggactctggatggagtggggagctctagagccaggccatctgggcctgggctgcagagtgggggagaccttgtggtcaccctgaaccccggaggcctgggtcaccactggaaagagggttggggaatgggaccgccatggctcgcaggagcaccgggcagggagacctcgctatgagcagcaaagccggggtagtgaggcttcagtcctggtcctggaaatctggccaatggagccgtggagctgcgaggtcataggggctgttccccagtcctggagatgagtcccccttctatttacatccgttttaccaggaaggccgtgaccctcccctaccgcgggggtgactgcgccccgaaagtcagggaaggccgtgtaagggtgagggcctggggcgtgagccattgggcagcttcggggtcctggggccgggaccccaattcgtgagccccggaggaaacctctcccggcctttccagttcggtccactggggagggtggtgcaccgcgcaccgctcagacggcgtggggggcgggccccagccccgaggcaggctcgggatcccccgggcgtcggggatgggaacggcccccagcctcccaaaagcaaacgtgtccccgccgccccctccgcccgcccaggccggcgcgtacctgcgctgcaggcggcgcgcaaagggtggctgctcagcgggcgctcggcgcctgggatcccgccggcgcgtttctgggtgggcggggactgcagaccccgccccttgggccccgccccctcgggacgcgccccctccgccgggctggggtccacgggggaggtctcccggctcctccccgacccgccttccctccgcctgtcgcagccccggagacgcggacgcgacccgtccatctgccgagccgcccgcgcagcagcgctcggcttcctgttagtccgcggggtcggagccgtacagcctcccccgcccggaaggccacgaaacccgccctttccgaggttctcggggccccgggccgctccgaggcagacccggccccaggtgcgttcccaggccggggtgacgggggtactcttgccgctgccccgcacccacccctgctacaagccggaacaattgcagtgtcctttccaaaccagcccaaacggcctcctccgggaagcctgccaggacctcctctctgggcctgcaaagacccttcctttcgagccatcactctgggccagaagcagtgagcctcctggcactgtctccttcaatcgcgcaggggagaaggaggcgttaagagataaaatattgagcgggcgcggtggctgacgcctgtaatcccagcactttgggaggccgaggcgggtggatcacgaggtcaggagtttgagaccagcctggccaacatggtgaaaccccgtctctactaaaaatacaaaaattagccgggcgtggtgatgcgcgcctgtagtcccagctactcaggaggctgaggcagaagaatggcgtgaacccgggaggcggaggttgtagtgagccgagatggtgccactgcactccagcctgggagacagagcaagactccgtctgaaaaaaaaaaaaaaaaaaaatcagatattgcccgaggccctgtagctggtgagggtcaaagccaagaacctgaaatctgccctgtccgccttccccaccaacatgatacccccgagcgggcctgtgctttattcaccagcttcctcgcccaggagaacaggtacttagggagggaacagacaccaccagctatgcctgcttctttcctgaggtcatatcagcggctcctccttccccaccaacatgatacccccgagcgggcctgtgctttattcaccagcttcctcgcccaggagagcaggtgtttagggagggaacagacaccaccagctatgcctgcttctttcctgaggtcatatcggcggctccttcttccttccatttcccagctaccaccatccctccctctgggacaggcaggtctcttccaggcctccctgcttccattcaccccagccccttccatgtagggcctggagggatcttttttttttttttctttgagatggagtctggctgtgtcccagaggctggagtgcagtggcgtgatctcggctcactgcaagctccacctccagggttcacaccgttctcctgcctcagcctcctgagtagctgggactacaggcgcccaccaccacgcccggctaatttttttgtatttttagtagagacggggtttcaccgtgttacctaggatgttctcgaactcctgacctcgtgatccacccgcctcggcctcccaaagtgctgggattacaggtttgagccaccgcacccggccaagagatctttttaaaaaccaaccacaggcctgatgctgtggcttacgccagtaatcccaacattttgtgaggctgaggtgggcgcatcacttgaggtcaggagttcaagcccagtctggccaatatggtgaaaccgtgtgtctattaaaaatacaaaaattacccaggtgtggtggcaggcgcctgtaatcccagctactggggaggctgaggcacgagaatggcttgaacgcgggaggcggaggttgcggtgagctgagatctcggcactgcactccagcttgggtgagagtgagactccctctcaaaaaaaaaaaaaaaaacaggctgggcgctgtggctcgcatctgtaattccagcactttggg

SEQ ID NO: 915336 - DNA, 4001 bp, Homo sapiens
ccaagtaagtcatttcatgtattaaaactgcgtttgattatactgttgttatttgatttccccaaggctgctggcttttaattaggaatccagactggggtggtggctcacgtatgttaccctagtactttgagaggctgaggtaggagggttgcttgaggcctaggagttcgagattagcctgtgaaacatagggagaccctgtctctacaaaaatcatttaaaaattagccgggtgtggtgatgcccacctgtgatcccagctacttgggaggctgaggtgggaggatcgcttgggctgcaatgagctgtgattgtgagctgtgattgtgccactgcactccagcttgagcgacagagccagcaagaccctatctcaaaaaaaaaaaaaaaaaaaaaaaaaaaaagtctgccaggcgcagtggctcatgcctgtaatcccagcactttgggaggctgagtcaggtggatcacctgaagtcaggagttcaagaccagcctggccaacatggtgaaaccccgcctctactaataatacaaaaattagccgggcatggtagtacacacctgtaatcccagctacttgggaggctgaggcaggagaatcgcttaaacccgggaggcagaggttgcagcgagccaagaccacaccattgcactccagcctggtgacaaagtaagactctgtctcaaaaaacaaaacaaaacaaaacaaaacaaaaaaaaaacaaaaaaaattagcaatacctaagtgtaaagtattctctggttattctgggatcatttcattcaagacctccccatccctggcaccaactcgacataccagaatcctggtctgtagacaaagctgtggttctggggcagcacagagctgtttcccttctttcagctgctgctgaataaacttctcatagccctcagggtcactctgagctagatcatctaggaggttccaaaactgagtaacttgggtaagcagaccttttgaggatgtctccatgacttatgagtggtgaataattttcttaagcctgtggaaaaacacgacttcaggaagaaaactgtctgtgtaattattgattcatttctgctttggggaggtggaatgggtcaggaattgttttggtgaagttaggacagcatttgtgtctaaaaggttgtggatcagcaccactttatgttttccttattctttaattatctagtacctcttcctaaattctcacattgtcctctcagataaggccttacttctatttggaccctgacaagtcagagtaatcattttaagtctgggtttcctgatcttcttgttccaacacctgactggtggctccccagttctgaaattgccagaggtgtggtgtggggtgagggccacataagacttccttaatcctcagtatagtttagtatttcaaagcatggacttgtgagccagaatgcctagattccggtcttagttctatctctcactagctctgtgaccttgagcaattaatgttctgttcaaaatgaagacgataatacctctaccataggattattgcgagattaagtaagctaatagagaggctgggacacttctctacgtcttcagataaatctccttagcctcttctcccattggagaggtgtcccacagcatctttagaatgaggaaaagaggtttagattcttcaattactgtgtaagggttatgctaaacgggaaacttaactaacggataatcattccataggtctgcaaacccacctcttctctcagttctaacgggtaatcattctataggttggcaaacccacctcttctctcagttccttgacaaaccgcgacgcctgttaccagggtaaccagcctgggtacaacatctaattgggtccggggaacttcagggagaaaagtctcttcatatctagttccggaatgtcccccttctggtgccaggcttgcttttcagttgggcctgacccacttctcttccaggaaagcgcccgccttccttctgcacccgtcaacctctggagtgtcctgaaaaccctcccttgtgggagtctctgggctgcctgttggtgggacgatttctcaggagcacgacttccggcctgaaaaggaagtctcctcctttttctcccaaaccacttcttcccccctaccccccgccacgcgaggctgcggcgcacggtatgggtgtgtttgtgtgtatttgtgtggggagggcgtttggagggaaggttaccgggagctccgaggccgctggggaacagggatcccggtgacaaagatggggatatttcctctgtcttccacttggaaacctcaacccccgcttcaggctccctagatactttctggggcccaaccgaaggccgtagccatccaaagcgttcccagcctttctggggagtgaaacttacccccggggttcgtcctagaggagcgtgagcggggaatgcccaggtcaaccgggctgtccgaattccgccccggctcagcctccggcctcagtccgggagagagatctgcctgtcggtctgggctgggggaaacgcggcagtggcctgggccacaggtgagggcagagtaaccagtgggaaggctgcgttttcacgaaggactcgggtgaagctgcagagctgcctttgagccctgactccttggcttcctgggtcggaggagatcttgtaatggagtggttcttcgtctcactagcaagatgcctgatttcctcaggatcaaggggtgagtgagcgttggggtggttgcacaaagctcctgctagctacacacgaaaatattcttgtcatctagtttttggaagcttccgtagcaagtaggaaataaaatgcccccaaatggagaaatttaggacatctttgcatttgatgttttgagtaatcagtttctgttactgttgacacccgtggttcctgacactctcaaatctacgtatttgcttcagtgcaaactatattgggattggaggtttgatttttaatttagacagtgacatacatcatttgcctgggactatgtggcttgggacgttacagctttaagggaacttcatctacaaaatagggatggagatacttgcctcatataaaaagtagttatgaggattaaataaaatggtgctcatgaaagcacttaattttatgtagtcttgtgcattttcaaagaactttaatgtacattatctcctttcatctcacattagtgtgtttaggcatttccctcttttaatggtaaagggaaaactattctttagaatctctgacttctagttcagtgatctttcctgtacctcatatgcttctttataaaacttcaagaaaagataaagtaataacagaaattattactaaacgttatttgttgattcatttcagattgaagaatgtcccggattccactggggaaggtcctcctgaggaatgtcatccggcacacagatgctcacaataaggtgggaggtacaacctagttactcctcaacgcttactgaaggcaagcagtgtgccaagcattattttggaacaactgggagatacaaagaatattcttgtcatctagtttttggaagcttccgtacacagtaggaaataaaatgatgaataaaatagataattataatacagtttgataagtactgtataacagagatatttgcaaagtgctttggagcactaaggaggaaataataaaatctacactggggaattagaaaagattttacagaattagtggtatttcagctgctgatctttgaactggttcttgaataggtatacgtttaccaggtatgaaatatcattctggatagacagcatcatgcattaatatggcaacgagaaagagcattaatcacttggggcatggcaagaaatttatccagaaagcagggaaggtaggggatagtggcagaagataaggcctcagtggtaattagagttggattgtgatgtttggagctgagacttcttcctctaggcaat

SEQ ID NO: 915337 - DNA, 4001 bp, Homo sapiens
aggatacacagatataaaagcaaaacacaaatctgcaatggtaatatttcattcttcacttttatcgacaaaagtgtttaaagggagagtcctttaaattgctcttctctctggggttatttattcattgattcatggttaaaaacaacaaaacaaaatgcgtgagaatttctataatggggctaaaaaccaaaatttcttatttgcatttaaaaaaaaacaggaataaggaagagaaagaagggagcatatgtaatgaggagacatggacagacaaatttaaaatatcttaaatgcctctcagtgacagccagttccttcattagaggctttttatttacaatcctagaaaaatattaatagcaagcaatttttcaattggcctaatcacatttcatcctttgccacacaagcaaagaatcaaagcacacttgagagcaaagaaaaacaaaattcaaagtgaaaaatatttttttttcttaacaaattatgggctgggcgcagtggctcacgcctgtaatctcagcactttgggaggctgagacgggtggatcacgaggtcaggagatcgagaccattcttgctaacacagtgaaaccccgtctctattaaaaatacacaaaattagccgggtgtggtggcgggtgcctgtagtcccagccactcgggaggctgaggcaggagaagggtgtgaacctgggaggcggagcttgcagtgagccgaaatcacgccactgcactccagcctgggcgacagagcgagactccttcttaaaaacaaaaacaaaaacaaaaaaacacaaattatgtacacaaatatgaactctgtgttatactaagtttgagaagttagtaagaaaagactatacctgagatatatggccctgggcttttgcaagctgagttgttcgaatatttaaagactggcttcttgtaacagttgccacagaaagggattttccattcacctttctttcaagatgacaatttgctgtcgatctctcttcaagaagaacagcatcccaaggatcctttgctagcaaacttgaaacatttttctcttcctcatggtctaatacctccacattatccaccttaggcttacttagaggatccaagtctaaccagtcaaatttactgatatcctcagactttggagatacctgtagattgctgacttttgaatctgttatctccaaatcagtccttgctttcccattttttaaaaattctgatgtactagctattttgtcaaatagttttgccatgtcagtactgactactggacgatagataggtaagcttccttgtggatgaaagggtgtggcaggtgtcaaaggatatgagaaatatggagattgtcccggaagacttaaatatataggttctgtagatggaaaagtgggcattcttggattgaagccattttggaatgcagcctgtttactgtaagtagaaggataaatagaaggtaaagcataagtggaaggcccaggtaatccaggtggccactgtcctctctgaatagtaggtctaaaatagagctgtgctgaaaaggaagggctcagaataggagtaactggtaatacaggtgtttttttagtctcgaaactgtcatccagcaatagtttctcaagttcagcttgggtgagcttttctacatcaatatctaatgctcttttttgggaatctgattcaggaaacaccatgagatcataatcctgcttgttataaacctgtgctttttttctggtgctgcttgacaactcaaagcctctctgattgtcagtcacttgtctatccttttgcagttttgctaaagcctctgcttccatctgtaatgcttcttctttgtccacatcttttgctcttgttggttccggatgtgaagatggacattctttaaatccgctgttgctagatatctgagccatgtccactaaaaagaccaaaccttccttcctctatttttttcttgtagcttccaaaatagcaaggcctatacataaaaataaacataacactcaattagatttctaaacataaatatattttgtttgcaacctaccccatatgactttggactttaagccacttagaaaaatatactacaaaataaacaaaataaaacagataaaatctgggtgaaggaacacttaacaccttatacactgttgggttacagaagatgttcagatacacattactttaaccccatttcctgacacaactggaaagctggcacagtaaatgaactttagacgctttcattttagcagtcaaaatggctgccattaaccagtggtacttctggcagaattcttagcatgaaatgacttaagtgctagtcacatattttcaacagttcagacagggtttaccaatatgcagaaatagcaagtcaaaatggtttttgatcttttgctatttgttaaattgctcaaaagccaattagcaataaaaacatccaatacctagtcaataaaacaggaaactattattttatcaaaatactatgtgcaaaactgataaaggtttaataatcttccagaaatattaaaaatgtataatgtaacatggatttgaataataagacaaagtgttaaggcttattagaagttctgaggcaatatttcactcaaagattaaattatagctgaattggccatatagttttaattacatttctattctgattctctgcagttaaatcaatagttataataccaaaatttctccttttcaaaatccttaaatatttttattcttcacgaaaagatgagaagataatttttaaactttgtcatagtttagcttataaaaatttatactcctctatttaagacaaacacttaattcagaccaagattaccctgtgaagcaatacgaccaactgaaaggttgcttagctactctgtaacaccgagcacatttcctgcttctaatcaatatgataaaagggttaaatatggattctggagtcacatcaccttagtttaagaaggtatatgactggccgggctcggtggctcacacctgtaatctcagcactttgggaggccgaggtgggcagatcacaaggtcaggagatcgagaccatcctggctaacacagtgaaaccccgtctctactaaatatacaaaaaattagccgggcatggtggcgggcacctgtagtcccagctactcaggaggctgaggcaggagaatggcatgaacccgggaggcggagcttgcagtgagccgagatcacgtcactgcattccagcctgggcgacagagagagactccgtctcaaaaaaaataaaaagaaggtatatgaccttgggcaaatgaaaacttttctgtatgtcttagtttcctaatttttaaaataaaaaagtatcaatctaaattagtacacaaactaaatgaaataatacacataaaagtgcctctcattggccttgggcataagcattaaataaatggtacgtattattaatctaatctggtttgtgatacatccagtttaaatacctagaaagcaagagagctcctgtttacattctatggtctttctttctagcaaacacaatgcttgtctaccgtatatgctcaatatatacgtgagacaaggaggtagggaaaaacccaaaataaattcaaattagtataatacaaatgaaaatcctaagtgttgaggtaatactaaacaaaaaaaaaaatttttactaaggaggtcatgaagaaagaggaattcaaagaatgtccttggaatgttcttagtgtattattttgcaattccttcatacaactattttcccttctgtggtagactacaaagcatgggcacaatgtatatttaaaatatacacactttactgtatgtaaactttatatcaaaagaaaaagctgtaaatatggaactcttgctacatatgcacaaagcacttagaggaaagtactaatgtctacaatttactttgttgttcttgtcgtttagagatgggggaggtctca

SEQ ID NO: 915338 - DNA, 4001 bp, Homo sapiens
cctccagctctcagaggccctgaccctggccccctccctctctgggaggccctggccgcctcccaatcccagctccgccacacccctcagagcttgagagcccccagatcctgccttctattgctccggggctcagatggccctttcaagcccgaggcggggtccgggccctcttgctttatgagattctggtcctgctgtgctggggacagatctggagcagactcccccaggccccgcaccaacccggccactgctgagggcctgccctggcccactcttctcactgccctacaccagagcctcctcgccctcccatccttgctgccctgtccctgctccaggtttgacacctggtcctcaccacatctccctgacctccagggatggccaggaccctccacttctccagaccccctcccgccttcctctgccgcggaggcccccctcctcattcttgccgcctcctgggcgctttttccttccccgatgggattacagatcctgaggaggattacaggagatcagaggagggctgggcacttagcggatgggaagcaccactcggccctcctgcccctcttcccacagtccttccccattcccacatctgaaggggggcctctcttgcctcctccgggctcccagccggtcccagccccggggcagggctggcggggtcggcagggctccaccccttgcccgggtgccctctccccgccgccctcacctggatcatgtagagctgggccacctggtactcgtccaggctcatgggcagcagaatgtggtattccttgatgagcatcctgaaggcgctcggcgggccgcgcgcggcctccgctcctcctggcgcagggcacggcgcgacagtcagtgcggggaggctgcgcgcggccccgagccctgcgcgccggccgagggactcaggccacgggaccccatgtccgggcccgccacgagggaggcagaggcgagcctagcaccgccgcccgcgccgccggggccgggagccgcagcgaggctgagcgctgacctcttttccgcgcagcccccgccccccgcccgcccgtcgccatggcaaccgcgcgctgacgcgggccccccggagcgccaggctccggccggcgggcgggagggccacctcacctctcccgctgcgaccgcgtcctaaccccgggaaacggcatccctctgggcgcgcccccgaagccccggggcccctccttccgggcccgccttccgcgaccggcccctcggggacccgccccttgcatccccttcccggagtcggcggggtcccaagtcccccactctcggacgtccacctagagctttgttccccgagtgtctctgcgcggagtggcccagtgcgcccagcatctctgccagggttccccacgccctgcacccgaacctaccttccgggaccggtaatctcctccgccctccagatctgccttcttgggcagccgggtcctcgacctccccctcccagcatccttcctggacccctggccctcgccggctctccacgcgcctaggcagccactccgtcctcttcccagggggtgagccctcctcaggctgaggccagagtggctccacttggtatcccacgggccatggccctggagacccgctccgtccacctgcgccccagactggcaccgaggttccgctgcaggcacccctccatcccccactcgcaccccgcgagcaagcgagaggccccgttgtccccacttccctctgctcgccggcgtcccggtcccctgccgcgctcttggcccgcctgccgacgccccggctcacctctagcttgaggcgggcgcccctcacccagcccgggcagggccggccggcccgtgggtcggagcccggagcgcccccagccccggcctcgggttccagcggtggccggaccctcccgaggcgcagtgccggcccatggccccgaccttcctctcgatccgcccgccggcgcccctgcagtccctccccgacgcccgccgcgtcactgcggccgccccgcccccttcctgggcccggctggccctccccaccccggcggggtccgggcagccccgcctgcagcggaggaggcagggagggaggcccctgccttccttcccccgggcagtgggaaaaaggccattgcctaaattctggctcttcctagtccctctgtgctgattggggtccccaaagactcttagttcctatctccaccctagcccagccctcctgtgtgcagtcacagggtggtttgatatggggggtcccaggcccactctcctcttctcactctctgcagtccttagatttgggacccagggttgaggaaatgcctccccaccagtctagccagaagctggtggctctgacatgcctccacctagggctgggctcggctccagggccccaggcctctatggtcacccagctacacgcccaggcagaaacgggctgtcactgtgagtggctgggctagcccctgcatggtgccacaaagcctcccccacctctgccttccgggtccacaagtccggtcacccagccacccggagtctgggcaaaggcctcacgaggcaccccaaggctgggttcatgggatcccacccagcctgctacaaggtgctggggcagtgacggcagcaccccgccagcccctccccttgacactgaggccaagtgctggaagcagcagtgccctttctctctgagaagtcagagaccttcagggctgattcagaggctggggtgttgtcagggcattagggcgtgtgagggagtggcttacgtgaactggcatttccatgctgccaggcatcaccgccaatccagaggaagcgccctccaggcccaggctgcccacagcgccaagggctgtggaagcagccaggccctgtgctgccccctggtggcaccacaggaaggcccagggctctcagcgccacggctggggcggagagggcccaggtcccaccaaaggctgatggcctacagaggcaagtcaaacctcatttaatcacaccctccccatccatagtctcctcttcccctgtctctgcctggcccacccaggcttagctgaagaaccagacccagaaaggctcagagctgagagcacaactccaaatcatcttttattaatataaaaagggcatatttagcaaaagacacacagataaaagagtcactatggctcaggacacaaggcagggaggtgccaggcctgtgcccctgctgggggagaaggaggctcgggacaaagtgggagaagtgctgggaagggctgagcggtaggggccacaaaagttccggtgggcaacactgtcggcaggtcatgggtgggactcatggggacctcgctgctaactcttgttgtgggggggtgtccttagtgctgccacctggagggccactccttggttcctggaggggacccaccaagggacacaggacaggaagcccaggatggttagtgcaactcgggatgaaggccagggagaagcgggtgctctgcagtggccggataggtccagacgctgaggccgaggcgcttcctgttacgtgcgggcgttccgctctgtctctgccaggcactctctgactagggcccgggcatggatgatacctgggggtggggtggggtctcagcaaccctccacagccccacccactgccctccagaggaggacccctgcctccccactccctttccactttcggcaaaagaaattcaaatctaatgacggctagatgaaattagaggtttggttaatcctcaaggttgccctgttgaaatacaaattcccatgctcttccctggaaatggactcaatttcaattcgattcaaaacacctctctggtagtaatactggacatcctctaggcttggctcaggtggcctccagatgtccttccttccctcatgaaggatagtccagtgtcggtttcctgagcagggcggcctggcctcacttacctctcttca

SEQ ID NO: 915339 - DNA, 4001 bp, Homo sapiens
tttatggctgagtagtattctcttatatatgttaccacattttctttatctaattatccatcgatggatgcttaagttgattttatatctttgctattgtgaatagtgctgcaataaacgtacaagtgcagataaatttttgatataatgatttattttcctttgggtagatacccagcagtggggttgctggatcaaatggtattcgtatataacaccataaagatttttaaagcattttttcaaaatccttcagtgaatagaaagagacagaaactggcttcctaatatctatggagtcccgtctaccaaacactgtcaggaaattcagcacgtgcttctatgttaaagagtcccaaaggaacatgacaaaggggatccttcaaggaaaggaaatcaggatgtgcaagaggtgggcctactgctgtaaggcctggcagggctcctcttgctccattcaggttgaatggtactaaatgaacaggctgagctgcacttaccgttggttgagatcctgcttgttcccaagaagccattgctagaggatgcttcattgttactaagatcaacagatctaggctaaaatggcaaaaaaaagttttgttcagatttacaatggtaagtcacaaaccaaaagattatcctaagaacagtgtcaggtctttagattaccatgaactaggcaaagaaaatgttaacaggtaaaacccttgagagatgagaagagagtgcccattctagaaaagaggataaggacacgctatagttttcctcactcatcaaactttgattttagtaccaactgtcgccagatatagctggaggtgtaaagaagcagagatgagatccttgtgcccagggagctcaccagagggcatgcggcacagatgcacatggacctcatgcttccatagcccacggacataaaatgaacagaggccccgggtcagcagctcagatcatgactctgcatgaataaacagggccaaaacaggttcacaaaataggccaagggaaccattagcattttctcttttcatagtaactacttctctttgttcaagaagttactccatcttggcctgctaaaaaatgaacaaagtccagagaagaccacttcatgagaataaaggcataaggaccacaaactattcatttggatacttgctccaaatgctaagaatatgtagttgtattaataacatcaccccaaagttgcttattggcaggtcaatctagttgcctaaatccagcaaggagctttctctatagtggttgctcaagaaacagtagtttaatctaaaccacatgtgtgagagtacttatttttatatactaattagccagaaaaactgcattagattatatgccgtgtaatgttatgaaagcacatcactttttacaaggcaatttaaaacgaaatcatgaaattaaaactcagaaagtagaagagaatgacatatttgtccccaatcttcagtcctctttactggctaatatacctacgttaatatcttactcagacaagatccctagaaggagaaaactgttagaagaaaccttggaaagactcaaacttgagagaaaagataacgcactacttcgtaacagagaggaggagatacatgcagaggaaggcattgttcaggctagagacagaggtaggagaaaacgaaaccatgcgcaataagcattctacacaccaatggcgaggcttggatgcgccccacttctgtggcactggggctgcgggcgatgcctctggccttcactcgggctcttccactcatgttcccggtgagcccagagtggccacaagagctgcaaagtctcagttaggatatgttttgctttggctacagatggcgacggtgtgacggcgaaactgcctggaggcggtggatgtccagcatccacaaccaacgccggggctggaaatgcgtccgaggcccgtgcgtgggtggagaaggcgcgctggggcgtaggggttggcgcgagcacgtgggcctgtgcaggacttcctttttcttcccattacttccacccccacccccaaatttggcattatccagctttttcatttttaccaatcttatgtgtattgggtggcatcaaacaataatttttttttcagtttgtattttctgctcaccaatgagggtaagtacctcttcatacatgtgatagttttggagttttccattctgcaaattgcctgtcgtatccgttgcccatttttaaagttgagtgtctcatctttgtgatttggaagaaaacttttttttaaaaaattgcaaatatgcaaatatctacttcctatctatcacttgttaatttttactatgaaatgctttaaccaaaatcctaaatttcgatgttgtcaaattcagccattttaaaattcgtgctttttgggtctttttaaaagaaaattccacctgtcctcagtttacaaggacaaggacattatataatattttcttttcattaacttcgtaagtgtactgttcacagcaagtatcttcaatccctcaggtatttacactcacacatatgtaagtatacatgcaatgtgagtgagatagaagtccaactttatctccatatagtgagccattcttccttgacatcatctgttaaatagcatatactttctctaatactttgtgaagccacctccagcaaatgacagattcccacgtatcaatagatctagtctgtgccttccatttctgcaccaagacttcaacactttgtatcattatttctttgtgttattcatagaatctggtggtataagtctttgctttttgatattttttccaactgatttatttattcacagactttattcttccatataaattttaaaataagttcgtcaagtttctttaaatatcttgcttaaatttcagtagcattgtatccaatatataaatcaatttaggaagaacttacatctttacaatgttagatttctccatttattcaagtctttctttttatcttttaatagagtttaatttttttcataaaagtctcatatactgagttaacttttgaaaatttcatagtttttgttactattgtgaactatatcttcttgtcatgtttcatacttggtaattattagtgtagacacatgatactggtttttgtaaagttgatattgtttatcaagcttgctgaattcctcagttcttagagcttgtcttttgatttcattgaatttgtatgtagataatcatatcatctacaaataatgataattttgtctcatccattcttattctttttctttttatttgtttttcttgtcttatgttgctcagatttttcagtacaatgttgaaggttactatggtagttggaattcttgttttctttctgattttaaagactgaaatgtctccattttgtttgatatttgctataaaaatctattttatagaccttatcatcttaagaaagctttcttctattcctgcttttcaaagattattttaattataaatgtgtgtagaattttattaaatactaccctggatttgttgaaaagcttgtgctgaagttataagggcacatgtacaggctgttcatcagagtattatttggagtggcaggtagttgcaggcagcttatgtgcccatcagaagggcaacaggtaggtaaaatgtggtagacacatggagtggattactaggctaacattcaggaataatgacctaaaaatatatttagcaacatgaataaatcttaaacacattgtattgaataaaggaaaagcttaaaaaaagattgagatctatacaatggtaaaatattacattaatttttaaaacattaaggacacctgtatatgggatatgtactaattttttaagtaaatatatatatccaagaacagacacaatagattatgtacttatataagggaataaaacaggaatgtgaatggggcagagaaagagaaagcaaaagacagtataatataatataga

SEQ ID NO: 915340 - DNA, 4001 bp, Homo sapiens
actcctcggcccactgtggcacctcgctgctagcgctgccccccggccttcatcgcaggccgcggcccctgcgggccaccgctcccgccccgccgcgctgcgcccgcagacccaggtggctcctggagcactccgagccgcctgggtcgggacctcagatccactcccagccccgcgaggctgccctgccgcttcgcccagaaggtctcttcgatctgtccgcttcccggaatcgctctcttaggaccgggtcctgtgtggcccaagtcctctcctcctaaagaaacactttcagggggaagcagcaaaaattcggggctcgcctgccatggctcagatcaactactttcatcgcctacctaaacgctttttcacacgcggagctgcaggacccctcgtgctaccctccccaaattccaatagcttccaccacaagaaaaagctgtgatcctgttactgaatcctaaaaacgccacccgttcctccagcccccaactccgacctccagccctctgctctggccggcgtgtaaactacttatcggcccctcgatcccgattccgtaaacagtctggatcctataaaccgaactctagactggtcctaaaacccagccctaattcaggccgatccacaagcccctacccctcaattcccaacccgagtctccccaccgcgcggaaacccccggctcccccgtgaagagccccgggaaaggacggcccatttcgctcgtttcttcctggggatcgggagccaggaaagcccgtctcctaacccgaaagaaatgcaaactttgagcggcagattcgggatcctgcgccatccccctcagctctccgctctcgatcgctttcagttccctcttttacgaactcatcccctagttctcgagccagaagggctcccgattcccaagcctcgcgcgggcccctacgcccgcctcaccaaagatccccagcaatcatggaaagccggtgaccctacacattctcgctcctccctgggtgagggtccgtgcgtgtagcccctcggatcctggcttcccgggccccgccggtgttcccctgtctccactgatccgtctgcaaaccctcattcgccctgcctccccaggccgcggccgcggctcctcgactcctccggtcacctggccccagcctgggaccgctcccgcctccagccgctggaaagcatctccaggctggtggcgcggagtaagcgccggccccaaggacgcccgaagccgggagaaagagaacctggagcctgcccgcggttcccagcctctccccgcggagcgcccggccgggagccttctgcacccgggctcgggccggcgtgcctgttcctattctcgggtcccctggcgctcctggcgcacagctccccgcccgcccgctacggggttgggcccgcggcgattcgagtccgcagcccggctccttgcacccgaggacaatgcgcggccggccacgggcccaagcgcggcgaggcggcggcggcggcggcggcggggctgagcgctggccgggcaggggagcgggcggcccgcggggctctcgcagcctccgtgcccggcctcgccgcccctcgcgctgctccgctccgcgctctcccggcgcttccccagcttctctctgcacgctcccgccgtccctcgctgctccctgcctccctcctccctgctgcctccctctctctcctccctgctgcctccctctctccctctctcctccttgccctgtcgcaatgaataatactctggcttggggactggaataaaacacacgcgctctgaggcagccgcccgcagcagcagccgccgccgcgccgccgccgccgcctgcaaaagcgtctctgacatggaaatgaatgacagcttacctgatgccaatcttcatcagactgacaccggcgtgacaacacagcctatacttcccagcactgctcgggacgtcagcggcacagggacccgccccccggacccccccttcacacacctcccctctccccactcccccttttctccccaccccccatcacccccacccactcccggcccggccgctgccaagtcggaggagccgctggagtgtctccctctaccggaggctctcgggcggcgggcgcgggcctgctcctgcggcagggaggcgggcggcctggagaagcggctccgctcgcgaggagcctcggatggggagtgcggtggacccccaggaactctggagcaccctcccgcccccaagccaagtcctccttagcgaacaaccggggccgagttccaagatatcaccggtgctgaggggaccgagatgaggtgagattttctgtggaccccaagagaactccccagaaatgatgaaacttaaaacgggcaagaaatccttccttccaccagcactccccctcccccttttcctgcctggctggcctcatttttatgattgcatttgaataattctcattaccctggccccagaaaaggtgttcagatgacactctggttagttattcctggtctcaagagctttttctgctgtgggcttcccggggtgtctggttcaaggtggggcagagggagagaggaaagagtggataggctttgtcagtaaagcacttctttgcaaatgtcaggcaagcctgttctaagccactgctattttcattctaataaaaagtcctcaagaaactcagtgagttcccagagttctgggggctggggtgcagtcatataaagggaaagaccagctgggctgtttcagcctgggcctgctggggtggcttcatctacatcagggaggaaatgggctccttacatgccctctacagtggaagacaaaagcaggcatgtgtagacccacaagcgcctccattcactcagcagagatcacagtcctactaagagccacacacaggagcacacttgcttgcttcctcaacttagcacatggccctccgcataaagggacaagagaaccccttctgcctctggaagtttgcttcttgctccccatagaggagccctttcagccagtcaggcagccattgatcctctgaccccaggccaggcagggggcctggaagaagcccagacaaagacaccgacaaaagcgggaaagcagaaagtgaaacccagcctctgggttttcagtaaagaatctgacccaagaagttgaaggctgcccctgagctcttctcaggcctctgggtcgccactcacccgcctccgtcatgggcaaggatgagagctgttagcattgcctggctcaggggaggcaattgagacccttcttatatcacatcccagatacacacactactgtttgtccagatcctcccaataccctcaaatccacccaccaacgttgcttgtgggagaaactcttcagtggtagcccccattatagacagattagaatcctctcaccttcacatagaaccttcaaaaacttcactaggtggatttatgtcaccctagcctctgatctgcagtcagagtctctggctgctgacagcataatcgctattatatattatacattgtataataatataataataatgaatgcacttgccctttttatgtggtacagaagcggccagattctccaacccagaggctggaggtcaggctgccataaactctcagagggaagccctcttcagataagggagggggaggggagatccatttgtctctgcccaggacccctggagggaggagtttctctctttcccatggctcccagtgagttgctgcagcctgcagagtcagaggggaaaatcaggctgaattcaccccatcagagaggtgtcagtgagccataaataggaccgcaggcaacagccttggatcactgatttacacctgtcacacccctcgttttctgaaatctagatcaatgcccaacactttcctgatatgggagatccattgccatgagctattaatttttggagtcttcaaatactatgattttcactaataccttttt

SEQ ID NO: 915341 - DNA, 4001 bp, Homo sapiens
ttttgagcccctcctgtgcccaaacctcatctgtgcccggtcacaggagagtgacactgtctccctggaccagtatgccctgttgcagtgccctgtcccacccggcagagcctgaggcaggggccacacccaccccgtccagccacacacacgccaagggcagctgcgtcagcccgactccacagtgagtggacagacaggtgggtgggcagagggtggagggcggagggtggatggagggacaggcaggaggaggatgggagggctgctgtgactgctggaaggatggacagagtggtggatggaggggtgggacagccgtcgacgacagggtcccatggttggatggtgagtgggcagagggatggactcgtggatgggtgcagagaggatgggctgatggtgggggcatgagaaggcccaccagagcgacctggctgaggggctcagggtggggtgcagggaaaggggccgtggccctcccacaactctgcccagagctggatgctctgtgggggacacccccatggcagaggccccaggttcaccctggttaatggggcttctgggccggggctattaaccctctgacgctcgtgaggcccagcccggagtgggggcacgccccagcctggggacctcacccccaccccccaattataatccacctccctctaattggcagggcagccagggtggtaattaacccttccctcaccgtcctccaccccatgacccctgggcacccgacttggtcaccagcaaggctgaggcccctggagggaggaccccacagtccaggccgccgggccggcccctccgctgggcgaccttcacttccccctggccagtggctggaggccagtcctggggaaggcccctctaaacaccaagtggaccatgatgaactggcatctgggtccctggcattctgggaggtccatcttactgtctaaccttaatccctgttgctgtagcctgggaaggaggaaatggcgttcctagaaccactgccttcaactcacagcgtctgtgctcctgtcactcacactcacacgcatgcacacacactcgcgtgagtggggccaggattccgccacaggtgggtctggctggcaccgaggggtgctcctccacctgctgttcccacagagaaatctaggtcactccagccgggccctcccctctaattcctcagggagcccctggtccagacaggcctggctttcctccaggacttccagcacccccacacctctccccgctttcccgttctgctcattcccgtgaggtatgggaggagcgtgggtgtctgggtgtccctgagaccctatgtgagtctgtgctaccggggccaggcgcgtgcgtgttccgggtttgccgaccgagtggcctggcccgcctgccatgtgccaaccttccctgtcatcccccacagggatggctccaggactccaggcacaggtggggcctggccaggctcagtctttggaggaccccggggtccctgcttggacagggcagccccacccatggcttctccccacgcccctggggcggggtgtgtgactcagtgtgaggcctggtgagtcaggagccggcctcactgcggcctctgccctcacactatcacgtccgcccgcagccacctctccccgccaccgccatccccgccgctgtccccaccgcctacctctggcagtctcggcctcaggctcgggctcagcggccccgttgtgccgcggctgctgtcccagctgcaagaggcgggcgcggacctgctcctggacgcgggctgcccgcagccgctcggcctccggcccctcggcgccccggcggtccagctgcaggtcagagggcagcgccagggagcacacgccggcctcaggctgcagggccgacagcaggaagttaccgtcctgcatggcggcaggtccaccgggcctgggcctggcggccgcctccaaacccaactatcttcacgtcctgtccctcgaggccctctccctgaagtccccgcccagccagcctcacccagagccgcctgaagacagacgcctgcccagccctgagcgcagctgggggcggggacacctggccaggtgggagggaggggccgccgcctgcttaaggtggaatttgggcggaagaacaggccctgcatggccccaggtcccagcctggcctcccgcctccttttctcccatcccacaacagggccacggggacctgggtccttcttgttctcagcctgtaaaggccagaccgggccctttgtcgtggggctgggacagaggggccctctgtgtcctgagtgtcagggaagggcagggggcctgcggggggcctatgtcctgccacccccagcatgaaggggagggtgccccagtccctgggggtctagggccctaggtagctccaagaatcagccagcctccatggtagcccagccttcctggtgaggtggggatgaggcctaggaagggttggcaggagacactgtcgggagtcaggggtcagtgccagggatcaggacaaaggctggagggacagagctttagggtccaacgggactccatggaggccctggccctggtccttggaatccagcgagccccctccgcaccaggaagcatgtggatggaccggccctcccccgaagcctgcagaccctggaactcacccccaggaccccctcaccccctacagaggcctccaaaaccctctctggcttctgggaccctggcaccactgctcctgcaccccaggccctggggtgggaggccgttcccagcacatgagtcagggtgcaggggggcggggccgccccagggggttgactcagagggcctgcactcctgtcagcgcatgtcaggctggggcaggagcgggtgtgcagggaagaaccaggggtctggaagagcagaggcctggatggagagggagcgagggtggggggcccctggtgggggtggggtagtggggggcccctggtgggggggccctggaccaagcagggcttgtgcccagaaggtctccttctagcaccacagccagcaaatgggctctgaggccctctagcctctgggacaagcccctggtagatgggggtggggataagcctaggagggctgggggtgggagctgaacatctatgacaacctctgggcttctctcacgagctcatcggacagcctctgcttctccctggaccctggaccctggctctgggctctcctccagggcagacccttgccccctagctccgtccctggaagatttttgccttaatggggctggggcaggggtctggcgtgagggccgggtcagggttaggaggcagcattaagggtgaggtcagttctgaggggaggaagctggagagtaggagtcggaggtcagcgtggggggttaaagggggaggggaaggtccactgaaaggatgggtgaggcccgggctggggccaccaggtggggtcggggtggtggggaaggggtgggagacctacccggctcgtggtccggatcccgccagcctcccagctcatcccagaggccactgctgacggccgaggtgtccaggactccatccctggcccggcgcgtgcggggcagcctctgcggcggggacaggactgtgggggcctcggagggcggggtgggaacgcccagctcatcggactggctgattccctgggagacaggtttcgtgtggaaaaatcctgggagacaagtttgtgcggcgcagagcgggcctggaggtatgtgcctggcatgggctgggtcccgccctgcacccaggtccaccccaggcccacctggggccctgcaggggccaggctgggcggcatgagggggaagccagcctggagggcctctgcagcccagtcaggccgaagggctcacaagaggactcagtgaaggggcttccgtgcggctggagctatgatgggaacgccggtaccccgcggcctgcagggcccccagggccgactctgccc

SEQ ID NO: 915342 - DNA, 4001 bp, Homo sapiens
tgtctctctagttttatatgaaagcagcttttgaaattaaaattaataaaaagtgttcttcaatcaactgggagcaaagatggactagtagatatagctcccctgaatactgaccatgaatatgcaaagattgattttgacaatgtcatggacaacttttcagaagtttcaaaaacagaagttgtagtgttactattattcatctctgataccatcctacatctaagtttttccttttttcaaaaatacattaatgtgattaaaacctactaatccattttttttcctgcttttgcactcacatttactttttcatttttaatttttttactctcatgattacatatataaggtttttactgtcatgattacatatacgaggttcaataaaagaaaatgctcactgtgtttctttctggacattattactattcattgcatgattattgctaaaaataatgttatcagatagagaatgatattaaaaagtgaccactccaggtgtcaaacaaacatgccagatacaccctgacaccaggcaaaactctttatatggactgagataataacaacagtgaattatggttgagcactcaaaatgtgtgctaggcattgttctgggcactttctgagtattaagtgatataatcttcactctgcggcagggctcggtggctcacgcctgtaatcccagcactttgcgagaccgaggcgggcggagcacgaggtcaggaagtcgagaccatcctggctaacacggtgaaaccccgtctccactaaaaatacaaaaaattagccaggcgtagtggcgggcgcctgtactcccagctactcggtaggctgaggcaggagaatcgcttgaacccgagaggcggaggtcgcagtgagccgagatcatgccactgcactccagcctgggtgacagagcgagactccgtctcaaaaaataaaaataaaaataaaaataaataaataaaacaaaaccttcactctgggaaacagtggatttgaacttgatgagagtctcacaaccagatgctcaacactaggagggtccacctccaaatcccatcctctgaatccctctgctgcggtccggccaggcggaaggggggcagtcgccaagcacagttaacgctgggactccgctggcagggctggtcatgggatgagtcagctgacatagcccccaaggcctgtcccgctgtccgggtgtggctccggagggcagcgccagatttctgcggacagacctgccctggccacctccctcctgagggtcccgccttccgctgggcgcgtttcaggcagggcgcccccacaccggcccccggaaggacgcgccgagacaactcccaacaggtgcgcgccgacccgcagctgacaccgatgcctcgcagctgacagaggtgcgggccccacatcctcgaggctcctctctcggaagcagtaattcaggctccgagacaacgagtccccactaacagggggctcccagccccgcccagccccgcctcgccccgcacttacaatgggcgcacgcatcttccctcgcggtgtggaccctcaaggccaggctcgatttcgctgcgtagatgtctgaggcagggggagcagggatttattgtcattaacaggaaactgcgtctccagaccccacgggactgcggcttctgttgggcagggcgtgagaggcgcgcctcggaccccaggaacaaccacctcgctccctttaacaactttctcgccggggcccggcgggcgcccaggaggctgcaggtgccagcgggcggctcggcaggctagtctacacccgccctacccaattagatctcttcctcgcggaaggggagaagcatcccaggcacctcgcccggccttatcgcacccttccaggaagacccgatccacccacctcgcggtctcggaggcagcgctgcagccccagcaattggaccgggtctaatggccgcggtggccgggccggcgtgaggtcacccggcccctccccgcgccgccggctaatgagagcctcgcagagcgcccggccccggtcccgagcccggcgactgcaggacgcccgcgcccccggcaccgcctcttcccgcctcacccatgccctgcgcgcccagcatccaggagtcgcacacactcgacctctgcacacacatcacactgcagggccatgatgggtttactttcgccttcactcaagaatgggcttatagtttaaaaactgaaggagttaaaaatataccaccaagggccgggcgcggtggctcacgcctgtaatctcagcactttgggaggccgaggcgggcagatcacgaggtcaagagatcgagaccatgctggctaacacgatgaaaccccgtctctactaaaaatgcaaaaaattagccgggcgtggaggcatgcgcctgtagtcccagctactcgggaggctgaggcaggagaatcacttgagcccgggaggtgggggttgcagtgagccaagatcgcgccactgcactctagcctgtgcaacaaagcgaaactcagtctcaaaatatatatatgtgtgtatatatatgtatatatatgtgtatatatatgtgtgtatatatgtgtgtatatatgtgtatatatgtgtatatatgtgtgtatatatgtgtgtatatatgtatatgtgtatatgtgtgtatatatgtgtatatatgtgtgtatatgtgtgtatatatatgtgtgtatatatgtgtgtatatatatgtgtatatatgtgtatatatgtgtatatatgtgtgtgtatatatatgtgtgtatatatgtgtatatatgtgtatatatatgtgtgtatatatgtgtgtatatatgtgtgtatatatgtgtgtatatatgtgtgtatatatatgtgtgcatatatatgtgtgtatatatatgtgtatatatgtgtgtatatgtgtgtgtgtgtgtgtgtgtgtgtatatacacaccaccatggcatattggctgttttgaattaaaggcatttaaaactcagcaggtgcaagaagaccccttttctgtgtcttaaaagcagatgaaatttccatgttgaaggacaccttccttatactagaagaaaaagcaacatccttatcctcaaagaggagatgttgagacggaaagaattctgtacagaccttgttgaaataacttttttcattttttactttttggggttttttgtttttttttttttgagacagtctcactctgtcacccaggctggagtgcagtggctctatctcagctcactgcaacctctgccttccgggcaagcgattctcctgcctcagcctccggagtagttgggattacagacgtgcaccaccgcgcccagctaatttttgtatttttagtagagacagggtttcagcatgttgaccatgctggtcacgaactcctggccccaaatgacccacctgcctcagcctccgaaagggctgggattacaggcgtgagccaccactcggcccattttttactttttaattgacaaaaattgccacgtatttgtcatgtacaacatgttgttttgaaatatgtatacattgtggaataactaaatcgagctaattaacatatgcattacctcacatacttcttttgtggtgagaacacaaaacctctccgtaattttcaagaacatagtacattgttatttactataatcaccatgttgtgcaatagatctggtgaacttattcctctattcctcctaacagaaattttgtaccctttgaccaacatctccctgacacccccctgttccccccaaccgccgtaactgccattctactccctactcgtgggttccatttttttagattccatatataagtgagatcacaaagtatgtgtctttctgtgcctggcttatttcactgaacgtaatgttctccaggaaaataactgttatctggtaagcctccccacataatttagttgcatctttttaatttttatttttatttaaatag

SEQ ID NO: 915343 - DNA, 4001 bp, Homo sapiens
caaactaatcctgatggttaaggcttttcctttgtctctctagttttatatgaaagcagcttttgaaattaaaattaataaaaagtgttcttcaatcaactgggagcaaagatggactagtagatatagctcccctgaatactgaccatgaatatgcaaagattgattttgacaatgtcatggacaacttttcagaagtttcaaaaacagaagttgtagtgttactattattcatctctgataccatcctacatctaagtttttccttttttcaaaaatacattaatgtgattaaaacctactaatccattttttttcctgcttttgcactcacatttactttttcatttttaatttttttactctcatgattacatatataaggtttttactgtcatgattacatatacgaggttcaataaaagaaaatgctcactgtgtttctttctggacattattactattcattgcatgattattgctaaaaataatgttatcagatagagaatgatattaaaaagtgaccactccaggtgtcaaacaaacatgccagatacaccctgacaccaggcaaaactctttatatggactgagataataacaacagtgaattatggttgagcactcaaaatgtgtgctaggcattgttctgggcactttctgagtattaagtgatataatcttcactctgcggcagggctcggtggctcacgcctgtaatcccagcactttgcgagaccgaggcgggcggagcacgaggtcaggaagtcgagaccatcctggctaacacggtgaaaccccgtctccactaaaaatacaaaaaattagccaggcgtagtggcgggcgcctgtactcccagctactcggtaggctgaggcaggagaatcgcttgaacccgagaggcggaggtcgcagtgagccgagatcatgccactgcactccagcctgggtgacagagcgagactccgtctcaaaaaataaaaataaaaataaaaataaataaataaaacaaaaccttcactctgggaaacagtggatttgaacttgatgagagtctcacaaccagatgctcaacactaggagggtccacctccaaatcccatcctctgaatccctctgctgcggtccggccaggcggaaggggggcagtcgccaagcacagttaacgctgggactccgctggcagggctggtcatgggatgagtcagctgacatagcccccaaggcctgtcccgctgtccgggtgtggctccggagggcagcgccagatttctgcggacagacctgccctggccacctccctcctgagggtcccgccttccgctgggcgcgtttcaggcagggcgcccccacaccggcccccggaaggacgcgccgagacaactcccaacaggtgcgcgccgacccgcagctgacaccgatgcctcgcagctgacagaggtgcgggccccacatcctcgaggctcctctctcggaagcagtaattcaggctccgagacaacgagtccccactaacagggggctcccagccccgcccagccccgcctcgccccgcacttacaatgggcgcacgcatcttccctcgcggtgtggaccctcaaggccaggctcgatttcgctgcgtagatgtctgaggcagggggagcagggatttattgtcattaacaggaaactgcgtctccagaccccacgggactgcggcttctgttgggcagggcgtgagaggcgcgcctcggaccccaggaacaaccacctcgctccctttaacaactttctcgccggggcccggcgggcgcccaggaggctgcaggtgccagcgggcggctcggcaggctagtctacacccgccctacccaattagatctcttcctcgcggaaggggagaagcatcccaggcacctcgcccggccttatcgcacccttccaggaagacccgatccacccacctcgcggtctcggaggcagcgctgcagccccagcaattggaccgggtctaatggccgcggtggccgggccggcgtgaggtcacccggcccctccccgcgccgccggctaatgagagcctcgcagagcgcccggccccggtcccgagcccggcgactgcaggacgcccgcgcccccggcaccgcctcttcccgcctcacccatgccctgcgcgcccagcatccaggagtcgcacacactcgacctctgcacacacatcacactgcagggccatgatgggtttactttcgccttcactcaagaatgggcttatagtttaaaaactgaaggagttaaaaatataccaccaagggccgggcgcggtggctcacgcctgtaatctcagcactttgggaggccgaggcgggcagatcacgaggtcaagagatcgagaccatgctggctaacacgatgaaaccccgtctctactaaaaatgcaaaaaattagccgggcgtggaggcatgcgcctgtagtcccagctactcgggaggctgaggcaggagaatcacttgagcccgggaggtgggggttgcagtgagccaagatcgcgccactgcactctagcctgtgcaacaaagcgaaactcagtctcaaaatatatatatgtgtgtatatatatgtatatatatgtgtatatatatgtgtgtatatatgtgtgtatatatgtgtatatatgtgtatatatgtgtgtatatatgtgtgtatatatgtatatgtgtatatgtgtgtatatatgtgtatatatgtgtgtatatgtgtgtatatatatgtgtgtatatatgtgtgtatatatatgtgtatatatgtgtatatatgtgtatatatgtgtgtgtatatatatgtgtgtatatatgtgtatatatgtgtatatatatgtgtgtatatatgtgtgtatatatgtgtgtatatatgtgtgtatatatgtgtgtatatatatgtgtgcatatatatgtgtgtatatatatgtgtatatatgtgtgtatatgtgtgtgtgtgtgtgtgtgtgtgtatatacacaccaccatggcatattggctgttttgaattaaaggcatttaaaactcagcaggtgcaagaagaccccttttctgtgtcttaaaagcagatgaaatttccatgttgaaggacaccttccttatactagaagaaaaagcaacatccttatcctcaaagaggagatgttgagacggaaagaattctgtacagaccttgttgaaataacttttttcattttttactttttggggttttttgtttttttttttttgagacagtctcactctgtcacccaggctggagtgcagtggctctatctcagctcactgcaacctctgccttccgggcaagcgattctcctgcctcagcctccggagtagttgggattacagacgtgcaccaccgcgcccagctaatttttgtatttttagtagagacagggtttcagcatgttgaccatgctggtcacgaactcctggccccaaatgacccacctgcctcagcctccgaaagggctgggattacaggcgtgagccaccactcggcccattttttactttttaattgacaaaaattgccacgtatttgtcatgtacaacatgttgttttgaaatatgtatacattgtggaataactaaatcgagctaattaacatatgcattacctcacatacttcttttgtggtgagaacacaaaacctctccgtaattttcaagaacatagtacattgttatttactataatcaccatgttgtgcaatagatctggtgaacttattcctctattcctcctaacagaaattttgtaccctttgaccaacatctccctgacacccccctgttccccccaaccgccgtaactgccattctactccctactcgtgggttccatttttttagattccatatataagtgagatcacaaagtatgtgtctttctgtgcctggcttatttcactgaacgtaatgttctccaggaaaataactgttatctggtaagcctccccacataatttagttg

SEQ ID NO: 915344 - DNA, 4001 bp, Homo sapiens
tgccacccccaaaatgcatctcagtgtctggtggacaatactattattatcaatacatctcatatacgcacaccgcccctactgcgcaccaggtacagttctatgcacctagcatcttcgagcacacaaaggcctcctaaccagcctaagaggcatgtgctgttgtcactcccattttacagatgaggacactgagttacagggacacttcgtagcctgcccgagatcactggagccaggacctgcttgcaggcagtgtggttgcagcgtcctgtgacctgggaagcagggagcggagacttctgccaggctcccggctcctggcctcagccacaccccattgtggggcctgggataactctctgctttccagacctcagtttcctcttctggagaatggggattgcaccagccccacccatggcaggctttgcttacaaaagatgggcgttcatctgggaacagaaggcccccaaaatttggggatgcatgggcctccccacttcagtgtgctgacacccagccccagcacttctccggattcccaaccctaccctgggcctgaggcccccgaatggtgtgcagagcggggagtctatgggtactgcccctagtgtttccctcccacctctccccaggggtctggacctcaaaggcagcccaggtcccctgctctcctgccccaagcctccgtcagcaccccccaccccacccccagggccctctccctgttcccacttccttatttgggtttatcacagtggaatgaaaagaagaaacttttcccttcaggccagcctggggggaggggtctcccccggcccctggggcccccaggcaccccacctcgcacacctgccgcttcaggccacgcccccatctcctccccccagctcccacgcctaccccggggccccacccagccggaaaagagcccagagtcttccaggcccgtggcctgactgggaaggagctgcgaggaagctcaggccggccgggtggaggccctagggaaggaagggcccagggggcagaagaggatgcacccaggatggggatgggcagccgaaggtggggacacaggcatttgggaagcaccaggggcaggacagggaaaggggggccaggatgtattggggttcaaggtcccaagcctaaggagtggggagcaaagttcccaggggtggaggaacttggggggcaaagtctccactagggggtgactgggtgctcccatctgaacagggagctgggctgggatccagaagcagggcgaaggggtgccaaccagaacagggggaaaaatgatgaatggacgaggactgttcaggcagggcaccggggagagtaggggcgccctggcacacacccagaatgaggatgcccccagccagcctggaagtcagggtcctgcagccggggagtctagtgctgggcaggggtctgggcaccaggccaggatcggggaacgagaattagtctggcagggagcggtgggaagaacgaatggaaaacggggggacggggtttattggggttcaaagtctctgcgccaaggagtggaggcaaattttccagagctgagggactgggagttggggggacaaagtcttcattacggagacgatcggggacttaagtttccggggcgccgccagactgggatgagggtggcgccacgggcaggcgaggctggggtgggggtccccagcgtctggtcgagcttgactgaaagagtcccgggatttgggcggagcaggggcccgcgcgcttacctcgtcccatttgatgaacttactcccgcgccgcagggtctccaccacggtgggcggctccaactgcagcgcgtggacgccgggctgggcgcccgccatggcccggccaggggcgggtcggggacccacggagccctgacggggaccgacggcgccgctgctcccaccgcgcggcccgctccggccccgcggcgtcagtgcccgcccgcccgccagtctgtcccggaccgaccagagcctcggcggggcccgggcggggcggggacggggcggggcctcccgggccccgccccctcccaccgcgtcggctccccctggcggccggggcggcgactgcagccggagcggggattggggcaggggcacgcggacgggtcgggggctttgctgcggggctcagcagaacctgattcttcaggcctgtggtggaaggagggcgctgggggccgaagtggctgttggggagcagctggagggactgggtgtagagggcgctgcttaaggcggtccgggatcagcccactgaggtttccgagcgactagggctgcagtaccagcggagggctagacttgggccggggggtcgctgcacagccctgtcgcccaccctcttctgccgcacttagctgaatgcaggaaaagcttcttccgcccccctctgccctggcttcgcctcacccactcttatgccgcgcggtcccccctccctgggagcacttagccggctaatggacctcccgccggcaggcacccctcccccgtccctagcccagggaggccgggcgcctgccacctcctttaaggacccaagcatcctggtcttcgagagtgagccctagaacagcccccttcttgttgctgcagactcccatgactggaacctgactgtgagcctcttggctgggaaccgcggggggaacgctgttgtctgcccagaggggtcagaagctttgtggatgtccccagacaggagggttgaggaggggctctgcagtgcctggcccacagcaggtgccctgaaatctgcgttccagagatgggagcggggaaggcgcatgggcaatgggatgggtgggggctgcagcccctcccgcagggcttagctggtggggggggttcctgcctgggggcccctgtgggagcccccccaatacagaggcagtaacagcagcaggtttaaagtagaactcatccagaggggccagccaagtcacctagaaacccagaaagagatgcagctggctctgggggaggaggggtcagcaaaggaggagctcccctgcaggcccctttgccccaggctctgagacctccacaaggagccctgcctggccctggccttcctccacaccccgccaagttctccatcaactctaacctggcggatctcctcgctctcagccctggccctgtggggtgtgattatgatctccacttgaggcccagagaggggaagggacttgcccaaggtcacacagcttcttaggaggatttcaaccctccgacttcctgaggcccaggagcctctagacctcattgggaaaacagaaccatgcaaggtggagcttggcctctgccctcacaggctggagttcaaatccggctcttgctagcagcctcttgctagtggcagaacctagtctctctaggtgcctcagtcaccttgtccagaacctaaaggttgttgtatacataagcaaatgggtgggagatgccaaattgacatgagtagctggaagctgtgggtataccagggagggaggaaagggcataggtcagctctggggcagtggaacctccagcttgtgccagggctagcaaagcctggagccaaggcctgagcttaggggatctgagctgtgggccctaggccttgtgcaagcgtactttagagaagcattgggcagcagctccttgtggaaaaaaacaggatgggcacctgtttcctgggcttaagcctctctcctcccccaaccctgtgtctctggaggccagggcagcccccattacagggctccttccttcccagacactttcttccatccttggtaatggtaatagggtatctcagcaggcagtaatggtgaaggcaggcagcctttccggactctacccttgattgaaggagcggtcttgacccacaggaccctccccagagcctctgcttcaaggatgcactctaatggaggggggctggggccctggaaggggtagggctggggaggc

SEQ ID NO: 915345 - DNA, 4001 bp, Homo sapiens
gctttgccaactcatcatcacatgatgtctccttcttgtcattcaaattttactttaaatgttgcctattcagaaacaccatcccgatctcccagtacaaccaagccacccagtcactccatgtcacatcaccttattttaactttctgcacagtagtaaccacgatctgatattattatttgtgttttttacttattttctactcccttccctctcctattagattgcaagctccatgagcacctagaacttttctgttttttgttcccaatgcctagaacaacgtgtgaacgtgtggcacacaggaaaattgtaataacatcaactgatgcagttatgagccagagaggcccactgacagcaagactctgatggccccagccaactccccaacttcacatacacacatatgaggcagggcaatagaaccgcagcaaggccctagtccttaggtctgtaaatctcacccatcagtattttcaactattatgcaagaacccaaaccagaaaaggaggttccggggttttcttgaaataggctgctttattcctaacagtagtagttctgactcacagtcgccgaggtacacccagtcagtactagtcagaccaccgtccagacctttggcgagctgattcattcagtgaacaaacatttaccgagtgcctacttgctgtccggcactggggcaaggggtcaaaggcagtgtctggcctcccggagctcagcaggcagagggaaacacgctgcaacacagactcccgccggagtgggaaagcaaagcctgtactggcataggagcctgacccgcgccttcacttactgcgccccaatctgacatggactgatcctacagacccagggtaacctggctggtgcgccaacactccggggcttttgcggaaaagtcgcccgtggactaacggaagcaccagcaatcccccggttcagctccggccgaagagacgcggagcgctcgaggaaagtcattggttgaccagttcccttccccaccccctccctccccgcaggcccgcgcagtggatggaggccgggggcgaggttccgactctccaagaccatcccagagcctgcggcgggagagggggcgtcctcctaagcgagattcccctagtctctccctctccccactccaaccccgcaggcccacaccaggacagaacttctcgttctactcctcccacccgagcccatccaggtcccggcactcgcctctcccggcggggcgcagccccagaccctagaggggaggcgtgcccagcccgcacaccagcacccgaatccagccggattgcaaggtccagggcgcagagtctgcggcctcttcccccccggcccaggtccccagcgtaggtgcggcccccaccgccttcctctcggaggccgccaaacaacttgggcacacaaaacgttgagtgtggccgcggcgcagcgcgcgccaacgagcccgggccggcgggagcagaggaagggcggggcgcccggcgggaacggggagggaccccccccccgcggcacaggtgcgagcgcggcggccccactcactcactcgatgaagtagctggcgccctcctccgtgaagccctcctcccagccgcggggcaggtctgcggaaacgccagaaaagtcgggtcaaacttgggccgccgctgcgcgcgccccccacccgccggcccggcgcccacctgagcggatcatgtggcccgagttgacgggctccccggtgcgcggatgcagccaggtcgtgcagcggagctggtcactgcgggcagagaggtgcacctgttagcgccgccacagcccgccgggtgcccgcccggcccccgcccccgcgcccccacccgcgtccccgcgtccccgggtcctcgcgccgcacttgatgaagaagacgcggccatcccggcacaccccgtaggaccaatgctcaggtaaagtgtcccgcccgaccgtcgccgccgccatgttcgccgagcgcggagccgccgcggggtgggggggagggggcgggggcgcgggcaggggcggaggcgggggcggtggcgggggctcggcctgcgcgtggcccggcggcgccgcgaggcgctccatccaggcgcgggctcctgagggagcgaccgcccggccgggtcctggcgcccggagttcgcagccgctccggccaacccagcgcagtgcccgcggcctttgtccccgagccttccccgcccccagcctgctggcaccggcgctcccctttgcccccgaggccgggagacccgggcggcgcggggggccgctggcgggggccgctggcgggcgcgcctgggcagcttcggggcgcgcggttggacccgaccaactccgaaaacggcgagcgcccgaacgctcagtaaaccccagccgacccgcaccacagaacttcccgacccgggaactccgcttgtgtgtgaaccaagttaacactcaggttcctgccatattcccagcctccttctcttcccctgtaaggttaatcgagtccacacgggattgttgtgtagattaaatgaagtaacaatcgcataaagtgcttaaccggaccatggcatgtagtaggtgctctatcaacggcaggccgagcgcgatttcattttcccaagttttcagctgggatgtgaaacaggagggagcagggttaccgccacacaccactgaggttgcagggatcgcaagctcttgccttcagtttctgtcaagtaacagaaaaaaggggttttgagggctcggcagcacgtccatctctggaagagcggtggccaggcggggcctctagggggccctgcaaagctctttgcagtggcggcaccctctcatattcgggtctttactcctatcttatctcctcggggagccctccctgagccctctgcaaagaaaatccttcccctccttccctcgctatttcattacttgtttacatttaattgatatttgtgtttgtcttgtttgttgtatattagttccaacatgtcagctggatgagagaaggggctttgatctacctcatacactgcctggtctccaatgcctggaacagcacctgactcatgtatgcattacgcattcaataactgtaggatggggtggggcacggtggctcaggcctgtaatcccagcactcttggaggccgaggcgggtgaatcacttgaggtcaggagttctattccagcctggccaacatggtgaaaccccgtctctaccaaaaaaatacaaaagctagccgggcgtggtggcgggcgcctgtaatcccagctactcaggaggctgaggcgggaaaatcgcttgaaccagggaggcagaggttgcagtgagccgagatcgcgccgctgccctgcaacctgtgcaacagcgagactcagtctaaaaaaaaaaactgcaggatgagtgaatgaaacatactccacactcagactcccggccacacacacacacacacacacacacacacactgagcaaagacagagcagcagctgggctccagctgttgtcaggcccagccttctcgggacataggctctgattgatgggaggaggcgcgcctgaaagtgagactgtatgcaatgtgagcactagttattcagaaaggtgcccaaacaggtggaattaggctggaccctgaaggactggttaggtttgactgggaaaagagcactccagaggggagggatgggagagcatgcacataattttgggagggctgtgagatgttgatgagaccataaaggggcccttccttgggaacagacagtggtgttggggaaggaggcatttatgagttagaagaggtaactggttgcagaggacgggggacacctgtctgaaggaacctcctgcctctgaggaggttgttgagcaaatgaaaataggaaagcggtgttttgctagctaaacattgattttaaataatacattaaatgggcaaagggtatgaacccacagttaatagaaaagtaataca

SEQ ID NO: 915346 - DNA, 4001 bp, Homo sapiens
caggaggcaagccctgatactcttcaaagatcctcagatgattccaatgtacagctaagtttggacgtcaccgcacattctactccctcaccttgtccccactctaaccctgttaggaagggaatccttactcctgttttacagatggacaaactgagggttagcaaatgactcatccatgtacatgatgtagcttgcactggaatccaggtaggtgccctctgttcctgagggcgactcacttgccagcgggtgcctccgcccctcccccacctgctcacacctgttgctgcgtaacaagggctggcacacctgggctggaaggcccagccttgtctgttcctcttgccgctccctcccctctccacggtcttgacacagatcagacaagagggtcaggtgcagactccttttccagcccctccccttgatgcacccaccttgtctacacttgttgcggatgttgctgcctaagcggccgctactcgatgctgctgccacccaacccgctgcgcctgcgctttgtgtgccccggagagcctggggcatttctctcctcccgcagcgcctgagagcccagctgcccccgggccccgccctccggacctgcccaccccagggagggggagtgacgtgaagagatgctgacccgaggcgtactgggacttgtagtctacccctgtagagctgggcagaagcagccccgcctgcaattttacttttctattaagacatttgttcactcatttatcatgaaatactttttcttaagaatcattgaactcagttcctagaaaaaaagaaaaagtaaagttgcaaggagaagccaagctcctagttttgcatgtttttttgatgcttcccctttccatccccagcttccagtctagtgagggagattacatggaaacacacaattggagcacaaggtgtgatttaacaatggaaaagatgagcctgacttttctcaaggggttcaggaaggcttcccagaggaggctgaaaggggccttggaggatgaggggcagtttcctaggcgacccgaaatttcccctatgaatactgtcaggatgttgaagagtgcccagcatttccgtgtgtctagaacataaagcgcaggggtggggagggcatcgggagtgtcaggcgatagagctgcagggtttggaaagaaatagcacagaggccttgcatgacaggcggagagcttggatgttaggacgcagtgactggagctgggggtgggagtttcaagatgaggagtgaggtgtgtgattagggggtcggaaaggcccctctagggcacagtgaagaatggactggcgggagcccacctggagaaaggaagactttctgtatctatcacctcggactgtgatcatttccttcaatagctcagccccgcaaaccctcacctaccagcagccacaggatgtcattcagagaccagaggatgtcagggcctaaaagacttctgtcccgtcccctatgtggcaagggtgcccaccctgccctgggcccttcctcctgtcccagagaactcttccttaccggggctgcagggctcatggttcctgggtggccagggcagcatttcccagaaggctcccgcagcggggcatttccctgagcgccttagagataaggggatcaggaaggtgctaccaagtgggaggctggagggggaggcaaggagggagcgcacagatcccaaggaaggtcgccctctttctccaggctcctcccagcctttccaactgatggctctgaccctaggttcactagacaagtcatccctgattcagaagtggtcttggctcagcatcgccgaggttcccggagtggaatcggggcgaggttgcgggggcaggacaggaaccgggctggtcctcctccctaggttgggggcggggctacatcttcattctttggcctggcaggacagcgcccatcaccccagtcctggctgcgcagtctggctctttaagccttcctctcttgctcctgagtctctgtaatcctgacctcgagctaccctcgctcctcggccctttgtgcggtgcgtgccctgctgagggattcgccatggccaatcctattaaccattgagttcatcccctcttagccgactcaagaaccagctctcccataccgcgttttcatctctgtgcctttaactcactctctgtctggttcctggaacgtcccagtcccagcttctcctagctaaattttccacctccacagtggaaggaagaaaggaagcagtgggagggggaaagaggcaaggaaagagatatggaaggaaggaaagacagaaggagaaaagaagggaggggaaagacgggaaggcaggtaggtagggctgcagctggcctcggaggatctgcgcctgggtcctgccccgacccagcctctctccagctctccctgctcccctccccgatgggcagtggggcatccttcatgttgaggggcggggacggtgcaatcatctcctagatttcattctctggatttagcaaccagatgaaaaaggaaggttctccagcagcagtggagacttcaggggaagactctcccctacctcccaaagagcgggcactatgacgaaaaaaagaggaaaggacgtggcaaactaaaaccacagacactactaccgaatctaaacgtagccggacttggcccatgtctctaaaagctggtcagtgaccctctttgagaagccaataaggaagtgtagactgtcctcaggaaaaaatctgcgtataattcctgggagttcatagacctctgaagccatgatagtcatggttggattgtttttaatttccagagctgtgtagatgggaggagagtgtagattgacgagtgagaggtatgacagtatgtcaggaattccagccgcagcagtcctggctgtgagagactttgtttgttcaatcaactaaaacttattgagactaataagccaacaagtaacttttacatttctttgtggctatggtgcacagaaccattggcagagaggaaaagattttgccatttcaagtgtccctggtgaatgaacagcccacagataatacattgtttaggaaatagtggactggctcatcaaattcaaatttactacttacattttctagagagtataatataatgagaataatttatattatctttattttaaaaaacttgaagtttatatcaagatgcaatttgagcaaaagtaaaagtgcttatgaaaacattttaaatggccgggcgctgtggctcatgcctgtaatcccagcactttgggaggccaaggcgggcagatcacctgagatcgggagttcgagaccagcctgaccaatatggagaaaccccatctctactaaaaatacaaaattagctgggtgtggtggcacatgcctgtaatcccagctactagggaggctgaggcgggagaattgcttgaaccgggaggcagagattgtggtgagccgagatttcaccactgcactccaacctggacaacaagagctaaactccgtctcaaaaaaaaaaaaaaaaaaaaagaaaagaaaacactttaaagtgataattttacgcttttttttgtctttttttttttttcctttttctggagaacggggtctcgccatattgcccaggcaggtctcgaactcctgggctcaagctatcctcccgcctcttgcctccctgagagcgggattacaggcgtgagccactgcgcccggccaaagtgataattttagtgagatgtaattcacctaccataaaattcacccttttaaagtaaaaaattcagtgggtatttttttttttttttttgatggagtcttgccctgtcaccaggctggagtgcagtggtgtgatctcggctcactgcaacctccgcctcacaggttcaagtgattctcctgcctcagcctcccgagtagctaggactacaagcgtgcaccaccatgcccagctaatttttgtatttttagag

SEQ ID NO: 915347 - DNA, 4001 bp, Homo sapiens
ctgtgtccagcccggggttgggggactgtggacacacagagggtcaaacccagcccctgtccttgaggagttcgcagactggggccagtctggggtcagggagtggggatacccacagatagacagttctgttctaaggagatcactgtaaggcgccgtgaaaaccgaggagggagcctctaatccagcttgacgctactgcaggagcaggggtgggggccagaggaaaagccagagaaggctcctcagagaggggcccatctgagatgggtcgtgatgaacaaatagaagtttaaaccatgtagtcgggaatgggaaggaccttcaggcagagggaagagcatggacaaacaagggaaggatgaaaaggtcctggtttcttgagagaagtgttccccgtggcaagcccagtaagccacttccttcaccctgccccaggaccaggggcccaggatcactcactctgtctccacagccagccgcccctcaccagggccatttcttcaaaaggactttccagagcggagtcaggcgggacctgtcagaggagccacgggagacacaggcctcagcagcagctccctggagagaagcccccagccctgccgtccctggggagccacccaggaaacgtttgagggagggttagtaaacaagggccaggcggcctcggcctcctccccattctctgctcaggaagagaatgggagcactgtcactgtggggtcagcagggcagccattggtgtggggtgggggtggggaccaggagcctggattccagcctcagcttggtaactttggccatatccctcctccctggccctctgtcctggtctcagtttctagatctgtagaagtgtgtctgtgaggcaggcagaggctggagggaggagctcttgaaacattagaatatgcctgactagctcagtcggtggagcatgagactcttaaagtattagaaaccttgggattctgtaatgtggaagtgcagaatattagaatcacggcaatggatgagggaaaagctccctcctatttggaccccactagagctgtttacaaagtgcttcaaagagcagttcaacagcagctgtgatggaccgagcactctgtccgggtaccccctatcagtgctttcatccattatctcatttaagcctccctgcagtccttattattcctatttcagagatggggaaacgggggccggaaaggtccagtcagttgcacggggccacttgattagtaagcaatggagcccagactcacacccagcagtcctggcttcaaaccgttatgccggcaggagctttgagaacttccgataccaggccacactccgtaacaattaaatcagaatgtctgagggcaggaggcaagccctgatactcttcaaagatcctcagatgattccaatgtacagctaagtttggacgtcaccgcacattctactccctcaccttgtccccactctaaccctgttaggaagggaatccttactcctgttttacagatggacaaactgagggttagcaaatgactcatccatgtacatgatgtagcttgcactggaatccaggtaggtgccctctgttcctgagggcgactcacttgccagcgggtgcctccgcccctcccccacctgctcacacctgttgctgcgtaacaagggctggcacacctgggctggaaggcccagccttgtctgttcctcttgccgctccctcccctctccacggtcttgacacagatcagacaagagggtcaggtgcagactccttttccagcccctccccttgatgcacccaccttgtctacacttgttgcggatgttgctgcctaagcggccgctactcgatgctgctgccacccaacccgctgcgcctgcgctttgtgtgccccggagagcctggggcatttctctcctcccgcagcgcctgagagcccagctgcccccgggccccgccctccggacctgcccaccccagggagggggagtgacgtgaagagatgctgacccgaggcgtactgggacttgtagtctacccctgtagagctgggcagaagcagccccgcctgcaattttacttttctattaagacatttgttcactcatttatcatgaaatactttttcttaagaatcattgaactcagttcctagaaaaaaagaaaaagtaaagttgcaaggagaagccaagctcctagttttgcatgtttttttgatgcttcccctttccatccccagcttccagtctagtgagggagattacatggaaacacacaattggagcacaaggtgtgatttaacaatggaaaagatgagcctgacttttctcaaggggttcaggaaggcttcccagaggaggctgaaaggggccttggaggatgaggggcagtttcctaggcgacccgaaatttcccctatgaatactgtcaggatgttgaagagtgcccagcatttccgtgtgtctagaacataaagcgcaggggtggggagggcatcgggagtgtcaggcgatagagctgcagggtttggaaagaaatagcacagaggccttgcatgacaggcggagagcttggatgttaggacgcagtgactggagctgggggtgggagtttcaagatgaggagtgaggtgtgtgattagggggtcggaaaggcccctctagggcacagtgaagaatggactggcgggagcccacctggagaaaggaagactttctgtatctatcacctcggactgtgatcatttccttcaatagctcagccccgcaaaccctcacctaccagcagccacaggatgtcattcagagaccagaggatgtcagggcctaaaagacttctgtcccgtcccctatgtggcaagggtgcccaccctgccctgggcccttcctcctgtcccagagaactcttccttaccggggctgcagggctcatggttcctgggtggccagggcagcatttcccagaaggctcccgcagcggggcatttccctgagcgccttagagataaggggatcaggaaggtgctaccaagtgggaggctggagggggaggcaaggagggagcgcacagatcccaaggaaggtcgccctctttctccaggctcctcccagcctttccaactgatggctctgaccctaggttcactagacaagtcatccctgattcagaagtggtcttggctcagcatcgccgaggttcccggagtggaatcggggcgaggttgcgggggcaggacaggaaccgggctggtcctcctccctaggttgggggcggggctacatcttcattctttggcctggcaggacagcgcccatcaccccagtcctggctgcgcagtctggctctttaagccttcctctcttgctcctgagtctctgtaatcctgacctcgagctaccctcgctcctcggccctttgtgcggtgcgtgccctgctgagggattcgccatggccaatcctattaaccattgagttcatcccctcttagccgactcaagaaccagctctcccataccgcgttttcatctctgtgcctttaactcactctctgtctggttcctggaacgtcccagtcccagcttctcctagctaaattttccacctccacagtggaaggaagaaaggaagcagtgggagggggaaagaggcaaggaaagagatatggaaggaaggaaagacagaaggagaaaagaagggaggggaaagacgggaaggcaggtaggtagggctgcagctggcctcggaggatctgcgcctgggtcctgccccgacccagcctctctccagctctccctgctcccctccccgatgggcagtggggcatccttcatgttgaggggcggggacggtgcaatcatctcctagatttcattctctggatttagcaaccagatgaaaaaggaaggttctccagcagcagtggagacttcaggggaagactctcccctacctcccaaagagcgggcactatgacgaaaaaaagaggaaagga

SEQ ID NO: 915348 - DNA, 4001 bp, Homo sapiens
cgatctttatgtcacggacattgaagtggatgagcacacggtcctcctcgtcctgcgctgtctcatcgtggtagtatcccagggtcccgtccagccacagggcaaaccagttccgcttccagcggcggaggatggagcctgtacgatattccagatgcactaggcaggctgatcccagagcctgctgggaatagaagccccagacagactcccaagtcccctcagcctcagtccctagtgttacaaccacctttttcttgtctaccccctgaaatgagggcaggacctctttctgtcttgttcacctcctgcctcccattgggtctgatgcatagcagaagctcgatacacgtgctgaacagggaaatgagtgactgggcccattacttggaagcttctaaggccaagccccaggtctcttcaagggcaaagacctctccctaccttaagcctgcatcttctctctctctgtctttgagacagggtcttgctctgtcactcaggctggagtgcaggggcacaggcatggctcactgcagccttaacctcctgggctcaagtgatcctcccatctcagcctcccaaatagctggaacatcaggcacgcaccactgcacctggctaatttttaattagccaggtaggtattcttggagacagtgggtctcaccatgttgtctaggctggtatcaaactcctgggctcaagcaatcctcccaactcagcctcctaaagtgttgggattacaggcatgagccactgtgcccggcctcttatctctcatctctgacttgtgtgatggttatttgtgtagcatctgcctcctgtaccactctgggggctatggctccccacgcaggtcctggcacccagggagacctggctcagtgtttgctgaactaaatgaactgagaatgggcaggggtatggggcatggggctgcttgtcccaggggtccccaggatagctcttgctcaggtcatgactctggtcagaggtgggtctagaagcccgagaccgagcttctgacattttgcaactggaaatcttaacagggaagggcaaagacataagagagcttcttagggctttgtggattccaaagcacaaaggcatttttcactttgttctgtgcctcgttctgtgtccagcccggggttgggggactgtggacacacagagggtcaaacccagcccctgtccttgaggagttcgcagactggggccagtctggggtcagggagtggggatacccacagatagacagttctgttctaaggagatcactgtaaggcgccgtgaaaaccgaggagggagcctctaatccagcttgacgctactgcaggagcaggggtgggggccagaggaaaagccagagaaggctcctcagagaggggcccatctgagatgggtcgtgatgaacaaatagaagtttaaaccatgtagtcgggaatgggaaggaccttcaggcagagggaagagcatggacaaacaagggaaggatgaaaaggtcctggtttcttgagagaagtgttccccgtggcaagcccagtaagccacttccttcaccctgccccaggaccaggggcccaggatcactcactctgtctccacagccagccgcccctcaccagggccatttcttcaaaaggactttccagagcggagtcaggcgggacctgtcagaggagccacgggagacacaggcctcagcagcagctccctggagagaagcccccagccctgccgtccctggggagccacccaggaaacgtttgagggagggttagtaaacaagggccaggcggcctcggcctcctccccattctctgctcaggaagagaatgggagcactgtcactgtggggtcagcagggcagccattggtgtggggtgggggtggggaccaggagcctggattccagcctcagcttggtaactttggccatatccctcctccctggccctctgtcctggtctcagtttctagatctgtagaagtgtgtctgtgaggcaggcagaggctggagggaggagctcttgaaacattagaatatgcctgactagctcagtcggtggagcatgagactcttaaagtattagaaaccttgggattctgtaatgtggaagtgcagaatattagaatcacggcaatggatgagggaaaagctccctcctatttggaccccactagagctgtttacaaagtgcttcaaagagcagttcaacagcagctgtgatggaccgagcactctgtccgggtaccccctatcagtgctttcatccattatctcatttaagcctccctgcagtccttattattcctatttcagagatggggaaacgggggccggaaaggtccagtcagttgcacggggccacttgattagtaagcaatggagcccagactcacacccagcagtcctggcttcaaaccgttatgccggcaggagctttgagaacttccgataccaggccacactccgtaacaattaaatcagaatgtctgagggcaggaggcaagccctgatactcttcaaagatcctcagatgattccaatgtacagctaagtttggacgtcaccgcacattctactccctcaccttgtccccactctaaccctgttaggaagggaatccttactcctgttttacagatggacaaactgagggttagcaaatgactcatccatgtacatgatgtagcttgcactggaatccaggtaggtgccctctgttcctgagggcgactcacttgccagcgggtgcctccgcccctcccccacctgctcacacctgttgctgcgtaacaagggctggcacacctgggctggaaggcccagccttgtctgttcctcttgccgctccctcccctctccacggtcttgacacagatcagacaagagggtcaggtgcagactccttttccagcccctccccttgatgcacccaccttgtctacacttgttgcggatgttgctgcctaagcggccgctactcgatgctgctgccacccaacccgctgcgcctgcgctttgtgtgccccggagagcctggggcatttctctcctcccgcagcgcctgagagcccagctgcccccgggccccgccctccggacctgcccaccccagggagggggagtgacgtgaagagatgctgacccgaggcgtactgggacttgtagtctacccctgtagagctgggcagaagcagccccgcctgcaattttacttttctattaagacatttgttcactcatttatcatgaaatactttttcttaagaatcattgaactcagttcctagaaaaaaagaaaaagtaaagttgcaaggagaagccaagctcctagttttgcatgtttttttgatgcttcccctttccatccccagcttccagtctagtgagggagattacatggaaacacacaattggagcacaaggtgtgatttaacaatggaaaagatgagcctgacttttctcaaggggttcaggaaggcttcccagaggaggctgaaaggggccttggaggatgaggggcagtttcctaggcgacccgaaatttcccctatgaatactgtcaggatgttgaagagtgcccagcatttccgtgtgtctagaacataaagcgcaggggtggggagggcatcgggagtgtcaggcgatagagctgcagggtttggaaagaaatagcacagaggccttgcatgacaggcggagagcttggatgttaggacgcagtgactggagctgggggtgggagtttcaagatgaggagtgaggtgtgtgattagggggtcggaaaggcccctctagggcacagtgaagaatggactggcgggagcccacctggagaaaggaagactttctgtatctatcacctcggactgtgatcatttccttcaatagctcagccccgcaaaccctcacctaccagcagccacaggatgtcattcagagaccagaggatgtcagggcctaaaagacttctgtcccgtcccct

SEQ ID NO: 915349 - DNA, 4001 bp, Homo sapiens
gataagcaaggtgagcgcgtgaaggcatgccatgattgttcacctgctgaagtctgagacctagactatgagtgtggagatcaccctggtggtctttgcaaaagttagacttttaagaaaggcagaataacacagtagataagaagaaaggttctgaagctggacagctggctggataaaaagctgtacgagttttggttgtgctatttagattcaaatcttagctaagttacttattagtgtaaatttttaacttctctgtgcctcagttcttgtctgtaaaatgataacaacatctacttctaaaacatgcccagcacatcgtaagaagggttagctctcactactataaggaagagtatatagtggttaaaggcagggtctctgaagctggaatgctggttcatatcttaccttcaccatttaagtagctccgggacctgagcaagagtcacttagcatctctgtctctgtttctcatctacaaaatgggaatgataatgatatctccctaataggtcactattacatgttaaacaccataggaagtgttattattatgaaatgaattagaaagcatattccttgacttttaggtttggctgattcaaaaagggctatataaaaaatatctactggacacctctaagaaaagcattggattaagaatgaacagactaagattcaagagccagttctatgacttactagaagggagactctgggcaggtcatttaatttcccttggtctcaggcttttcatacataaagtgggttagtaatacttcccctgtgttgtttattagatttttttcacccacggactaaatgcagtacacaattatccccagaggcatcatattgtcaaatagatatgaaaagattacacactggaggctgggtacagtggctcacacctgtaattccagcactttgggtgactgaggtgggtggatcacttgaagccaggagttcgagaccagcctggtcaacatggagaagccccatctctactaaaatacaaaaaattagccaggcgtggtggtgtgcacctgtaatcccagctacttgggaggctgaggtacaagaattgcttgaacccaggaggcggaggttgcagtgagctgaaattgtaccattacactccagcctgggtgacaaagtgagactctgtctccagaaaaacaaaaacaaaaagagaaaagattatacactggaatgcaatgattatcccttaaaatgataaaactgcccattttatttaagtcagagaatctaccccaagtgtgctcttgctgggactcagtgaatctggggttggggctttctcgctcctgtggcttgagttcacaaggaatttgcagaaatagccccccagcccactcccttaattctcattctttgtcttccttcccttgcttcccatttggttcagaagacacatgttttgtataattgagagtagcgatagaggggtgtgttctgaaattctggttaatttccctcagggaacaaaggacagcagagagcatggcttctactcaccagaatagactgcattgctttcgtagatatgtgaactggccttgatgtctagggttatggtgtagtattcatcaaaggtgaagcaggtgctactgtaccttataaaggtggcagaagaaagctgcagactgaggcacagaaacatccccagtggctgcagcagcatgtcatggaagactgccatggtctcagtctgtttggaaagtgctaggcctggaattgggtgaaactgacaactcacctcttgtttatatgccagggcttctgggtgaagtcatacatgcagatcttctccctgccccttctgaatatacattggattctggaatttggcccaagacatcaccaggaatgaatcaccagtcaccattacctgtcaccgatgattttgcaaattgcagttttgctcaagaaagggaatgtcctgaatatggttttcttttacgcctgtcatttcagcatctgctgtttgaagaaagccattgagaagatgtgaataccagcaagtgaaattcagagttgtgtaaaatgtaaaataaacccctgaggaatgagatgtctatagggggtttgaaaagcttggacgaatccctgggaatctaaaaagccatgtgcatgtgcagggctacacacattcccaggaaagacctgaggaggccctaattactcacctctggccgaccttgaggctctgcacaagtaagaagtaaaggctaaggtagagctgtaaactgcctatctgatcactgaaggcattccccaaaacacacatgcagaagtgcttagcaaagactgggagacttgttggttccagagttattagttaaagaaattttttaaaaatctatttattagctggtcaataagcaaacagaacagagactttggtggttacacatgataaagaatacagacttcacataattaatttaggaaagtcataaaacaaacagcagcaacaacaacaataaaaaagaataacaaacagcaacaaaaacaaactcagggaggagaagggagtctggtgtccaaagttgtcacatttgtgtgtgtgtgtgtgtgtgtgtgtgtgtgtgtatgtatgtatttatttatttttttgagacacagtctcactattgcccaggctggagtgaagtggtgcaatcatagctcactgcagcctcaaattcttgggcttaagtgatcctcctgctgcagcttcccaagtagctggggctataggcacgtgtcatcacacctggttaatttttatagtttttgtagagtcttgctatgttgtccagactgttattgaactcctgggcataagcaatcctcctgcctcagcctcccaaagtgctgggattatgggcataagtcactttgcttggcttcatgttttttaaatgttcagttttcaagaaaaattataagatatacaaataaacaagaaagtatggcttatacagaagaaaaaaacatcccaggtaaacagaaactgtccctgaggaagcccacacgctgaacttgacatagacgttaactcagctttataaatacgttcaaagaactagaaaaaatcatgtctaaagaattaaaggaaagtatgagattgattttggtgattgtctcaccaagtaaagaatagtaataaagagattaaaatgataaaaagagccaaatagaaattctgcaatggaaaagtacaataactacgattttaaaaagtcaccagaagaactcaacagcatatttgaactggtagaagaaagtattggtgaacttgaagatgggtcaattgaatacatttaacaaaacaagtgcaagacttgtatacggaaaactataacaatacactcaggatagtcaaaatgatcttgaaaacaaacaaacaaaactcacaaagtttgaggactcacacttcccaattttaaaatttactgtgtagctacagtaatcaagacagtgtggtactgacataaggatagacatatacatcaatgaaatagaattgagatttcagaaacatacccacacatttattattaactgggttttgacaagggtaacaagacaactcaatggggaaataaatggtgctgggtcaactgaatatgcacatgcaaaagaataaagttggagccctactcgtaccatatacaaaattaactcaaggtgaaccaagggcctacatgtaaaactataaaactcttaggaaaaaacataggtataaatcttcataaccttggtttaagcaacagttattagacatgatgcctgaggcaaaaataagtaaaggaaaaatagataaattggacttcaaaactaaaagcttttgttctttgaaggccactatcaagaaagtgaaaagggctgggcacggtgacttacgcctgtaatcccagcactttgggaggccaaggagggtggatcacctgaggtcaggagttcgagaccagcctggccaacatgat

SEQ ID NO: 915350 - DNA, 4001 bp, Homo sapiens
gagaggtgtccttggctcgggtagcagggaccttgatgtatcttgaagccagggggccgactgaggcgcttgtctgaaggcctccatgagagggagggggctggagggggctgttcccaataatagctctagttattgggacctgagaggttcacttctgtggtccagccccctccctcccaggacaaagttcagaggaagagggcaggggtgagccccggacaggctcctgctgagcagagtgcccctgtcatcttgggtgtcctcacaggctcctgaagtcgtgtgctgtaaacatcactccctcatggcagccgatggtgcgagccgaggccagcccagcacacagagacccatccactcctgacccaggcaccagagcccagaagcaccctcacccatgaagtgtgcaaacgcggtgggccgcagcggggagccaggccacagggcaccgtgtgcaaggagagggcaggagagccccttcgcgcccagccctgacctcagcggggctcctcctccgggcccttgggaaggaccaggtcacggttcccagacgcctctcaagaggctacccccatgccaggccccctgatagcagcctgcaactgcggaagcccaggacactgtgaccgatcgctggcaccggttgtaatatccagggccacggggtgacttaggtccctcctcggattctcacggtcccgcccacgagttactttttctgtccaattaagcagcttttgctgcacctgcccgcccccaaacctttgcgccagacaggcgggccccgggcaccctcggagcaaaacaaaccaggccccgcccccaggccagcgacccggattggatcctcgccgggttccccaggcgcggaccggaaccctccccacggtacccaccgactcgccgcggggcccctccgctcacggagaccatcccccggccccgcacggccttcccgccagccccccgcctgccgcccccggccccgctcacccaggcagaccccggtgaccagcgccgtggccgtgagcgccccggccgaggcgccgtagatgtgcgtggcgttggccaccaggaagggcgcgtgctcgcggaggcaggaggccacgccgacgtagtagacgccgaggaagccgcagcccgcgaacgagatgttccacgtcttctcgcggggaaacatcgcggcggcggccgccgggccccgggttccgtgggcggccaggcctctgtgagccgcctgctcgccgctcgctcgctggagccgggggccgggcaggtcccgctgcggctctagctcggggtccccgctggcggaggcgaagaagctacgcgggcggcgcggaggcggcgcttttaagtgtgggactcacggcgggggcggggccggcacacgaagaccaatcggggcgcgcagggaacggccgtgccctcgggacccgcccccgtccttgacccggccccccgcgctggagccccgccctccgctgccgcccggagaaagcttctgccctccctccgcccctgctgggcacggctgggggcacacgcctaggggtgtagggtgggctgggcgcaggcccgagcctgggggccggaagcctcacacagacctgggtaccggcgagagggagctctggtttcagggcagccaccgcccctccccaccgggtccgcctcccacacccacccgggacagaggagctggtccctggacagaggcgcaccggcagcacccccagacctgaaagccgcacaggcctcgggagccccgggacccacaggctcacccacagacagacccataaacatccaaggccaaggccggatgcgagtcccgcaaacccttcgtgggggaccccagctccgcagacccacgcgacctgacgtggggcctcagccctgccccgcgcccgcgacccttccggaccttggcttcttacctgggtctggccctgcctgttcaggctttggggctgcctgcgtctgactggggccgccctgctcccgataattgccccagaggtggagcaatcctgggtgatgtcaccctttcaccccttttccgcatttttctcctggtcagtggagcaaacagggcttggagtagatccaggatccctccctgaacctcaccccacccccaaacgagaggctttctcaggttggggtgggaggcaatgagattctgtctccccaggaacactggctccccaggctgaggtcatctctggacctagctgttgccagagctgcagagggtctgggatggggcttggggctgcccccaacccaagctgagttagggaagccagaacagggccagaacaggatggggccatctagggggatgctgcccagtcctcagcctctttgctcccagccatcccagacagcactggaaagtcaaccctgccccagccctactgggggccggtaggcatttacataagctcaaaatgagaggaggccgggtgtggaagctcacacctgtaatcccagcacttggggaggccaagacgggcggatcacagaaagtcgggagtttgagaccgcctggctggtgaaacgctgtctctaccaaaaatacaaaaattagccggtcagggtggcacacgcctgtaatcccagctactcgggaggctgaggcaggagaatcacttgaacctgggaggcggaggttgcagtgagctgagatcgcaccactgcactccagcctggggggcagagcgaggctccgtcctaaaaagaggccgggcacagtggcccatgcctgtaatcccagcactttgggaggccgaggagggcagatcacctgaggtcaggagtttgagaccagccaggccaacatggcaaaaccctgtctctactgaaaatacaaaaatttgccaggtgtggtagtgcacgcatgtagtcctagctactcgggaggctgaggcaagagagtcacttgaacccgggaggcagaggttgcagtgaactgagattgtgccactgcactccagcctggccaggtgacagagcatgacttcttctcaaaaaaaaaaaaaaaaagaaaaaagaaaaatgagtgagaggaggtaggtaaccacgtgtggggcacctaaggggttctggagggcttccctgtgggaagtgatgctgagttgaattttgaagggtaaatgagcagacccaggcagccgaccaggacaggcgaagattgtcggggagtgaggggagagagtagctgaagcccagccatgggagagggtcaagcagggaggacgtgaccatacctgacttaaagcgactccttctaggctgggcacagtggttcacacctataatcccagcactctgggaggccaaggtggggggattgcttgagtccagaagtttgagaccagcctaggcaacatagcttgattccatccctacaaaaaatttaaaaataggccaggcacagtggctcacacctgtaatcccagcactttgggaggttgaggtgagtggatcacgaggtcaggagatcgagaccatcctggctaccatggtgaaaccctgtctctactaaaaatacaaaaaaaaaaaatagccaggtgtggtggtgggcgcctgtaatcccagctactccggaggctgagacaggagaatggtgtgaactcgggaggcggagcttgcagtgagcccagatcgccgcactgcactccagcctgggcgacagagtgaaactctgtctcaaaaataataataaataaataataaaaatgccgggtacagtggctcactcctgtaatcccagcactttgggaggccaaggcgggcagatcacaagatcaggagattgagaccatcctggctaatacggtgaaaccccatctctactaaaaatacaaaaaaattagctgggtgcgtggtggcaggcacctgtagtcccagctacttgcgaggctgaggcaggagaatggtgtgaacctgggaggcggagcttgcagtgagccgatatcacaccactgtgc

SEQ ID NO: 915351 - DNA, 4001 bp, Homo sapiens
agcaactggcatcttggcctgaagcctttacaaatctggttcacataactaatttctctcatgctgatttcatgcttaccacatacatttctgactatgatcaggttttccacttaagtcttttttttttttttgagacagagtctcgctcctgttgcccaggctagagtgcaatggtgtgatctcggctcaccacaacctctgcctctcatgttcaagcgattcttccgcctcagcctcctgagtagctgggattacaggcatgcgccaccacgcccgactaattttgtatttttagtagagacagggtttctccatgttggtcaggctggtctcaaattctcgacttcagattatccacctgccttggcctcccaaaatgctgggattacaggcgtgagccaccacacctggctagtcttcttttaaaaagagaaggaccgagcctgctggcttatgcctgtaatcccagcactttggaaggccaaggtgggtggatcacttgaggtcaggagttcgagagcagtctggcctacatggtgaaaccccttctctactaaaagtacaaaaaaaaattagtcgggcctggtggcgggcgcctgtaatcccagctacttgggaggctgaggcaggagaatcgcttgaacctgggaggcggaggctgaagtgagccgagattgcaccactgcactccagcctgggtgataaaacaagactgtcaaaaaaaaaaaaaaaaaaaaagagagagagagaaggcactgggcatgaagacttgaagtattctggtttctgaaaggaatttctcaccataaattaacgtttcgttatctttttgtatataagaagttcaaagtgttgagtggttaaggcaggtgcacattcataccgattctagaacttccacatctcccaggctttgcttcaaatgactccttacactgctctacagcttgaccaacacgatggacccgtatgatgcagcacgggactccaaggcaggacacctggcttcacagacagctcaggcaattagctttccttgtctgtttctccatctgtaaagctccctaaagctccttccacagctcaaattcaattttaggaacctacctcaagggattcatatttgcacagaccaccaacagctatgataaaataactgatggatcagcagaggtttaaggtgtaggctggaaagggaggagccaagaataaaaagctacatttcaaaacccccacatctgttgctttgttaccggggcttcaacaatttccaaactcaggtgccaccagtgcctagtctctatctagcacatcccaattccgcctttcgggaacttcgagttggtttaaaatcgtgctgcatattcctatttttgatttggcatccaagcggtacccggtgggcatttcaaagtccccacatcctaaatctcaaaactcaagtttgattcttcatctcacagccaccgagaactctgctccaggggaagtggaaattggaagcgctccactttcggttctaggcgccgaggaactcgggcgagagcgtggagcacggctgcagggcgggaggggtgcgggactcacatttctcaattagagcctcctcgcagtctaggccgaagatctgcagctcctccgccagctgctgggcggatgcggacatggtcgcccaagccaggggccggggagccggcccacccagctccgacctgcgcccaagaagcccacgggggtggcgagcgatgagctcctcgccctcttatccttcccccctccgcggaccgtgacaggaggtgactggcccaagcaagacctcagaccgtcagaaggccccggccgtcggtcacagagaaatactttttttaaaaaatgaaggggtggctcccaaacgccctgaatggagggagcagaaatctcgagaggacgctctcctggtgagaacgtcctgcttcccaaaagctaccgctgagcttctcagtgacggtggcagaactgagtggccggaaaaacccgccaaatggtttgtgcagtgcacgcatgcgcgaaaccgggagccaaccccaaaccttccccttgctttccccggctcattccggaaccccacgcgcgcacgcgcggcccagggcgcgtgcgcatcagcgggcgtgtgggcgtctctacgcacgcgcctggcggcccgccagtcagcagctgcgcagttctctctcacggcgcgagaatgccggttgtgactcgcaacgcccgggagttgcctacaaggaaactgagtctgtgtgcggatgcctgttttctgggcatcggctgctcgataaaactcagtggcgcatgtttgtcacccttttgccctgttccgtggtgcgcaggcgttgtcgtgcgcgtgccttcgactatctaaaacttactgtacccccttctccattccccttgtcatctctgcctgttgtgcccttggttcatcctaaaagaatggcttcagtagggaatctggttgccatggttattatcgtgcttatcaccgtggtgccagccacagtgatgggtatgttttctgaatctggggcatttggggggatatgaggtgggaaggtgacggataatttagttttggacacgttaagtttgagtgcctctgggatttccaggtagagattcccagtgggtgactggaggcttgggagtgaaggtaggtcactcaaggatagagtttaggggtaagatgagaagagggttctccccttgaaatacaccgtaattctttgagccaaaaatctcaaccgtaggcgtcatacaatgctggtgggatggtatagagcgtttcgagaaaacaatttagcaatatgtatcaggaacctttaaaatgtccatcccaggccaggtgcggtcactcacgcctgtaatcccagcatttgggaggccgaggcaggcggatcactttgtagcaggacgagccacagacaaaactcctcagacacccgagttaaagaaggaaggggtttattcggctggggtcatcggcaagactcctgtctcaccagccgagctccccgaatgagcaattcctgtcccttttaagggctcacaactctaagggggtgcgcctgagagggtcgtgatcaattgaacaagcagggggtacgtgactgggggctgcatgcaccagtaattagatcagaacaaaacaggatagggattttcacagtgcttttctatacagtgtctgtaatctatagataacataactgattaggtcaggggtccatctttaccaagcctagggtgtgaggccgggctgtctgcttgtggatttcatttctgccttttagttttactttttctttctttggaggcagaaattgggcgtaagacaatatgaggggtggtctcctcccttaacttgagcccaggagttcaagatcggcctgggcaacgtggcgaaaccccttctctacaaaaaattagcgggcggtggtggcgggttcttgtgatctcagccactctgggggctgaggctggaggagcgcttgagttcgggaggtcgaggctgaagtgagtcatgatcgcctcactgcactccagcctgggcgacagagcaagatcgtgtctcaaaaagcaaacaaaggccgggtgcggtggctcacgcctgtaatcccagcactttgggaggtcgaggcgggaggatcacgaggtcaggagatcgagaccatcctggctaacacggtgaaaccccgtctctactaaaaaaaaaaaaaagaaaaaaaaaagaaagcctagcgtggtggcgagcacctgtagtcccagctacttgggaggctgaggcaggagaacggcgtgaacccgggaggcggagcttgcagtaagtcgagattgtgccactgcactacagtctgggcaacagagcgagactccgcctaaaaaaaaaaaaaagcaaacaaaaaccgaagtatgtgtgacctctagtcagccaatggctgcttggctgtattttgaatttaggc

SEQ ID NO: 915352 - DNA, 4001 bp, Homo sapiens
atgatgaataaacaaaacttgttgtatccatattacagactgaatcatgtctccaaaaaggtaatgttaaagccctaacccccaataccttaaaatgtgaccttatttagaaatagaattatagcacatgtaattagttaagacaaggtcatattggagtagggtggattcgtaattcagtatgactggtgttcatataagatggacgtgcaaagatacagatatacagggagaatgccatgacaatgaaggcagagattggaattacgcagctacaagccaagaaataccaatgattgccagcaaaccaaattagctctaatctatgtaggctatctgtagagttaaaagcaaagcataacaaaacaaaaaaaaattccaatatgattaaaattggtagtaaattggacttactgtttggcctggttaacatgaacccctagtgtatagctcagccatttgtatgtcacctgtaacaagaaaaaatttttcaaatgttttattagatgactccagagtgcacatcagtcccgaaggtctgttgctaaagattcctattcttagatgattatgccttacaaattacaataaatgccactgcagttttcccaagaactatctatctgggtaggcaggacctatttatcttaaaaatgctaagaagtttgtttcatgaactaatgaaaagtaatctaaaaagacaagctgaacatacctaacagaaaaaactctcattttcctcacattccttgttttactcaggccctttcctcatgatgttttttttgggggccaccagccaaagccatcctaaaactcattcagaagctagatgactttgaagtgtgatgtctcagaaacttctaaagaaagttgcacccatgcaaacattaaagggcacaggtggtgcaggggtcaggaaacgaaaaaagtgggtaaatatttttataagagattagattgggaactaccagcatcaagccttcatccctcctagacccaggatgcctgcactctcttctctcaaagtctcttccaattccaaatgtcaagcttccaatagttagaagacttgcacaggttaggcaaaggcagtgtgatgtagaagaaagcattagtaagaggacagacctaggttgaaaaactgcctatcccttaccaaacgcaaataaacaagttatttggcccctcagcttcaatttcctcatctcgggataccaccaccgacctgggatggggtgcggggaggtcactgtaaagattaaagtgccttggcacacagcaggcactcaatcatcacggtttgcaaagtgcactcacatccatcaattcgctcgatcttttcctcacccgtgtgaagcggatcaaacctctatcaatgcttaaatttccaggaagaggaaacagtatctggaggttacgcaacttgtaacttaacacagttaagacacgatttcctcaactgtaaacttaaaactttaaacgccaaccaccttaaaagaaaggtgtagggacgccttagaactctcagccaacggccctccctccgcgcccggtctccgcggctccagccccaggctctgttcccagcacgcccacccaagggacgcggacttccgtgtgtgctggaggaccttcccgacgagtcctcgctcgctctggggcacagagctcgcccaggtcccctcgtggggacctgtctcccctggtccccacgaagccacaagcagacagagggtcaaggctcccgccgccctagccgggcccaggaccccggtcgcacgcccgcgttccccagtagtagctgctcacgatcttgttttggtccgtgacgaactcgtctatattttccagataaagctggtccgccatggtgcggcagcgctgggacccgcctctaacccctctctcaatcacagccacagctcccgccggcgggaaacgtctttgctccctcccaggtcccgggtcgtttccccggcaacggaggcgacgcactacggcggccctcgaagggtcaaactagtcagggagacggcgcagacggaggtaggcagagctagtagaaaacaccgaagtgcggggcctcctggctggttttttcctatacctacgtacctatgataaagtttaatttataaattaggcacagtaagagattaacaaaaataactaacgataaaatagaacaattattattatactgtaataaacattagtgaatatggtctctcaacagatgtcattgggtataatatttccctaccgaggttggctgcgcgtgatgaaacccgggaaagccaggataaaggggagactattgaaaacaagtaattttagtagtgctgccaactggggaaaagtactgcctgttataatccctcagagttgagaaattagggaaggtttttccagaggggttgaggagaggctgagtgtttcggatagaagcaggagaatttgctggaaaagagttcattatctctggattgttaggagaagaggcggatgagagagacttgggagaaaccaaatcgttgtgcctaggagactgtgaagaggcgcttgagctgtgttctcaggaaaacttggagaaaagttatcaggttggggaatttcaactcaaatttctcctagtatcacccccgcaaaaatctttaataattgacttcagcataagccggtgcagttcagtatcgcaggtgtagtgcgtaagagagtgggctctagagtcagacttactgggtttgaatcctggttttgctgtttgttgtgtaaacttaggtaattctttagccactaggagcctatttccttatctataaaatgggaataataacagtacctacttcaaaggcttgtcgcgacatgcattcattcaaagcatagcaaaatcctgagaaaggccagatactattctgagtgttgaggtgctggggctgcagctatgagcaataataaaccgagcctgttcacatgtaacttacattctgagatttttaagtgaaagatagtggtggtttaaaatagggtagcagaccgggcgcggtggctaacgcctgtaatcccagcactttgggaggcctagggggatgaatcacctgaggtcaggagttcgaggcctgccaggcccacatggtgaaaccctgtctctactaaaaatataaaaattagccgggcgtggtggcacgtgcctatagtcccagttactcccagggctgaggcatgagaatgtcttgaatccaggaggtggaggttgcagtgagccgagatcatgccactgcacttcagcttgggaaacagagagagactccgtctaaaaataaaataaaatggctcggcgcagtggctcacacctgtaatcccacactttgggaggccgaggcaggcagatcacctgaggtcaggagttcgagaccagcctggcaaacatggcgaaaccccgtctctactaaaaatacaaaaattaaccaggtgtggtggtacacgcctgtaatcccagctactcgggaggctgaggcagcagaatcacttgaacctgggagaccgaggttgcggtgagctgagatggtgccactgcactccagcctgggaaacagagtgagacccccctcaaaataaataaataaaataaaatagggtagcagtgccaggcacagtagctcacacctataatcccagcactttgggaggccaaggcaagtggatcacttgagccccaggagttcgagaccagcctgagcaacatactgaaactccgtccctactaaaaaaaaaaaaaaaaaaagccatggtggcacgagcctgtggtctgtggtctgtggtcccagttctgaagtgggaggatggattgagcccaggaggtagaggttgcagtgagcacttgatcatgccactgcatacagcctgggtgacagagtgagaccctgtctcaaaaaataataattttttttttttttgagacagagttttgctcttgttccccaggttggagtgcaatg

SEQ ID NO: 915353 - DNA, 4001 bp, Homo sapiens
tgggagctcagccagtcctgctctcagattcctggccttaggtgggagagcatcttttcctcatggatcaactgtccatgtctgactgtgcctaacttgccagatcatgggtcagggagacaggcagcaggtattggaaggtgatggccaggtccttttccccagtgaccactctccatctagaagcactctgcttcagctgcgcaggctcttccggggactctgggagcctgctggttagatggaggagttgagcctctgacacctccaggttctgcctgccaagggttcctccgcagccgggctgagctgagcaggagcaatgggctctcgcttctgtcctgaggttcttgggtggtgagcaagagagctaagggcaggaggtcttacgtggtgcctcataggggatagagatgccagagactgtggaagatggggtgggagggagggataccccagagagagagagagagaaacagagaatcagttgttgagtccctggatctgatttcaccagcttattcttggccatgcccatagtccttgggaaacccctcagttctaaatagatagttccttgggtcctgggtgtacctttgccccccactagcttgtagaggtaagaattattggccgggtgtggtggctcacgcctgtaatcccagcactttgggaggctgaggtgggtgggatcacgaggtcaggagatcaagaccatcctggctaacacggtgaaaccctgtctctactaaaaatagaaaaaattagccgggcgtgttggcgggcgcctgtagtcccagctacttgggaggctgagacaggagaatggcgtgaacccgagaggcggagtttgcagtgagccgagatcgcgccactgcactccagcctgggcaacagagcaagactctgtctcaaaaaaaaagaattattatagtggcgtgtcctcctgagccaggcacctcatagaatcttcttgcctgttcagcaaggccttccaaccctccatccatttctccctcaggtcaggacagcagggtgacagtgcctggagaaggccctggctcccctgaaagccctcccggcctgtctctgacctgcactggaagcgggggtctccggggtgggtcttcagcacctgccacacctctgggggaggctccaagcccatctgcttggcccgacaccagcgctgcagccgtgtgatccctgccagggtgggaagaagactctggagacttgtggggggtggggtagagtctgagctggagaatgtgtgtgttggggggagacagttcctgagggtcagagtcacgcaagcgcttgggtgacttcagagacgtgtgggtgactggctgggagaggcgcctccgtggggctgggtgggttctcaccggtgcagggcccgtactgccaggccaggtcaaactgcctcagcagctccagctccgcttcctcctcgtcgcggggctggggctcctcccctgcaatgacagctgctcttcagtacgaggttggcttcagtctcctgcccctcacctcccagccttcctcaccaccgctttgcctctgccaccccgcagctagacctggtgtcgggaggggaggacaggccacctttccctttccatcggcccctccgcccctctaggggcctcctctaggcccctccgtgtccactcctcctgcctccctcacacctcagagacctagctcgggtgccagctcccccttgctgtgcccagcgggcccctccctcctcttcacaaccgggtaggaatcagtgatgagccgcttccggcccatggcggccacccaggcaggcagagaaggaggcaactgcggggaagaggagagaccggccagtgggcgcgagaaagacagctgctgagagagacagacggggccaggccagcggcgggcagacaagatgacccagacaaaccgagagaggaagtcgccggggtccagggagggacgcctcccccacccccaaaagcacgcaaacaggaaagacttcagccaatggcaggccgcctatgcggggcggggccctggcgctagccaatggtaggcagtgtagggtgaggggcggggcggtgcctcagctgtgggccgcgggaggaggggcaggctggggcgggggacctgtcgggatgccccgacttcaccaccttccccggcccccattggtctgctgtgggtcccgagagacttcaggagagttatcttcagcctctcacttcccgttttcccttcctaggcaaatgttcttttcagcttcgctaatccccgtggccagtttgtaactccctagagtccagctggagccttcactcggtcctttggcccgccccgccttgtgggggcaggtctggaggtctgaagagagtttgggctaatccaggccccttcccggctcccacccaacccccactggccccaggagacctggctggagaagcccatgggttctgaaacctcctttctcacagtctgtgcccaaagatgctgcccactcttagtccgagtaagtgtttgccgttttgactctcctggggtcccaagtcgtgtccggcccgccccaccagtcaggaagattccatactgagtaggaaggcagagcaagggtctggtccccccaccacaatgtgtttggatccctagttcttcactggcaaaatctgccctgtctctcacaataatgtgagtctgagcagaaaatattaataataaacctaacactcattgcacgtaccatgtgccaagtactgttctaagcactttcccacatgttaattaaaatagatgtcaaaaagtttttgaaagtaggaagtatagctaaatgattatcactgctgatagtcacaggcattgtagggccccaatcaaaccacagtctctcttgcaccccaggagctcactgtcacaaggcagacagatgcacagttgtcagtgagaggctataattcctaccagaagagggaaagggtgggtcagagattggttaggaccacagggatgattagcattggaaggcctcctggaggaggtggactgctgtaaacaatgtctctcaattctccacccatgacctttgtcccttgggctcctgtcatcactgactcacccatactgctgcctccccctcaccaacttcctggcaggaggcaaaagtactggccagtgggagtctgggaaccagcacagggaccagcccagctctaatcaccctccagagatcccatccggttcttccttccagggatactgggagggtggggcacagactcctgggctgctgcctgctcagaggcctctgcctcctcctttccctgctctggggtctgggtgttctgcactggaagagggctaagccactggtacacgtgggcacaagggaggaagctgctctggaaaggagaccaccagaggggaggcagaggagcaggccatgtcttcagggtccacgtcctgcctggctctccccatcggcgtcctagaggagggagcttgtgggggcactgcatggagctggagggccctttctgctgtattgtttgggctgggcctagtctaatccccccatctgccttgcggactaagtggggcccacattcagggagacagtgtccctgcggagttagtgatggaagcagggaggccctgtctaccagggctgggaagggcctaggtgctgagtccagtcaggtgctgagcatgctaggtagggatggcgtctaggctctgggggattgactacccctccccagagggtcttggcaagggttcctgggctgtttccagaggtgtgtggcacccacctcctgagtccaccaagccctgagggagtagggagccatgggtggggcagacccctcctcattcccagtccctcccacccctgaaagctgatagccgtggggccctgccaccgcccagggagcgtgaaatggggtgtgccgctgggcagccacagtagctcctaccaccgcctgggccta

SEQ ID NO: 915354 - DNA, 4001 bp, Homo sapiens
ggtggatcacgaggtcaggagatcgagaccatcctggctaacacagtgaaaccccgtctgtactaaaaatacaaaaaattagccgggcgtggtggtgggcacctgtagacccagctacttgggaggctgaggcaggagaatggtgtgaacccgggaggcggagcttgcagtgagtggagatctcgccactgcacaccagcctgggtgacaaagcgagactccgtctcaaaaaaaaaaaaaaatagccggccatggtggcacgtgcctttagtcccaactacttgggaggccgaggcaggagaatcacttgaacctaggaggcagaggtggcagtggccaagatcgcaccactgcactccagcctgggcaacagagcaaaactctctcaaaaaaaaaaaaaaaaaaaaaaagtgaagtgacttagccaaaggcacagagttatgaagtggagccagaacccaacccagatcttccgagagactaccccactgcctcccctatgtatggtctcaccttgttgacctgagtgacaacagcatccacgacctcccctttaaatggccggaaaacaatggccttgtacttaactggataaaggacaaagcctcggcctggctggatcacaccagcaccaatattgtcaatggtggtgacagcaattacaaagccatacctgcaaggaggatgagaaacaggaagacactgtgtgtccaagagcctctaaagacatctgcaataaaagtcgctgagctcttgggggtagggtcggggagagcaaaaggacaagtagatagcacctctgctcccagagagcttaatgaccaaaagaagacagaacagagatcagtatgtgtaagaccaaatgctgttctggtaatttcacaataaatgtccaagaaggctggagtccttgaggcaacagatctcaatcttcgggatgcctgagaatcatcttcttaaaatgcagattctcaggtctgccccagacagtcttgattctgtagggaataaggaggctcaggaatctgcatgttcctgcaggtttttctgatgctggaggcccaagtactccactgccctgagctgggtcccagctcattaatatcagagaggcccctctgtgcaaagcccagagatggtcaaatcccaggctacttccttcctcccccaaactctcgatctgctttttctggtcattcattcagaagatatatagaggcccatggtgtgtggtccctgggcacaggggataagagaaaaccagcagaatgacagagggagagcagacacaggaacaatgattacactgtgagctccacaggggctgtcctcattctatcttgttcccattctaccttgttctgagcccaacacgggtcctggcacacaccaagggtttttaaaatgtttgaggagtcaatgaatgacccatctcagctgagagaaggaagtcttattgtccagcattgcagagggcgccctgggaacccaaagcaggaagcaactggctgcctgagagaggagaggggtccccagagtgggtggcaggacgagtaggagttggggaggggttgcaggtatagcgccccgtgtgcgcatcgaacgatctggcggtgcggtgagctcgacactcacttccctgtgcaggtcccctccacctcggtgaagagcttctgcttcaccgtgttgagcaagttggggccgaagtagcgcgggtgcagcaggatttcgtgctctagggagatctgcggagaaaagtgggatggcgaccaggccaggcgctggcaggttattggacgacaaggggagtctcgcgccggcgcctggccttgctcttcctttccacccagcccttgccgccaccctgagccctgctcacatggtagaacatcttcccagaccaggtaggcaggcagagtccacacctccgacagtccctgggaatccaccggaaacacttagacgccgcaaccccagttccgcgcttgctgcgactaggagggcggaacaccacctcctccgcgagggcggaactccaccagctccgcgggtctgattgggcctcgccgtcgtgggcgagaaccactaagccccgcccctcacccccgccccccagccatcaaacgacaacttttttttttgaggcggagtctccctctgttgcccaggctggagtgcagtggcgcgatctcggctcactgcaacctccgcctcccgggttcaagcgattctcctgcctcatcctcccgagtagctgggattaaaggcatgtgccaccacacctgactaattttgtatttttagtagagatggggtttctccatgttggtcaggctggtctcaaactcccaacctcaggtgatccacccacctcggcctcccaaagtgttgggattacaggagtgagccaccgcgcccggtcggcaactatctgaattgcttgaacctgggaggcggcccgagatcttgccactgaactccagcctgggcaacaagagcgaaactccatctcaacagatagatagatagatagatagatagatagatagatagatagatagatagataatagatagatagatagatagatagatagattgataaatgctaccacttactgctttcttcctagatgcctgggcaacaagagcgaaactccatctcaataaataaaataaataaataaataaatgctatcacttactactttcttcctagatgccagacactgtgctaagcgcttgatataattctctcccttaattctcataataatctacagaaattggtgtagaaataaaaaaaaaatgtttacgagccttagccaaaaggccaagaagctacagaaaataatgaaatttaggccgggcgctgtggtttacgcctgtaataccagcactttgagaggccgaggcgggcagatcatgaggtcaggagattgagaccatcctggctaacatggcgaaaccccgtctctactaaaaatacaaaaaattggccgggcgtggtggcaggcgtctgtagtcccagctactcaggaggctgaggcaggagaatcgcttgaacccgggaggcggagggtgcagtgagttgagatcgcgccactgcactccagcctggcgacaaagcaagacggagtctcaaaaaaaaaaaaaaatttaagagctattggaagcccaaaaaacactttaagcctcgagagagatatgactgcgagtcacatatagtttacaacttctgttctcagattatagattaactctttttttttttttttttttttttgagacggagtcttgctgtgtcgcccaggctgaagtgtaggaaatccatgactatttcatcctctgttaaaaaatgttacatgcgccgggcactggtggctcatgcctgtaatcccggctactcggctactggggaggctggggcaggacaattgcttgaacccgggaagctgagattgcaaagagccgagatcgctccactgcacttcagcctgggatgcagagcaagactccctctctctttttttttttttaatagagacggggtttctccatgttggtcaggctggtctcgaactcccgacctcaggtgatccgcccacctcggcctcccaaagtgctgggattacaggcgtgagccaccgcgcccggctgactccctctcaaaaaaaaaaaaaaaaaaaaaaaaaaaaaaaaaaaaagttacatgcaaatcacgagatcagaagttcaagaccagcctggccaaaatagtgaaaacccatctctactaaaaatacaaaaaattagccgtgtgtggtggcaggtgcctgtaatcccagctactccagaggctgaggcagaagaatgtcttgaacccgggaggcggaggttgcagttaggcaagatcttgacactgcactccagcccaggcaacagtgcgaaactccaaataaaaaaaaattggaaaaaaaaagttacatgtatacttcccaaaaagaaacattgtctatagcc

SEQ ID NO: 915355 - DNA, 4001 bp, Homo sapiens
aaggcctggagcccacatccaacctgcctctcactgcctgctggcctcaccccccccgccaccggcaaggcgaacagattcacccggctcagaagctgagatctagcagtatgatcctggctggagtaacctggaaatgcccagaaccctgggtggagcgtgaggagcctcctctcccacctactctggctgtacgtgtgtgtgtataacgtatgtaagaaatgtaaatgaaatgaaaacgaagtaattgcggggagcttagaaaaccaagaccaccaaggtgctgatgtgcagccacctcatccagcactggccacggcagggtagctctccaggggcctgcccttagctggttcacccccaccccagccagagcaagccctgctctgccgctgtggggtctttcctcacctctgcttccttccatcagagagagactgcttctccacggagccacctctcccacttcccaagccaattagaagctttcatttccctgggacctagctccagtcaccctcaagacctccagaaaactcccacaccgatggctccaatgtgcagagacacagaagcttgggaaaggggaggccacatgggaggcccctgccgttcctatccggggaaagggtctggacaggccgccagccactcagtctagcagcccactcgctttcctcgtttgtccagcaagctgcaccaagtgccgatggcaggctggcgcacacaagcccagggcttcacatgtgacgaagactcagtgggcgagggtcagactccagcgggggcaccaagactcaggcaccgtggtgacagcagcaccaagggacaagcacaggagaaagacgcctcccctacaaagcctgatgagggtggtcagcaagtctaccctgcatttctttttctgtgtgtgtgtgtgcgtgagacggagtttcactctctcttccaggctggagtgcagtggcgtgatcttggctcactgcaacctccacctgcctcccagactcaagcgattttctcgtctcagcctcccaagtagctgggaccacaggtgtgcaccgccatgtccggcgaattaaaaagatagagccaggcgcggtggctcacgcctgtaacctcagcactttgggaggtcgaggcgggtggatcacctgaggtcaggagttccagaccagcctggccaacatggcgaaatcccatctctactgaaaatacaaaaattagccgggcgtggtggcacacgcctgtagtcccagctactcgggaggctgagacaggagaattgctggagcccaggaggcgggggttgcagtgagccgagatcgcgccactgcactccaacctgggcgacggagcgagactccgtctcaaaaaagaaaaataaaataaaataaatttctggagatcagggtctccccaggttgtccaggctggtctcgacctcctgggctcaagcaagcctctcgcctcggcctcccaaactgctgggattacagatgtcagccgccgcgcccgcccgtcctgcagcgaggtttgcaggacatggggtgggcctgggggcagagatgggaatagggcggaggccaagggctttactgcgggtgacaagacgcctgcgacccgccaggccacctagaatccccaggacaccactggtttgaagcccaactccgttctcttccccagacttcaggggataaggttctcccgaaagcagatcacagagcggggctggagaagccgggcctgaagctgctcatggggcgctggcctcaggcagcgctgcgcctcccgccccggcgcgcaccccagggcggactcagcccccagccccggcccgcgccccacggcggactcagcccctagccccggcccgcgcctcacccctcggtgtactcggcctgcagcagccccaggtaagcctcccacttgttgccgacgatcttgccacaagtgaagcagcgtacagggatgatcatggcggcggcgcgtcccagactgcccggcccggcccggccgcacgcgaagaacccccccaggccccgccccgggcgcgtccactgttgcgggagaatcggctccgctcgttctccgctgttccggccgtccctccaccggccccgccaccgctggccgcagtttccgccgcgataggggcttcccgtgcgtcccggggctcctgggcctgtgcgtcccggggctcccgggcccgcgcggccgcggcagcagcagaccgcacacccccgcccaccgtcttggtgcatcccggcgctacggcgtctgagcagggccgtaaagctgcggcggcggttcgcgtttctcgtgtccgcttgactgacagctgcgcggcgggagcgggcggcgcgagcgggaggcggcggcgcaggtactgcgcctgggggttgtgggggcgtgcggccagggtcccgtggccggaggtgtccgaccgggagcggctggagccggacgcgagcggggcgcgcgagttcgagcccagagccgacacgcagcaacaagtggggtccggcgcgggggctcggggagagggcgggcgggggccggggcgggtcttcctgccgcccctcctggccgcgccgagtagtgggttcctccgcctcggcctctgcccgcggggtgtccggggctctcggcgctgagttcgggggtcccattctggacgcggcccagcccctaggggcgccgccctggcctcagctgcgcaattacagcccccgccggcagctccccgccccgggctcctgtccgcgttctttccgctctttcccgggaatggggtcggggtgcgccctcccgggtcccggctctgctggctgctcgccgtcccgagctcccgacgctcagacgcgcctctgagcacggggagaggggacccgggagggaggtcggggagggagtcgtggaagaggtgctttttgagctgaacctggaagaccccggcacaggggatccctgggcagactcccggaggctgcactggcaggaccccctgaaggcctcagctctggcttgccctggagctcagggcctacggacgacgagggacgaggagcccgtgtctctcggatggagtgcgggggggctggcaccagcacccttcttgctgtgcccctggggtgggggtgaggaaatggggggtcggtgtgcagtgagaggcaaagaaggctccttggaggtgcgaggtgggctgtgggggtgggtgggccgcaaagcggcacccatggggggctctgggctggtttgccggcctggggcttctggctggggtgggacctgtgttgggttccaggcatcagctgccgctttctcagggcaatgctgcgtctgccttagttgcagaggaggaggacgaagggttttctgggtccggagtggtgctagccagatccactgcacgcttggggtttccgctcccaccctggccagggccctgggcagcttccccagtggcatttgccataccccacccagccacgtgcggagccacgagccgaggccacttcccttccctgaccccctccccccaggatgagtggacgcacatcctgctctgggcagaagggcaggacaggggccctgagtaacggtggcctggggtcagagccaggttcagctgcgaggctgctggtggctgtggaggtgaggggggcaggggggtcccggatgttagcagggtgggccctggggagtgggtgggggcctggaggcttcttggaggagggtccagggcctgtcccgcccctgttcctgcctgcaggagttgtttactcagagcaaggggtggtggggagtgagctgctctccaaatcctggcttgggccaagctgacattcttggaattccgagtgtgtgcgcttcctatccctccatttcccagcagagcccctgagatctggagactgccccagcctcaggctctgtgcatctcccccgagcccccaccacatatgtgcggaggcccctgggggcccaggcctgtcctc

SEQ ID NO: 915356 - DNA, 4001 bp, Homo sapiens
aaatgaaaaaatgtactacagaaccaagaggggagaatatggcagatggtgaatgcagggaagcaactcatatctcagaggctgatgcagacagagcaatgaacatgacttcggtggcacctcacttactaaggatagatcctcagtgtggatatgatttttacccccacttaacatacaaaaaacctaaggattgagaaaaaggaaagtggcttgctcatagaaggtaggagctgaggcaaaactccttccaggggctcacacaaaaatcaaatgattcagccctgagtgaaagggcacacagatgcttaggggcccccagtaaaaagatgaatgcccacctgctctcatccacacagcactcacaacagggtcagctgccattgtcccagaaaggataggctgccgctgctccatcgcctgttgggaagagtggcgtgccaacaattcttgaatattcctagttatcttggaaggagtccataactctcaaacccaaattaaagctcatttctctttatttttttaaaaaattgaccttttgatatcaaacaatggtgggtcttcacaacctgagaaattttgaaatcactcttctgtgttactggttaatcagcttaattccagagaaatttacataagacataaagcaaacaataaattggtgatgacagtgtcacattttaatcaatgaagttatattttccgaactttagtggatccaatcaagtatctttccataaaataaaaacattccctaatatatcttcttctgtaaatctagattctcttatattaagcttgcttgaggcacagcatactaaaattaattaaaacgaattttaaggaaccaagaatctttaagagaaagacagagcaatttttggtcattcttcttgcttgaggaagtatagaactagccccaataaggttcaactctcagaagctgatgagttgacgctgtttacctcgtgaaaagaatgttgtaaataatctgtattatttcagttattagtaaggtaagtcgctgtttggtccacataaaggaaaataaagttcacaattgtttcatccaactccggggataaaaatcaaggccaaagataaacccactgcatcctttgcagtgggatggacaagccttgtcacagaaggggaaaaagaatgacgaaaggcaagacagtggagcaagtgaggacacgcttcaccgagccagatctccactcctcccagggtatccacagggacaagtcacacctggcagaaagctaagtcactcagctagaaacaggcccagggaattcaacagaaggctgaagagccactgcttatggaaataaagcccctcctgtaaagaactgcatggcttttccctcccaaccccaaacccatcccacatctggcttttgttgtgtgaatcataaactgccctttcttcaccacagtgattcatgcacagaagcggaggtaccctgagccgtcccaccttggaacactagttcgttcccctccagcctggaaaatcagcatcacctctgacaggctggtttctccaccaggctccatcccgcccacctcccccctccctgctccggggcttggaacccagaccccctccccccgtggccccatcacctccaccaccagctccccaattccagaccaagctgtgatcgccctgccccgctggcactcgcttgggtctgacagccacagccaaaccacttacgtttttgccagagcatggcctgtgacaggatgttgccttttctctttgaagccgacagtttggcttctttaatgtgagaccggggtgtgttttcctccagtggagccaccgcttgagctgaggctgtttcctgggctttttaaaggcctgggttcccgctgcgtgggccgcgtcatcacatcctcccacctcaggcaccggtgcaacgtttctgcagccaggccgcctgtcaccccactgtgcgcgccccagcggccccggcccagagcgctccacactcggagctagccagctgggacagagcaacagcgcagcgcgggcagccacagcctgcaccggccccgcggggacctgctgtgtgtgggtgtgaaggtggtgtggggcaagctgtgggaaccccgtgtcaagccctccccaggccagtgatgagcccaaaagctcctctggaaaacgttgatctttgcacggcgcccatgcaggcttccaggccaccagggcatgggcaggactcagcccgccatgggcgcctgctcagcgggaaatgcgattcccaggggtcactggttctcaactgggaggaaacacctgtcatctcttcaagcctcagtaaacaacctcctcattctttcaatattgcttttctgtttattccattttgaaacacagtagcccctcccctcgcccccagccacccccaaaatggcaaggcttaatcatgctgaaatatgggggcgctggctctgatgtcggctatgcccacggaaaaagaggccaaccctcaaggaaggaaggagaacatgcccgtgctctttgactggatctgggcttgtaggcacaagatgaacagagcctctttgcgagtgcccacccactgataacaggaagcttctttaagtaagtcatgggctcaccatctggaagtgtagatggtgttggctaccggttccttcacagtttggaagccttctgccactgcatatctgaggtccacatgctcaggctccagggactcagtcagtttggggtcaagaccccttggcacaccccctagagcaggtgtggggccttgctgctctgccatccatactgcctcagagccatcttgcaccacctagacctgatcatgctatcccctagcctacaaagcattcaccttctcccttcagccacagagctggaggcctagaaggcctcccacaatcgagccgttgccttcctttccagcctcaccaccaactgccctcctaccactggtcccagtgccctctaagcaccaccaaacacccatgcaattccctgcctttgaccttgccgtcctctcttgccggaaggacaaacccccagcccagagaatacttgttcgtcttctcagatcttagagcactttgttcattatgtgatggtgaattgtcacatgactctgacagtttctcaaggaggtttcatctttgcctctccagtgccccacacaagacctggagcatagtgacccccaataaaaattcatctgataaagttatgaattactgtctctaatcggttgctgatttgagggcaggtcttgaggagaaatgctgtcaacattttataaatgattcacttaaaagccagagaaggctgtctcctggctgcctataagccctccccgcaaagcctctgaagttcaggacagtggaggcccccatgctgtggtggctggcagcccacaccctggcctggcagggggcagcatctcaaggccttgggctgcgccaaggagtttccatgagaaacagaggcacatccctcaggcctgcctcagtcacaggagacgtgggttcccatgaaggctctgacactcactcactgtgtccccttcaacaagtcacataactcttctagcctcagtttcctcatctataaaatgaagaaccagttctgtgagtgtctcacaggttcgtaggaggatatgtggcctcgctggtcctctctcccacgggtctgtcttttgtctcttttggtcatgtcttattctctccaagtccgtgaaattcagaactttttcttattcatctcagtttctccccacaggcctagcatgatgatttccacaaagtaataatataaccacttactgtgcaagaggctccatgttaagccttaaatacattacctaatctagtcaccacaacaacgctgcaaggaaacgtctacctgtattgttcagagaaacaaacaaatgcttagggaatttcatctgtccaatgtcaccaagctatcaggttataggctg

SEQ ID NO: 915357 - DNA, 4001 bp, Homo sapiens
atggtctcgatctcctgacctcgtgatccacccgcctcagcctcccaaagtgctgggatgacatgtgtgagccaccacgcccagcctaagttccatgttcttaacagccttcgtggcaggttctgagggccttttcttagcttaccccctggttggtaactgatcaattgcttcattctagtgccagcaccccagcacctagaacagggctgggcacacaacaggtatcagaaagtgttctgtgggtgctacagtggccccagaggaacaggaagcacttaattgcttcttcaggtccacatacaccaccctccccagtcacatggacctcccttccccacgctcccgaaaagaagggaggagagaaacttcttcttgcttctttttctttttcttttttgagatggagtttctaccttgttgcccaggctggagtgcaatggcatcatctcggctcacggcaatctccgcctcccaggttcaagcgattctcctgcctcagcctcccgagtagctgggattacaggcatgcgccaccatgcccggctaattttgtatttttagtagagacggggtttctccatgttggtcaggctggtctcaaactcctgacctcaggtgatctgcctgcctcggcctcccaaagagctgggattacaggtgtgagccaccgtcccctgcactttttcttgtttcttctgggtgaggaaagagaccagcaagggcttattggaggcccaagggggtccctctcaggacactctcagcctctgttccttccttccctcctattcaacactcccccaactcccatccccttctggccttttcttctcctccccaacttcaggtttggccccttccctgaagtccatttcttacctacaactgcactcacctaccaccattctggaaaaatgcctgcacacagcttatatacccctgtgtgcttgtgatttccatatctctatttgcatattatttgcatggccatgtgcaccgagggtctcattctccgaccaccttatctggggcccgttgccctttttcatgtgcaaagtcacatttcttctctgggctttagttttccaaaagtcagagaggcccatatttgataatttcaaagggccttctgtctccagcagcctaggattctggggttctggggggaatggggatatggagttcttgtggggattggggtggaagctgaggcacagataggaccttggaggttcacagctggaggcacagctttgggttccaaacttggagtgtggaggtaggaggatgaacggggcagaaggggctgggtggggagaggatagcagatactccctcacattcattcatttactcattcactcaatgaatatagattgagtgcttcctacgtgccaagaactgtgctccatgctgaacatacaccatctgattttagtcagtgccactttagatggaaggtacaattattagccctgcgttacagatgagaaaactgaggttcagagaagtaaacgcagctagtagactacagagttggtatttagacccagggctgccaaccccaaagccaggattttagtcctgccctccagtttctgaatctgagcttccccttctcttatcagataacgaggtagaaagaacctagatatcattgaacccttcatttgagggacctgaggcccacaaggagggggacttaccccagaaaacagaacaaacatatggctcagcagagacgtttctactcttccctgcttctccctcatgtgccctgaggcttagaaggctggggtgccctctaagtcccacctgtgtatagggttgagggggaatggtgagcaatctttattccttctctctcagacttgctcactgatcatttcagttagatgagctagaatgggaacgtagagaactcctttaccccttcctcctttagcagttcttggagactccatgaaaccggttttttgagctctgggctggagtgagatagagaggaaaatgtcaacccccctgagcctgatactccctgtccctgtttagcttaggagaggaaaagctgtggggaagagagagagataggggtttgcctggaggttagaaaggaacagaagaaagaaagggaaaaagaagccaggacaggaaatttctgtgcctttggacatcaaaagaactatatgtaaatgaaatgcaaattaaatgcaaatcatccctccctccctcccttaccccacctctctcaacagctggaggacttttttcagagtagcagaagccttactccaggatgctgtggttttgaaactgtcatcaattctgacccctccccaggtcctccggggtctcctggagtgacatctaacccccttggctgcacctctagggagtcactagtgccccaggcttcatttctatttgaacatatcatcaacttcttttgtttcaaggacagaaagctctaagagtcaagcctcctttccagacacagtgggtggaaatggtgcacagccctggagagggtactgcgtggagtgggcccaagccccatccccacctcagcagggaaaagggaccttcttggctgtagaccctgggctcactcccatttcctgtcctgtcagctggattgagttgtcagggctaggagaagggcggagagtgaggcatcctggaaggccaccaaggaacaagtcccttctagccctttccttctgccagatgggccatggggcccagagcgtgggggtacaggagagggtcagctccttgcctcagggtgatcaaagagaatggatccaaactcagattcccaataaaagcagatgggagcaagggagaggctaggaaggacttccaggcctgttttaaatcatatgtcaaggtacatctgagggcatcattgccgggaggcttttggtggaggtggggttcgtgtcagggtgacacagtgaaaggtgtcttgggaaccaggataaggtaactgtgactggcgaggggatgggtagaggacaccagagtcaggatacagagctattctctgctctgatgtctctaatgctgaataccccctgcccttgcccaagagacatctccccatacccagccttcacccatgtcggggggcagtacacacacattcattgtccattttgcacttaaaagttcagaatcattgataatagcaacatatatttaatttaaagacaacataacagcaactctgcttccaatcaatttttttgactttgaggccggcattggacctgagctggatctttctaactgcaccttcgacagagcccagcctcagcctctgcctcagccagccctttcctggctgcctggacccacctcaccccaggtaaccttcccaatccacttacacgctcagggcaagtctaggccctgcgcgccctctcgtggtcacaggggcgtgtgaccctgacttttgcacctctacctgcaagaccctggagagatcttttcacaggagtgcccatccatggctgggggatgcacaggggagggccccaggtctaggcaagatggggatgttgaattttagtttcagactaccattgggtcttccagtccctgctccccatcaaagaccagacctcagcccagaaccctagttggagtcagccagcttggttgtttctgctcagtcaacgcagtgacaggtgctcctggcccgttgggctatccgtcctgttgctggacatctctgccagtcaaaatgtcctacctcctgtacttccctttgcagctgcaaagggcactgatccccgtgggatcagcgtatagacaaggactgagtgtgaaggcgcgaaagcaggagccacgagggtggtgatattcacatgggaaggacctggaatctgccctgacttcggtgaaaatagttcagccatttcagtaacagatgacttgtgacacatatcctagctgattgctgcatagccttgagtagcgattccaaggttgga

SEQ ID NO: 915358 - DNA, 4001 bp, Homo sapiens
tcagacactacagaggggccaagacccagaaactgcacagggaggccaggtagccctgaggggggaatgggctggggagggagcaggcaaatggagagagatgaattgggcaatctacccccaggtacatggagatcccgccctgaggaatcaccccacctggggtttagctcagtctccccccatgtgtcgggaatacctgctcacagggacagggtggagaaggtgtctgggcttctgagaagcatcagccaggagctcactcctggggaaggcatagaggccaagccctatgcctcaacctcatcctctggtgttctctgctctctgctatatcctctgaggccccaggctgcctccctgctgggtcccaactgtcccaccccctcccacttccacagaatgggagcctccagtagacaaggaggtggaaaacccccaggaagtctgtgatcttggtgctaaaaaacttcccatccactgctaagcccacctttctgaagagacttgctcccattcaaaccctggccttctctgcgggcagtgaaggggagagcacctacccggggatctgccccaggtatgcccagtctagaaacagactttcctcagactctggatgacacccagttggatggcttcttccgcctcacctagcctttctggcacgtcctggagagccactcagtgccaacatctcactgccagtctgcctctcactcagccctgccaggaaacagcatctggggaactgggcactccaggtcccctccctccgggcactcactgacgcttgttttcaggctgggtaggcctcaggcctgctctgcttcttggggtgggtctggagcattgcctcctccctactctcccagaaaggagaccaggtaacaacattcccatcaacagccccgaaatcctaaagaaagatcactgggtcctgcccactttgagagtaagttgctaggttagaaatggccaggtcaggtaccgctttcttcacttgttctttgctcaggccctgtgacctccagaaggcccaccctaacaggaagccccaagccaagcccaacctggctgcctggcagctcctgccttagcccagctgtggaaggaggaacagcaaggtgaatggaggggctgggttccctccatgcccacctctcattcattcattcagggaagcctgactcccggcaaagcatttgcatctcctaggtttccaccccttagggaaggaaggcatgggacatggaacccagaggatgtgtctgtcaccatcccttctcaaacacatgggggcatggcccctgccccaggggcacctctgtaattgccccacctcagccacttctcctaagccccccaaccacctaaatgtccgctttgcctccatttcacacatatgcccggacaccagcacacagcatgtggacatacacatttccctcacttatgcactcccaggtccacacccctggctgagtgagtgaaccacccatccctgcaacctcctgagactatgacagttcagtacacccacgtcccatacaactgccactccccagaccgggggcttcgaagccctcccgcccttcaccagcccccaccctcattcttttccagggtttcttatcccagatcccctccctttagtccccaaatactgaccggcacccaccccaggacaacccgctatccacaccgccctctcctggccgctgggaaacaagcccccctccctaaccagaacgttgtccctctccttcacccctgcccacgcgcagtgacacctgtcagagctcattccctccgcccctcacctgtgtgcatggactccagattcaccatcctgccccaggcggggccaaagccagcgcccccccaggcccctcgcctctgccccagccggggcccctgcgaagccagggtctccttcctccagttcccggccgccgccgccgcgggagccgctgccggagccgtcgccgccactgtcgcgcgctccgctgctccggcccgggcaacactcggcgccgccaggattgccacactccccaggtgagcacgcggcgcggggcgggggccgccggccacgccccctggcaggagccccgcgcctggccccaggcccatgcaaagcagtgatttgcatacatggagctggggacctggggagggggccgggggtgctgccggggcgggtctcgatcccgcggaacacctgcctgctccaacccagcctggcagcacctcctcaccgcgcccggagtggcgccaactcctggtcctgctcgccctttttaggaagccctggcgggttctccagcctgagcccgagcttccttctggacagatcgcgaagtgtaagcgctgcaaggagttggagtgtttggagaagtcgcgggggtctgctggaaagaattcagttttggaatctcgcctcccaaccgcttaccagcagtgtggctgggacaaggttcttcacctccctgagctcatttaactcacctgtaaaacaggacaggtgctaatcgggttccctattgggctgagcaggtgaccaagctcacctagcccccatggcatcctcacagcattgtgggatttagacggggtgcagtttattattagcagagtttccaggtgcacacaactgcttcctgcttgcccctccagtctcccgccccaggtcccaggttgctgtgaggctctacgagatgatggatgtggaagttaccagtgcccaggcttttggtgacagccaccttccagagcggggaagcggcttgctcaaaggtgcacacttccctagtgacagagcctggctggaatcaggtctctggactcccactccagtgctctttgcagcacccatcataggctcacccctttctcttcgtctcttcaagtcccagtaagtggtctgtcaccacaggatggcctgcatggaagcccagaaagctgtgtgcagacaggagggcagggcctcgctttccttcccagacaggactcctcatgaacatgtcttctccttagtcccatgggctactttctgagcacagaacaggttttgggctttcctgcctctacaccttgtttacagtgtcctttccccctggcacgcccatcccaccgtgcactccagtcatgcccacgataacacccagcatttcgtgtgccttcactgtgtatcaagcactggggtgaccaacacttgaaaggcatctttcgtgcctttagttcttgtttagtcctcaaaacctgtacattgtactatgattattgccattttatagatggggaaaatgaggcttagagagtttaagttccgtgttcttttttttttttttttttttttttttttagacagagtcttgctctgttgccaggctggagtgcagtggtgcaatctcggctcactgcaacctccacctcctgggttcaagcgattctcctcagcctcctgagtggctgagactataagcacgtgccactacacccagctaatttttgtgtttttaggagagacagggtttcaccacgttgccaggatggtctcgatctcctgacctcgtgatccacccgcctcagcctcccaaagtgctgggatgacatgtgtgagccaccacgcccagcctaagttccatgttcttaacagccttcgtggcaggttctgagggccttttcttagcttaccccctggttggtaactgatcaattgcttcattctagtgccagcaccccagcacctagaacagggctgggcacacaacaggtatcagaaagtgttctgtgggtgctacagtggccccagaggaacaggaagcacttaattgcttcttcaggtccacatacaccaccctccccagtcacatggacctcccttccccacgctcccgaaaagaagggaggagagaaacttcttcttgcttctttttctttttcttttttgagatggagtttctaccttgttgcccaggctggagtgcaatggcatc

SEQ ID NO: 915359 - DNA, 4001 bp, Homo sapiens
tggagaacttcctgaacctaggcagttcccaaagataggaatgaaaataatgaggtattttcacatgactttagagtacaacgatttgttctccctaagaagtttaatccctaggaactttgtatttgacttacaaacaccagaaactatcatttcacaaatcgttacggaaaatactcatctgaaacattaacaaaagatgacactaataaaaaaacatttagtggagaaaaatctatagtttcaggttaaaagcactcatacctgtggaagtgccgtgttgagctgtctctgcaaggaatctctttcatgaccaacctcgtgtaacttcccctgggttaaggccagcgtttcttgagtctctctcagtgtatcaagaaggcggtccctttcttctagcatggagaccatcaactgttcaaaatgtgaatctgcatctggctgtgaaggggagccggaaccatggcctccacctcctccaggggggccttctgcttcgctgatggtcggcatcacctcgcacatcatcttgaaatgaaagacccaggctacagtaattaagctcagaatacaggttcccacaaatatgcaactttacaggtatctgtagctaaaaagatgggcagtctcattatgctcagatctgttatgctttgtgtgtaaataagctgggaaaacatacacagggcaaatattaagtgcaaaaatacacaacatgaagacattaacacagacaaaaatccagggaaggggtcaagatcccaaaggactaccctcacaaaaaagggcaagccctggggtagtctgtttgcaaagctgtacttgtttttgctgaaaacaagtgtgcttctgttacctattttttttacttcccagtggggtggggagggtgggggggtagggggggagaaagtcaaaacacatgtcacccaatcatttttcaggaaaagcacagaaggagcatacaaccagcaaaactgacaagtacaaaatccatcaggcatcttgcaggaatgtgtgcagtcagctcccgggaagaactgacggctccctgaattcttgggctggatttggtgagcactaaaaggaaccggattcgttaaacgctggtagaagtgttttccaatggctgcaacggttggtcaacctaacttacgtaagtttacaaccgaaaaaaaaaatccacaatggaaatatagcaggtcgatacagccgggggcggctaggaaagagggaaaagtgaaaggtgagattacgagagtctattaagtgtctgggatataaagacagcgccagggaaaggggaagtcgcttctgagcctttcgggcagtactgggggcgcggtggacccctgagagggggatgccccagacggcgcacctgatggggatggtgacctccagcctgctcgagccgcactcctcccctcctgtatcaggtgcggcggaagccccgaaccccggggggtgaggaccgttgacaacggagcccgctcgggccagggctttcagcggccacaggtccccgcccctcgccccagcgcccgggtcacggggcgcggggctcggggaggggcagcgcgcagtccccggagccgtcccttggggcgcgggtgtcccgccggagctctcccagcgcgacccggcgccgcggcctcgcccccacccgtcccggagcgcacccttccccgcggagacatctaatcggctgcgtggccgccgcggagaccgggacgcgccggtgacgcctgggccccgagcctgcctcagtgtcccgctcccttaccttgctcgccggcgggagcgggcgaggaggctccgcggcggctcgcgggcggctgctcgctccgggagagcttgggagccgacgaaagcagcccgcggccggcgtccgcctgcccgccccacgccgcggccccggggcccgccgccccagtcactaaggccggcccgcggccggacactggcggagcggaggaggagcgggcccggctgcgcggcgccggcgtctacgtgcccgacgtcgagcgcgtcggcgcgagcgtcagcaccgccccgggggcggggcccgaggagcaccttggcccgagtacgcaagcgctgtctcctcaggagggggcgggaggcggccccggggcactgattggctgagcgagacgggagccacgccccccaggccccgcccgggtcgcgggggagggggcggtctccgggatgagccacaggtgggcgctcaggtgctcgccgggtcagcgtcttcctccgggcgtccccagtttccccccacggctgcagggacgccggaggcctttgctgagtgtctaccgcgcctcgagttctgagctggacgcgtccggcacgtcaggtccctcccgagctggaggctctggattcgcaccttgcagaagagcgaaccgaggcttcagtcaccaccgaggacccagaccccgcccgccgcggcgcccctacggtctccctgggcctgatctgggttcagaaggacggagttcccgccaggacccacttacggagcgctgcctgccgcacctggggacgtcccggcgcagcgtccagagtgcaggctttgccgctgtggctttcactctgcagcgtgggcccgggcgactcgggaaacccgcctgggcttcagcgcctccgatgtaggatgggaaaatgatgcagacctacctgcgaggctgctttaagacatgaatcagatgtgaagagcgactagttgagagcctgacgggcagcactgcgcgagtcttggtcatttcatcttttccgcaagtttttttttttttccagacgttgtttcactcttgtcacccaggctggagtgcaatggcgccatctcggctcactgcaacctctgcctcccgggttcaagtgattctcctgcctcaacctcccgtgtagctgggattacaggcgcacgccaccaagtccagataattttgtatttttagtagagacgggatttctacatgttggtcgagctggtctcgaactcctgacctcaggtggtctgcccgcctcagcctcccaaagtgttgggattacaggcgtgagccactgcgcccggcctcagcaagaatttttaaacatctactatgggccaagtcttgtgctagatgttgcagatacggagatgaatagagacacctctaattaattaaagcggatgccctccccactcctcccaggatttgactcggagcacaaactcttcacaaaccaaaatgtcaggacaccatcgccagtgtccactggccactgctgttggtgtgaggcagccaggagcccctcagaactagtaagtctgagaagaggctgcacggggcctaggagagggagaaatgagcccgtccaaggtgaattccttgattctccattgtgagtgcaccaagaacaagcactccctccgactgactctcgcctaccaggatctggaacaccttccattaatttattcgttcattcaataaatatttattgactgactacacatagatatgaatatgtactttttgcccctagtttcttgctattttaaaagtgtaaaaatggccaggtgaggccgggtgcggtggctcaagcctgtaatcccagcactttgggagacccaggtgggcagatcacttgaggtcaggagttcaaaaccagcctggccaacatggtgaaaccctatccctactaaaaatacaaaaattagccgggtgtggtggcgggcatctgtaatcccagctactcaggaggctgaggtggaagaatagcttgaacctgggaggtggaggttgcaatgaggagatcatgccactgcgctccaggctgggagacaaagcgaggctctgtctcagaaaaaaaaaaaaaaaaaaaacattggccaggtgcagtggctcacgtctgtaatcccagcacgctggggggccaacgtgggaggattgcttgagcctgggcaatatatcgagacccatgtctatacaaaaaattaaaaatta

SEQ ID NO: 915360 - DNA, 4001 bp, Homo sapiens
aatactttcatcatttgagatttttttccatcaggctattttctttcctgggtcttcaaaagaaagattcaattaaaaaaaaaaagcctcaattccttttgctagtcagatttttaggaaatattatgaacaagagaaatggcacacaacctaagtagaaaatcaaatggcgccaagaatgtggtaatttattaatcagcaatgaaaagataacaaacaaaagttcctgaatcattgaaacgggtttttatgaagacatatatataaaaacactgacttacatttgtataaagttcttcaaaggcactcaaacaaaactaacaaacaccagattaattctcatgacatttgtcatgagaccaaaggtaaaatgcaaagcctgtgttcaccagtatgctgtcaagaaacaatctgagtcttatgctgatcatgacaattaaaaaaaaaatgctagcgcttttggaggaaagattataagtagtcctctaattgaatccactcattttaaggaacaaacttttgttctttaagtaattgtgagtaccttttatgtgccaagtactatgccaggagttataaggcatacacacataaacttcagtcattgtttaattttcaagataacttaaaatgtaagaatgacttaaggaaaatttaagattagatatattaatacatttcatttaaaaacctaattcgcttctcaacaaattctgaagttttgatacaataaaaattcaacaccccttcctaaaaaattgtagctcattatttataatacagtaaaaatatttaggaattgaaaaaaagttaagtcaattctgatacttttactaagaaaatctattataggtgatagtaaagatgacaatacagcaaaaattttaaatgggaaaaatataatattaagcatacaaaatctgaggactaaattgcatatctcttgtgattacagatttggaaagtacatgtacacataacaaggacaaaaagaaaacaaggagaagacattatttgaatggtagggaacagttaaatatctttttccattttgatatctattaaattatactaaaaggttatttatataatatttttattttaaaaactatatacagtaggaagaggcagagcgagatgggaaaggggcatagaatcagctgagaattgactttctaaaactccagatggcacccacaggatgagggtgaggcccccagccgagcgctccctcactgcaccaggtctggagaaagtgctgtctgggaatctgtctaaccagctcagcaggttattcatctcagggcagcccttcccttccctaccccctctgccactctcaacgttcaggttggtttcacctgctgtataaacaccgtacaactgagcagccaatcccgcccccaggcaggatgggaaagcagacagcgagggctgtagcctgggcacacaaaggggcttcagcacatgagctgcttcggcacccaagggccttcagtgcacccgcccttacctgttgaagcatctcttcagcagcattgagtttcacctggtgtccttccagacacacttccaggtctcgaatcttttctccctgggcttctacttggtctgtgaggacactcacctgttccaggaaataaagcaatggtggaggaccagggatttgacatggtgcaggaaagcctccccacctcaggggagccgttaaatctcaccactgactcttacacacagtgaacgattttgatttttgctgagtggcaggtggaggaagtgtcctgaacgaaggcagctgcagttagattcttaccttaccagggagtctcggccactgctctgatgacatgggtcacgtttactgctcttgatagactcaagagtaaaacacccaacagccacaggagctgcctctgggctggactcctgctccttattcctcttccagaacagccccgacctcaaggcacatctcagctggcttgccagcacttctgcaacctcgtgtggaagagcggtccaaacttcatggaaactaaccaatgaccttacctctctcataagggtgtgaggactgctcacctatcaggtgagtgttttgatgcaattaaggaatgtgggctgtaaagggcatgtattagcactgacaaaacttggctccagaaaggttattgtgcttcacaggccaaaacatgactctaagtcataaatatagagaagccacattacacatacggtggcagaaaaaaagtcatctttctgaagaacgctgagaatccctattaaaaatattaattagtaaaaactcatttacaggaagtcattcaaattatgcactaactatatattaacaatggttttcatagccttctctattagcaaacggccccaggatcctttttctttattaagagatggttcaaagcaagaagagagagaatgagtgtcctccccaaagtgaagaaattagcagttgataaactgagatcctttagacctttttggttagagttgttgccatttacatatagattatccagaattatttctcagtctgaaatggaataatagatggtgcatgagttgatgtgaattcatttatgagtgtttagataaactttctgaattataaagcgcctgtttaaaaaggaactaatctaaattaatatgcctactttaagatctccatttttattttcccaaatgattaatgaattattgaaacatattcctggagttgacacatggttaacattccacttttaaccaaaaaaaatgttaaaaaaaaaaaaaaaaacaagaacgggctctttctatcaacttggtccaccttacacgcaaacctttgtgggtgggtgtttattaatccctgtggcccaacactctcagccatcctgaactaactctactttcaaaagggcaggactctgggggtgggctttgctcactggaatccagagtttctgtttgtgaaggatgttttctggttaatcttattatgagggttaaacatttctatggtctataccatgccttgaggccatgtgttggtgatactcaaggaatcataggatctctagcattctatagctaattgttcagctccaggggctttctgaacctcaacgctgattctaagtattacaaatgaagggatgtaggaaatccagacaaaatacataaaggtcataaaatgtgacctttgttcactaaaaacaactatttttgagaccctaatagatgctaggcataattttaggtactggaggatacagaagttaaaaaaaaaaaaaaaggataaaaatccttttcctaaggagttacattataatgaagatacaagagattctggttttgtttttaactaatcctagaaacaaagtattttgttatgtgtgatttgccttgttctatgagtagaaccaggaaaactttctgggccaaggactctaaattaattcagtctggctaagctgctgtgtgcattaagcaagaggctctaccctgctgagaatctgcctaaccagctccactgcagaacagcagtgatcacttaacagacactcctggagtctgcccataagctcccagtagagtagaaactactagggtcaacttctgactttactggcaagcagcttcccaattgtgttaggattatttaaatggggattattcaagaatttggaattttagaaaactatgaatgtgaaagggagcattattacacaggactttgaaaaattaaattgtaatcctctgtaaataggaatgtgctatttcaatcatgaagggtcctggttcaaaagtttgcaatttcatactgtttgctgcaaaatcttacattggatactctttcattaatcatgtcattgggataagagtttcaaattacacatccctcaaacatctgtgctacaatgtgctattcaatctggcccttgctacctttctaaaggcagctcgcaccacccttttgagcacagactgcaggcacaatg

SEQ ID NO: 915361 - DNA, 4001 bp, Homo sapiens
gcaaaggggaaaaggaacaagtgcacaggtcaaggtccacaagaaaatgtcttcagactactgagatctcagggaaaaaaaaaaatcccccaagagacttcattcttttattcaacaaatatgtttttaaatacctaccagatgccagtgcctagatacatgacaattactaataaaacaaagccactattgagtacttgaacaccttaaggtgatgctcagcctgggcacagtggctcatgcctagcactttgggaggctgaggtgggtggatcatttgagccccaggagtttgagatcagcctagacaacatagtggaaccctgcctctacaaaaaatacatacgcaaaaaaaaaattagcacccgtggtggcatgggcctcaagtagttccagctacttgagaggctgaggtgggaggattgattgaacctgggaggttgaggctgcagtgagctgtgatcatgccacagtgctccagcctaggcgacagtgagaccctgtcttaaaaaaaaaaaaaaaaaaggccgggcgcggtggctcacgcctgtaatcccagcactttgggaggccgaggcgggcggatcacgaggtcaggagattgagaccatcctgacgaacatggtgaaaccccgtctctactaaaaatacaaaaaattagccaggtgtggtggtgggcacctgtagtcccagctactggggaggctgaggcaggagaatggcgtgaacctgggaggcagagcttgcagttagccgagatcgtgccactgcactccagcctgggcgacacagtgagactctgtctcaaaaaaaaaaaaaaaaaaaaaaaaaaaaaaaaaaaaaaaaaattcatgcagttttgtcttctgatcagcattcaaaatactgctttgatgtgattttttaaagtttcataatgtatctcttttgaaagctaagagtctactctgcttccatcattgccaaaatccctattttaactaccaggttgtgattagtcataccaatggttccagctgatgaagacaatattttcactagttccaacagccattccaattggtcatgccagtgtttgaattagccacactaacattccaaacagacattcacaattggacacactaacattttaattagaaacctgaggttgcttaatttcatatagttcactaataacagaacatttacttattctcttctagcttatatctattagcatgtgcttctacctttcatgatcatcttccccttgcccctgtcatgattactgttttggtccctaaactcaaaatcagccttcaacaaacttatcccagtccagctctacttccccatctccagatccagcaaggcccgtagccactattatgaactgtgatctctaaaatgtgtgctttaataggagttaacttatcctacatcctcaattgctccttctacttccaacataaagtgaatcatgttttttcaacaatattacacattcttccccgtcatttcaattggagaccactcagcttccaccaacccaacttatagaacactgtgctccctattccagggctgcttccaagccagtattttgccccccgaccatctgcatctatcctgctattctaagacagtgctcttcacttataccacattctccccaaaccgaaggaaccaacctacttccttcaggcttttgacttgatcaacagcttttctacctactttaggcgcactccgtctcctcaatagcttccacatccttgttattaactttcccattcagtatccactctggcttcacattctttgacctcagctccaacaggctttgctttccatttcgttcagcttctcagtagcacagtcaccacttggatctcacgtgtatccagaatgtgtttgctttgcttctaaaatcttcagctctgaaattctctcctctggccacaatcttctgacctttcatctgtcccacttgctcactcaacctctaatttcttctgcggccactagttacttagtaactctattttcctggtttatcaacttccttgaagcaacattgttctccttatcaactctgtaccttgaggtgagtcattccaattgtattcataccacagcagaaaatcctcatgggatctcatccctgtaacaggcctcatgtgcatttgttagtcttttgtcgtgattccactctccacagcttaaaaattgctagtgaaaggcaattaatgatgccagttggtttctgtacaaatttgtgctatctaattacagctgatcttccaatactgcctggcaaaacttgtgtttgtctctggctgactcctttcaggaactgttccaagtcttttctgttctgctcaagccctaaacccctaccatgtctccctcttctcctcaaataatctctcctcgtatttgctgaaaagataaaatgcatctgttcactgaatgtaagttctatttcaaagtttcctagcatcatctctcattcatatatcttaaatccctgtcttagaaacagcaagcccatagttcctttccaaggataaactgcgacaattgtacattgccatcttttctgcagggttctttcacctttgaaaactgttccctagttcagaatacttccaggtgcacataaaaagtacccatcaaaggatacaatgcttccagaatttgctcctgaattgcccctgactgaccttcccatttctggctatttctcagtctcctgactcttcatacattcccatacaacttgataaaccttacggtaacttcctggtcaaccagcagcctttggctctgttctctgagttctggtcctgtttctccctccagctggtaactcagaatggctcctgctcacatggtcctggactctccctcacttctgtactgcctttgagtaagttcccaccaagctctgtgctactctaggttagggccatcaatcatctactctggcaggcatttaatctctccctcaccatcagctcccaatcctcaggctataaacatgatcaaatttctgacattctaaagaaacttccgtcttgaccttgccctcaaagctaacaccgtcaactcccatgtcctcttgctggacaaatgcatgggtgtgggggtgtgtgtgtgtggatgggtgggtgagtaggtgtgtgtgtggggtgtgtgtgtgtatggctgggtgagtaggtgtgtggagggtgtgtctgtgtgtatgggtgggtgagtaggtatgggggggtgtgtgtgcgtgtatgggtgggtgagtaggtgggtgtgtgtgggtgcatgtgtgtgtatgtgtgtgtcactcctcaacaagatttctgcctgcctgaacctggcttctgccttcaccaactagggcacagaaatagtcctggaaccaatgtacaaactttgagatgcagcttgcatttctcagatcttaactgtctcgccctttatccactcaatgtaaggtactcctagccaccccaatcttccttgctctcggttttcctgacctttcttttttcttctccattttctttgctggctgcctttattctgtcaatcctgtaaggaaaacattcttggagcccttaatctcattctcacccaagactggagtcaactctgatccaggctgtctggagcacccacatcctcgccaggcaatgcttgccccctgctgaaggcttcctgaccttcatggtggaatcctgctggagtcatgcagctaccgcagtatatggggagggagttgaggggaggcagcgagctgaggataaggggcaaaggcttcacaggcatcattctgcttctgctcccaattgtttgaaggttccctgtgcaaataaggagggaggtggtctgggggagggtggtttgttttacttactgtgatggaccatgaaactgggtaataaaggtttagaaaaaaaatcaatggacaaaactgccactaaccttttcagaaggacaaatacttcttctaagagatg

SEQ ID NO: 915362 - DNA, 4001 bp, Homo sapiens
agtcagtcccctgctgtgccttcagaccaagtccagacttctgtactggacagctgggactattttccagccttgtcaccagctttcctgactagcacttgacataagagccaagctggaccactggccacttctcatggtgagtccatgcctgcctgcccacacagttgtcacagcccaggccacactctacccttctctgcctcaaaaaccccaggagggatcctttgaggtccatcacatcaccctttcttaaaattatcccagatttccctgctcagatgaaagacaggaattcccataactttgttcctaccgccttcatgtcattgatctcattccacttactcttttaaagtcaaagcgcatctcccttagctacccagtaaagaaggcatcatggtaagcagcttatctctccagtagcaataagctaacaactgtcacatcaccaaatcttaaaatagtattactaataattgaaatatgttaaataaaacatggataaatgcaatcagtgaaaacctcatcaatcatccccatctcccacttcaaatttatttagctatgaatttaagcaaagtacaaatgggttgcctctcttaagccaaagagaaataatttctaaattagataacacttacagctttccatacacctataataatgaaagactgaatatgctgaagatgaattatgtcgaaaaccaactacttttctgtagttgaccatttaacttcacataatacactacaaatttgaaaacacttcagatttgtattacaatcaattaaggaggggttgagaaaggagagagacgaagagaaagacaggaagtagaccaaaatatagaaaagggacacggatctataccaaatatctggctgctctaaaagtaaaaatataattagattcgttttttaagaagattaaacactggcaagaatgcctgtcttaatcctatccaaacgctggaagttctgttctcttgttacataatcttattttcatccgaggaaaaactgcgggtctggaatctgatgtgatgaggtgaggagggagcccacttttaaataggaccgtccccatcctgcagtctactgggacgcggcggctttagattttaaaaagtgtgctgtatttttgcacttacactacagaactggctttagccgaggccctgcatctagacacacgctgtgtccaccagagaattgcctgggctgacagacctaaagcttccgcaacctccttaggctccctagtccacgccgctgctccccgggctgagcagggctgggacgcgccgcacagaactcagggaccccacctccctgcgcatctccagggccacgctggcacctgcaggagtgcggactgtccgcggatcccaggcagggttgggtggagattcgcagccaacccacaggagttctgccctcctcccaggcttctggccagtggagttggagaagggtccccgtcctcgagcctgggacacgctccggggctcacagagacactgacccacacgtccccgtggttcgtagctctgggggcgctccactccctaggtaatgctcccgacggggatcccaaccccgaccgcgcggcaagcccggggtgtggggagagcccactgacctgggtacggggccgaggctcctctccgggcggctcaggtgtgcgggccgctcccgtgtccctcccaccttcaaacatgagagcccagaagcgagcgacgggccactggcccaccgaccaactgccggaccaagcgcccgaccaaccagcggaccgaccgcagcggccggggccggcgcccacgtgacggggcggggacctgcggaaggctcttcccggagcgccgcgcccccaccccgggacctgccacagggaccacccccttgggcacccgctccctctcgggcaccgaagaagcctgctgggacccgtccaccagggttcctgttcccgggggaccggcctggtcagccccgccccttcgaacctgcctcgtccccaccccctgggccgcgcgtccgggccccagccccgcctctctcggcggaccgcgcccccttccgggagccccgccccgttcgccgcgcctcctcctccgcacagctccggttgcggggaggcccgggtgggtacccggcgctccggctcccagtctcctgggcttctccagtccttcagcgccgttctccggtcacagggaatgaaagcgaggaagaaggaaacggtgtcgagaattgcgaagagagaaagcatagaaaacccacattagaggcactcccagagcagaaacccttcggagcatcccgacttcctcggcccgcgtgcaatccaggcaaaattgaggttgtctctgagccgccctccctaagcaggtcggaaagcccccgaatcatcccaggtcccgccgcgctgcactcgcaacctggggtggaggtccctctagtggttggcaccaaacaaaagttctgtcttatgaagagccgaggtcaggaagcatttccctgtgcccagcgccaaggtctgggaccttaggtccaagaaaagcgttggcaatgtctgaccacaggaatgggttctcgaactggggaggactgaagctggagatctggtccagcccctacctccagcgtgtggcctgaacccgttttggttgtactgctatgttgtggccctgcccaggcctccaaggactggctgctgttaagctgtttaaaatccctgtaggcctcagatggcagcgacaccagggactcggcatagtccccagctctggcaggagtcaccacagccctagcctttagttctctacaggctggagtgtcgacaaactccacaggacacaactttttcaaaccaaatttaccctcgcggtctgaaatgaccagtaggcccaggagaattttacatgtgaacagaacctaacccaccctggcaaatatgagacgtgtggtcactgcgggaacctggccagcagcagaccaaagcacagccagcaggggaaggctggggcccgcaagagttgtgttacaacaggacacccttcagttctctttcacttccttaaaatagcagcagagcgacttttgtagacgcaggctgccacagttcacacaaggtcatggctgtttccgaatcccaccctttattgccctagcggagccactccccttacctccgcccccagaaactgctagcctgttcttaaattgatacagttacctttttaaatgttctaagtcaccggctctggagcttctttgcactttggaaccaacttgcgggaaggaactttaaaaatactgatatctcgatccatccccagaggttctgatttaatggtcttggggatatggccacggcatgaggactgttaaaactccgcaggtgattcttatgtgcaacaaagtttaagaaccactgatgtaggccatgtcgatgtcagtcttcacttaaatccaacaagaccccagagctaaaacgttcacctgaaagaaaccccattcccaggcctgcatactgacctgcgctggctcacaagaagcaaagtggtcccttaacaggggcttcctggagaaaatgtcttgacctaaaagagtgattcgagctgcagggatttaaggtaggtaccaaggtgagttgtttggggcagatgtgccctgcagagctgtcaatcaaatcatatcccaggtggaatctagacagcacatttcaggcaacctcccctctgtgcctccaaaggaactatggttgcaggactcactcctattgataaatctaccccactatcctctgtgaggcagcccacattccttctatctgtgaaataggtaggtaatagggcaggtaatatcacatttatttattcatacctgtctcattccacaaaggatttggcctctctgtaccattctgttagaactgtgggtaattacactgtatccatgggttgagtaattcccttctgccaaatatctact

SEQ ID NO: 915363 - DNA, 4001 bp, Homo sapiens
ttttctactgcgtatcatagcaggtctccactcaattcttagtttccttccctggtttttccacccatttttcccattcctttaccccactgttttataggattctcctttcttttcatccctaggacttactgtcacagtactgcatctcctactctcgcctcctttttgataagtttttacacatattacttcttcagaacctaaggtttctcttctgtagtcctttttcaaagaatatctaccaattcatctctagaatcccaaatatactctggagccctcatacctaagtatctttcctactccttttctctttacagtcactaattcccagaatcctgtttgaaactacaaatatcccctcaaaaccaaatgcctattcaattctctccactttccagcaattacttctcccatgttcacctcattctttctcctcggcccaagtatcccctaacctggcacaagccatttaacgatctaaaattccaaaacctatctcttctacatggctctccttcctttccagcaaactatttctcgaactcccaatgcttcactaattcaaagtcttaggccagtacgtcgcttccctcagatctactagcccagcaaaaactgattgcccaaatcttcctctaagcttcccagaccttacaactgcagcacttccattcaccaaaccgtatttatagtcatctctcaatctttagagcctatggtcactctgtaaattcttcagttctctccttcttctctctcccttatcctgtccagcttctcactctgtaaattcttcagtcctctccttcttctctctcccttatcctgtccagcttctcagcacattcctactacccttaacaatcttcgtggctatgttctccaccttaccttaggcctactccctaaactttctcattctcccttaagagacctaatctcacctctcattcgctgaatctgtctttacacctctgggaattctctagaatcgtctgcttcctagttctcctctttccttctccagccctgtctcgagtgttttctacccccctcagcttttctagtatctagttctcacagtgcagatattagaactctgataatatctactcctcccaaacctttccttagttgttggcccaattcccctcaacttttctctcagtcattccccacttccctccaccttccctggccgattctcctccacctttgtcaccgttctactcccttttctaagcctcctttattgtggaagtgattctcagatcccttatgttagtctctcagcttccccaacctttgcctcattcccctctcccttcaacaacgttatttttcctccaatttctattgacttggcgcctcccctagtaccccaatctgccttctactccatctaaatatctccaggccgccaacattttctcctatcagtagactcctttcccgtgcctctatgaacgcccagagataccattctccaacggctggggcctggcccatagggagaaggggtatgggtcacgtaccccattcgcatcttggctccgctctgactgcccccgctgccgggtagaggtgggcgagagggaaggcggccgaggtgcatgctcttttcgagggccgacatcgaggggaggctgcacgcacgtagtcaaacagtaggcgaagcttcgtcccacgttgagtgtggcccaaccggtcacgactcgctcccctaacgacgccctgtcgcctttggacagcacccagctacccgtagcaccgcctaccgcccaccggctccgtaaactccacccactcgcttcagcgcttccaccggaagtgcgcaacagcactcatacaaaggaagctgggtaacagagtatgagaactccgcagactcccggctgggaacccgacgactttcaccggaaggaggagcgctcttcagggcaatgcaccctgcgcaatggagtccacaaagggcgcatccctatgcgcttgcgcagctggaggcgccccccagccaaccccggagaggtattgtagcaaagcgtcctgggtattgtagtgtattggagggaaggcgtcttggcgccttctcttcgcaccgttttccggagactgttagaggaagagtcgctttttcctgcctcccaggctgcccagcggcgccggttgccggggaacgcaggcgccgtggggagggatggcgggaggatactgcttaggtgctggagacggagttgagctggtgaagaagagctcgggctcatcatgaaacaacgaaaaggccaagggtctgggggcagccgtgggcgcaaaaaaagaggtaacctgagcgatcaaagattgaggaaagcgtaataggagagcagggtgtaaggaattttagggagacccgcacccccgctggataaacaagaaaagggacgtaagaaggaagtagccagggaaccagaaggttaaaaggaagggcaattggccctccagagaatagaaaggaattaggggctggggtaggggccacagacaggcgattaatgagatgaaggttaccggtaggatgactgtagaggagaagaacaaacaatgatgggattggttttgataacgaagtgaaatgtatgtgtgtgtgtagctttcgaggtccacagggacaggaagaaacataaattggcaaagggattatatcatttgttgtgtgattgtgggcaagaatcacgttttatacattactgaatgaccaaggattagtacaaagcaggactcggtaaatgttagttgaatgaatgaagtatgaagggctgactatgagcaggagttgggaaaaataattgtagagtatagagccgggaagagtggggaatgacaggtgtgataggattggagtgggggtaagggcatgacgatctcctgaaggacctgagatcatgaaagagtgtgcagcagagagtcctcatcaggttagcagctcaaggagacacaagctcaccgagtaggggatgttagctgcagtgagaacagtcaacctaggaacccagggcagatcaggaaacttgacattgaatctctacaagactgcctcgaagggaaaaaggacagtgggtgaccctgcctttttgcattgtaggcagtttagcgagaaaagaagtattgggaacagtgataggacattaggccattgggttgaggactgaagctacaatctgggaattactcttatccaagctgtttaaagattactaaggcagttttgagatactgactttcctgccaggaaagataggaggatctgagactgaagcatactagtgctccctgtgtcaaaacagttaagcatgtttggttgataatcggaaagtcaaagtagaaataatataacatagcatagaacagaatacactttttgctataccatttccatatgtagaaatgtatacacaactgtgtataatttttatgttgaaactatccataaggattatggtgggtcttttctccactatagagggcagaggcggtgtttgcattagaagtccaaataattagtcctgatctgatacattccatatattttcttctttgaggcataaccactcctcaaagaaaagtcaaaggaaaaaaaaggtataaataatataggaatggtttcttaaatctcctttaagttttcccgaaaaggtactatgaatgaaagacaatcagggtcattaaaggaaaattttttagaaagtcatgattaattgctttgtttacactttaatgtctttatgaaacccaataaatactaaagccaataaatatatgaacccagcactgtgttaaaaatagtggcagaatctgaagattagatagtctgtgtcctcactgactgtgtgatcttggcaggaaagaaaagttacaatttaagacgttcttcattgaaatgctgagttgtatgatatagtctaaatcgtttgtgagtgaagggagttgttgctgttttatcgttagtgattttttta

SEQ ID NO: 915364 - DNA, 4001 bp, Homo sapiens
cgggcggatcacctgaggtcagaagttcgagaccagcctgaccaacatggagaaacctcgtctctactaaaatacaaaaaaatcagccaggcgtggtggcgcatgcctgtaatcccagctacttgggaggctgaggcaggagaatcgcttgaacccaggagacggaggttgtggtgagccgagatcacaccattgcactctagcctgggcaacaagagtgaaactccgtctcaaaaaagtaaagaaacagggtcttgctctgtcacccaggctggagtgcagtggcaagatcatagctcactgtaacttggagcttctgggtccaagggatcttcccgcctcggcctcctgccagaagtaattctaaagcacccgagtccactggaaactaagttccaatctggaccagcctcagggttggcactcctcgcatgcccccacccatgagccgggccaagtccaggtctggtttatctcagcttctggacagcagagcccatctgcaaacatcctaagtgcttagtagcaaatgtagggggagtgtcaccaggcagggccctgggggaaagcactagaatccgggcagcccttcagtcagcaaccattccccagaccccatgccaggaggggcagggcaggcacgagaacggacctgggccccgccttcgtggagcgcacagtctatcaagtgtctgtcagatatcaggccaatgtgaaggtcccactgaatggcaaagagtgcggttcaggacccgggcagccccagacgctcagaccactcacactcatcgtagaaaccatagatgcggttgatgctggcacactcgtggttcccacggagcaggaagaagttctcggggtacttgatcttataggccagcagcaggcagatggtctccaaggactgcttgcccctgtccacatagtcccccagaaagaggtagttgctctcgggagggaaaccgccatactcaaatagtcgcagaaggtcgtagtactggccgtgtatgtcacctgtgacccagggaaccgggtaagctagatgcaaggtctagacctgaacccagggccaggactgcgctcaagggaggagggctccaggaactctgtggggtccagtgccacttttaggaaggcaaggggacctgggccgggggctcaccgcagatcttgaggggtgcctccagctccagaagaatgggctggctcagaaaaatctcccgggatttcaggcacagaccgcggatctcgttctctgtcagctgtacattcttgccaggccgcgagccctgcactggggcgcaatggggtgtcaggaccctggaccctgacaggaggagggtgggcgacacgggtggccccatggatacctccgggggcgcctaggcctcctcggcccctccttgcccacaggcagctgttgctgctgagcctcccgggaccgcggcctcaagcctcccaggggaagcccccagctaccctcagcgcctcgggaggcgactgtcgtgcgcagggggctgccaccaaaaacctcacagcgcaggaccccttcctggaccgggcttcccgggtttctccctcgccccaagagcccaggcaacccgtgcgcccccagcccgggagagggggggagctgctccgcgcgtcggagctggccccggacctctcaggcgcgtccgcgggggggcagctgcggccacggaacctcgctgcccgtccccgcccagtctaagctggccccgggggcccgcccgcgcgccacttccgggccgggcagggggccagggcgcggcggacgcgggcctcccccgccccgaccaaccttccagcaggcgcccgatgatcgagtccaggttgagcttctcgctgtcggacatggcggcgccgccgctccagcccagcagctcctggcccgctcctgcctcccgccctccggcagcctccttccggcctggctctccttccgcccgccccagtccgcccccggcccgcggccccgcctccaggcctcccgggcccgccccgcccagtcccccgccctctagcgcccccgctggacgtgaggcgcggcggcccggggggcggggcctcggcggcgggctgggggcggggtctgtcgggggcgtgaccaagctggttacgccccagaggaggcgcccagccctgttcagaggatgtggggccggaaggactgtggaagttgtttttctctttcaaaagcccaacagactttcccaccccttccctgggtggaaggtgttgtgaacatgttaataaccggctgctaggcactgagggttaactgctccaagtgcaggaaaggaaactgaggctcaagagataaaaacagcctggacctcgcattcacggaggaccccccacttcttcgtgggtctctgtggcgcccaggcggctgaccacactcaaagacagctacggctgaattcccagcgcactttggtccttggggcatgctaaattaatattttcttataagtcccataattcgctttttttttttgagacagagttttgctctgtcccccaggctggagtgcagtggcgcgactttggctcactgcaacattcacttcccgggttcaagcgattctcctgcctcagcctctggagtagctgggattacaggcgtgcgccactgtgcccagctaatttttgtatttttagcagaggtggggtttcgccatgttggccaggtggccttgaactcctaacctcaagtgatccaccccccttgacctcccaaagtgctaggattacaggcgtgagccaacaagcctggccccataattagcttttgagtagcacagtaatattgcagggtgtgcacataaaaataattactttatgagcagacgtggctgggcacagtggctcacgcctgtaatcccaggactttgggaggcctaggcgggcggatcatttgaggtcaggagttcgagaccagcctggccaacatggtgaaaccccatctctctaaaaatacaaaaagttagctgggcatgatgggagcctcctgtaatcccagctacttgggaggctgaggcaggagaatcgcttgaacctgggaagtggagcccaggcgacagtgcgagactgtctcaaaaaaaaaaaaaaaaaaaagaagagcagacgataaatgaaccttaattcttgttggaaccctgagttggtgctttacatgccagtaacctcagaactggaagtgggcctgccgtggtggctcaggcctgtaattccagcactttgggaggctaaggcgggatggtctcttgcgtccagcctgggcaacacagcgaaaccctgtctcaacaaaaaatacaaaaattagctgggcatggtggtgcgcgcctgcagtcccagctactgtggaggctgacgcaggaggatctcttgagaccaggaggtggaggttgcagtgagcccagatcgtgccattacactccagcctgggtgacagagcaagaccctgtctcaagaaacaaacatgaagtccaggcgcagtggctcatgcctgcaatcccagcactttgggaggctgaggtggatggatcacctgaggtcaagagtttgaccaatgtggcaaaaaccctgtctctactaaaaatacaaaaattagccgggcatggtggtgcttgtctgtagtccctgctacttggggggctgaggcaggagaatcacttgaatccgggaggtggaggttgcagtgagctgagaccgcgccactgcactccagcctgggcaacagagcgagactctgtctcaaaagaaacaaacaaaagaactggaggtggcccggcccctgcgtctaacagtcctgggccctccacaccagcacaggaactcaagcctgcagtcactggggccatggggaaggtgggaggagcccacagctcaggggcactggggcaggcaggaagagcctcagagaggaaggggtgacaccccccacccttgggaggggcccccagcggttgccaaag

SEQ ID NO: 915365 - DNA, 4001 bp, Homo sapiens
gtaacagtcaaccagcagctcctagcagaggatgggggaggaaggataagtgagtcctcaggagtgggggcctggagctcgcctatacccacttccaagagactggggccaccctgaggcacaggagatgccacaacaacctcacagctaggcattggccccattctgttgaggcaggagctggggcttgagggcctggctccacagcctcactttcccggggcagtgcctcaggcaacccatcgccccccagccccctcaccttgaccctggcagcccgggcatcgtcactctccatgtccaggagctcatccacgtcaatctccagttctgggatctcctcttcctggggtgggggtgggggaggagggagagacataagcctgagttggagagagggtgtgagaggggctctgggttgaggcccctgcctacctcggaggaacccagccctctgcccagcagacagaacagcagctgctctggggaggaaaacagatcaggcccgtgccaaggcaaactgcccaaagcggggtgggggggggagcttcctgtccctgccagtgggcacggggggtgacagacaaggccagacagccagggttggggaccttgggctgggaacccagcagatgtgtctccccaacatccgggccccccatctcaccagagcaccggtgggtgcagctgtcccagcttatcatacccccctcccctcccccaaacacctgtcacagctccccgggagtgaggaggaagtgaaggctgaggggtcactgggaaggacccaggcctggcaaagaggaaacaaagagcccatgctttggtgagggaggggatgcccaccaccctgccacaccctccccaggaagcccctatcctgtttgtagtcagctgcattccagggctgggctagggtaggcaggcagcaccgggcaaacccactcctccaccctgccccccggggcctgagtcaccgtctgaacaaccagggagtcatgggggtggagaagcagagcccagaaagcgggctagcctgcacgcacgccaagatggagctccaggctagcccacagaacagcccagccgcagccgtcctaccagaccagcaccttgtaaccacagtctaacccagcgggcaccaggcggtgagacctcctgccgctgccagcccaggatagcccccttgcctcttgcccaaggctcaggctaccccttgaggcgtctggaggacactaggcttgacctggggagtggcatgatggggggcagggtccgaggcaacggagaaggcagaagtgacttaggtcaggcaagaaagagtatatattgggggcgggagtgcagaggggaggggagcgcgcggggaagcaaagcgccctttgactccagtgacaggcgagctcacagtggagctgccaggcggaccggcgcgagaccgattttggggtgtcggcgcggggtgggaacacacctggcagtcgtagaggcgcgtgagctgctccaggatccactcctctaggttgaggcgcttccgtagctccttgcggtcatacttgacggtgaccttcccttggcgcctcactgggccctcatcgtccgccccgcccgggccctctcctgcggccccgggggggctctgaaagtagacgcgtggtcctgggccgccactgcccggcccgggggccggggccgccaacgccgcgccccccgcggtgccgctgtccgccatggcggccgccggggccacgtgcgagcgtcgggcccctccctgcgccaccgcctccgggacgcccgccggctggctcgggttagctcgccggctccgctccgcgcggctccgcggcgagggcggcggcgggggcgcccgggggcagctgcagcatgcggagcccccgggcttggcctggccgcgccccgccccctccccgccgatccgcccgccctttgtcccccgcggccgccgcccgagctgcagccgccgaagcgctttctctgtctcgctcttcctccgccccccgaccacacccccttaaagggccagcccctctacaggcccctctcccctactccgcccccgggcaggggtaggggagggtctattcggcagggggtggcctagctgtccgtactccccaaacgcaaccttccagtcccaaacccaggcgttctaagcgctcaggacgacgatttgcgctcacgccaggaccctagtcttcattggacccttcctcattctgtcctcattgaggccatctgagaataggggctatctgagaatgcaggggagtggacatcgtgtgcagacagggagtctggtgaggagacgctgcggtccccgatgtccaggtcctccagccctcggccagcgaggagcgaacgggctcctccgcacggaccgacacgtggactgggctcctgggaaaggaagagtggagaaggcgggcaggagctgtccgggtccctagactctccgagtagcaggtcccacgcccccagcggaagaagccggggctgggggtgagcggtggcacccggccggcccaaacggccaaccccgggcagccaccgcccaccggcaagatggcgcgaggctcgggcttgtgggaaacggagtccgctcccggcgccgcccctcccccgccctgcggccaggccgggaagcgcaaagttgtttggggcgtcctctgcgcctcgcgacccgagtgcgcacagagggggaaactaaggcgcaaagagctgggcagtgcgggggccgcgacttataataataaaggcggtaattgcggctgaccctaggagcgtgcgtcgggaccgccgcccagtcggctccgcagagagggcgccgtgccggggctcctgcacccccgccctgcggctcctcggtccttcacatagccctggcccacctccaataagccgacggcgcatcccattccctccctctattttattttctgcatctttaaatggtctcattcattcgtgtattgtctgtctcccacttctagattgtgagtgccacggggctgaggcctgcgccgacctggtctgctggtgctaccaggcttgaacagtcttcaaatccactgctattaggcaaattacctggctcccgctgaactccagcacctagaactatgtcacactcgtagtaggccgctgcattggttgaacaaatgattttgaaagaatgaatgtcttcctctgtgcctgcatttcctcagaaggctgtaacaaagattaaataggaaaattcgtggaaagttcaattactacaccacagaggttaattaagtcgcactgctagataaaacgggagacgagactttgaacccaggctgtgtggctcaaaccccctgacacgaagtctctactcaacctcctcactaccctgtagacaccacccaataaggctgcgcagctcccgggggatgtttctgtggaaggcaggctcaccttgtgccaccccaaacagggtcttggatctgagaggcaatgtttctgctccagcccctcaaagacactctttggatgttgtggggggaagccctctgcagcgggtggggttcagagatggattgggattggccccggggtcacacagctggggctgcatccaaactccaacccaggatgttgggctcctcctttgccctatagtcagagagaagagaccaagagaagacagaggctgggcattgtgaaggcaatgggctcacagggctcagttcagggaagggtagagtgagctgacccctccccttcccgtgcccctcctccggcctcagcctcccttcagccagtctgggtgccgaggaagggctgaccctcgctcttgcggattaggtaggatccaccctctccaccgggagccctatccgtggcctggcctcctgccctaagcctggcctgataggaggatcactttaccccagtccaaattccccaccacaccccaccaggccaggccagctccctctgaacccaagcattgtttg

SEQ ID NO: 915366 - DNA, 4001 bp, Homo sapiens
ggtggtagtagggacagtgatggggcttgcaggtgtggacgggagtgtgaggctcatgggaatggggacagggatggggatggaaatggaggtggaggtaatggtggggctggggcagggaatagaggtggtggggatggtggggacaaggatgaggacaaaggggagaaagatgagtggaccccatccctacaaggtggctgctccatgccctgtcacctccaccttgaccaactgttggcagtgcagccctagccccaccccaccctgaggcttccctctcctggccctggcccagcactgacctccttggtggggggacccgcactgggcttctcccgcccatagcctgagctggtctggcgcatgctccagggcaggggatgcttgccgtcaggcacctccagggggcggtagctctggctggccacagactggaaatggtcctgggcttgttccctgagggtgaggaggagctagaaccccaggccgcctgcctctgtcctctgctaaggagcttccctcctccctgcaccctcccacagatggctcagaggtccgctgtgccctgagtcacccaggacccccagcctagggcaggcaaagctcagggtccccatccaaggaacctggagttggtctgatgagcagggcaggggctgggaaggggccatacagaccgtaccccctggccgggttgtctaaggcctccagactggcttggcatgagaccacgggctggaaatttgatttgtagccggtgcctacgtgactgcccacacggggcttgaaatcctcccgacctgccagaggggtaacggggagacagaccccaaggtcaaaaacaggcagggcttcccaggcagggccagcgtcctccgaggggcacaggggtcacagtgacaggggagggctcagagccacgggcaggagctttgcaagcctgccctttcaggactgtgatggcaggaaatggagtgggtgggctggggacaaggtcagtgtggcagaatcacagtgacagaattgcagggacagaaccagagaagggagcagccgggcagggcccaggggacaaacggattcagcagttgctctgcagtgtgacagccagagggtctgctcctccctcagagagagcccctcccttcctgcccatgtcctagcagaggctcctgcgcaaaggcaccctcaccgtaggcggtgcagtagctggtggcgtagaatttcagggggtccgtgtagccccccgaactcatcttcacataaggggagacgacccccagggggagtttccccatcatgatgctgtggggcagggccccagggggcctagaaaggaagcacggggagcctcatgggtcccaagcctggctcggaagcccacaggggcgaagatctgccccccaccacccacaacgcagctggccccttctcccaggcctctgtctctctgccccagctcccaagtccctaaactaaggacgaaaccgatcatccacacttatcccaagagtcctcatgtctcctctcactttcccacaccttcttattaactcttcctgtccccatttaccactgggacagtgaggttccaagtgataaaggatttgctccataataggtggtagtgctgggattcagacctaggtgtttgactactcggcccctgacctgaaccttacatacccacctctcggaatgaatgagccgacaacccactacctggggaattcttggcccccacccaagaagtcaggccgaggcgctcactcccagcccccggctcctctctctccctcatctccatggccttgcccgcctctggccttgcctgcctcccctgggaattggctgcactctccccgaggcccaaccacagcggccccaccctcacctttcctctgcagaggctctgaggtcggggagaggctgcaggaagcagagctctgcagagaagccagccctcctggaggaggccaagcaggagaaacaatgtgtagcctagcaactggtgcctagcaacagcgtccccaggcttctgagaccttctagggccagggcccactgaggggctgacctggccaggaggggagggtcagaagctgcccgagcaaggccctgcttccagggctccggccccaacctccggcctcctccacagggctgggaagagttgctgtctgcgtgacataaaataaaagataatcccgaacactcactcccataaagtacccacttctcggcagatactttacatcctctatctccatcctctgagcagctcttcagtagctatgattatccccattttcactgggggaacatgaggcttagataagcaaaatgacttgactccagagatctcgcaatcagaaaatagccaagttgagattcaaacgtgggtggatgtggatcccgctcttctgcctctcggtaaatcaacatttactatgttcctctggagctgaatctgtgctaagccctttaacacacattacgtcgtgtaatcccccaaaccaccctgtgaactgggcactattattgtagggccaataaaccgcagcagttaagagtgtggttcaaatctgatctgtcacctttgatgaggtacttatcctcttcacgcccccaaatccccatcttcgcaagggacgtgactgcacccacctcacagggctgctggcagatttagcaagagcatggattcagcacctgacaggtagtaaatgctcttttttttttttaagagagacaggatcttatgctctcacctgggttggagtacagaggtaccatcatagctcagtccagcctccaactcctaagttcaagcaatcctcttgcctcagactctcaagtagccagaactacaggtgtgctcccccctgcctgacttgcttatttatgtatttatttgttgtagagacagcgtcttgctatgttgctcaggctggtcttgaactcctggcctcaagtgatcctcctgcctcagcctcctgagttgctgggattgcaggggcaagccaccacactcggcaaatgctcaatttgcaaaagctgctgtacttttagtcttattttgcagataggaaaggcgaggctcaaggggaaatagcccaggccccacagtgggtggagacggagcctggactcaaatctgagtgcgcaaactccacagtgagaatcttcttccatgacagcctttttgcctcaaattggctttcaggcttgtaaatgttgtaacagttagatctctgggtggggtgggatagccctactttgcagcatttgccaatttctgtgatgtcagtggtcccatcagggctgctttcaaaccaccactacagtgtctttgaaccgggacatgggaaggtcgctcaccactgtacgggagtagtcccatcatgcagacataatgggcgtaagtaacctcgacagcacaaataatagaaaaatgtactcacataattaaggggtgatgagttttaggtatttttttttgtttttaatataattcattaaattgcaggtttaagttatttatttatttatttatttatttatttatttatttatttatttgagatggagtcttgctctgtcccccaggctggagtgcagtggcacgatctcagctcactgcaacctccatctcctggttcaagcaattctcctgcctcagcctcctgagtagctgggattacaggtgcacgccaccacgcccagctaatttttgtatttttagtagagatggggtttcactatgttggccaggttggtctcgacctcctgagctcaagtgatctgcctgcctcagcctcccaaagtgctgggattacaggcgtcagccaccgcgctcggccagtaatttaatttttaacaatggcagagttaaaaaccagcttgccaatttcctggaagtttcgccttcagctctcctgagccggtagagctggcttcagagcacccctgctctcaggggagagtgaggtatgaat

SEQ ID NO: 915367 - DNA, 4001 bp, Homo sapiens
cacaaagtcagaagcaaaagttaaactgacaaagacaaaatgctgctaggtgagaattaaaacttccaccatcgcgcgggggaaccataaaaacaatcaaaccctttttctccctacatctaaactaataagtctacagacgcagaaaaggaggacgaagttctcttatttacagaaaaaaaaaaaaggagttgagtgcaaagtgcctacagtacttattctctcaatgactaacattatgactatctgcccataaaaagatctgcataaaaaatgctgcagtgtgtctatcaccaaacaatgtatcatttatactgcaaaagttgtagaaggagggtaggcagcttataaatactcaccagcagacagtgggcaaagtcaggacctcccactaggccagtgaaatttcccagctgctcagcaagagctaatagtacctcatcttcatcataaattgtatctggaagtgacaacaacaggactcatcaacatggatagctctcccacagctggacactgacacaaaactaggaacagattcactatgcgaccaggaaggtgacccagtcaaaatcctaacagcattttctttcttctcaaccgtcttcctgtatctgctttgcacaacgaattagaaattcatactcccgtatcaattactttcaatagctaaatggttgatgtttgaatatatctagccacaactaacaatatactctgttctgtttcttttgcacaaaaaacacctggctcattttaatgtgggtaataaactctaaaaaagtcagtgttgaaagctactggaaaatggaatgtccctacctttctttaaacaaagattcacatacctgtaagaaatggcaacaattcacttcgggtcctttctactccaagtgctagggcaattgttgataacttcttaatactgttgagtcggagcttcagaaaagaaagtagaaagaagaacaatgtaaagaaacggctgaatttagatcaaaagacaaaaggtgctaacaggtgaaattatgacacaggggtaagaatgaagataacctttcatttagattttactgttaaggaagctcataaggacttccaaaaagaagtgtaactcggcctcactagccggcggaggatttcccaggagaaacactcagaagggaccggaagagaaatgaaggaaagacaatacaacacctaggaagtaagataattttaaaaagagagcactttggcagtggtgaagcaggtgaaacggttgaatacaacacctgtggtttcaaagaaaagttcccacagagcggatacactactcgtccagattaatcggccatcccacccccgctttctacccaacaagccgagccagttccaagccgagatgaagggatccaggggcacttcaaagggcttctgggcatcctgcgcccctcagccgctccagccccgtctcggcctggcaccgcgcttctcctgctccctcgcccaagagacgcggccacctcacggcccggatggggcgcccaggcgggaagcgggttccccgacaaccgcccgggaagggcaaggctccgggcggacgcctcagggggtccgaagcaaggttactagagaggtacccgggagggtcggggcgtgtcaccacagcccctcgcggagcattccccgcctccccttcaagtttctgctacgagtccgactcattcagtacctcggccacccccaccgcgacgcaggccttcccccttctctaccacgcgaccagccggtctcgcctcgggtccccggcctcagtccagtacctgcacgtcttcattgcggagctcgtcgattaaaaccgcgatcgggtatagcgaatcatctccatctccacccgctgctcctgggccggtcccgagctctgatgcgcccgccatgttctttctcctcctgctgctggtcaccgcctcccgccccgcgcccaggccccgccccgcgcccaggcagtagggacgaaggccgccacgctggtttagccgaagttggggagccgcgtttctgtcccgatgattaaggctcccttctgacccccactgcaggagttgtaggtctgaactcaagaagacgggtgggctaagaaagcgaatggaacccctgcgtcctttccccagccgaaagaaacagggacagggattcatccagctcgttgtagtctgaaggagccaggaacctacctgaatgatctgcgctgtgccctcttaagactcaggcggaccaaagagagtgcccgaggccaggaggaaaaaggctttagcacctcccctgacttcttcctggccctgagccactggatctccagccctaatttctccgctcagactcaaacttccacagaacccctccacctcttcccgcggctctttctccagaatggtatctggctcctgctccgtaagacaaataacgcgggcggtgagagaaaatgaacagtgctgtccaaactccccagtcaatattttttccacgcaagctgttaaaaacatgctgctctcttgtttttgtgtttcttttcagtttggtactggaatggtgccttctgttgtattttcttcctcccattttttagctctttagcatgctagaagtacaacaatgaagcaaaactaggacaagctttaatccttccaaattgggtggggtggctactttcttgagcaagaaaacccaaactggcctccctagacctccaagagtcctcagaggcagcaaggggaagaggtggaggtctgggagctcgttcttacaaacctgaatggaaagttttcacttacccctgtcagggtagcacagaataattagaatgttttgtttgttttagactggaatttaagcagcttggagtgataactacatatggtgatcacaagctccgaaatggtaattctatgtgcctgattaataaaactataaatgcagtgtaggagacaaacttttttaaaacatgggattctgaggccgaggcgggcggatcacttgaggccaggagttcgagaccagcctggccaacttggtgaaaccctgtctccactaaaaaatacaaaaattagctgggctggtgacgggagcctgtagtcccagctactcgggaggctgacatgagaatcgcttgagcccgggaggcagaggttgcagtgagccaggatcgcaccactgtactccaatctgggcggcagagtgagaccccgtctctaaaataaataaataaataaatagcgttcttggaagtaagcacaatagagcctttgaatgaatgaatgaaataatgaataaataaataaataaataaataaataaataaataaataaatggggttcttggaagtaagcacaatagctagagcctttgatagtaatgaaagtttgggaaccagcagacctgaacagtttttctcaaattatgtctgcgaatgtattctctagggttttaattttattttcattttcatattttttagatttgtataagcatattctgaattatttgggtgaccaccttacaaccaagtattgccacacaatttcagcacccacatttacatgtgtgttttagtgctgcttttattgttctgggataatgagaaaagaacagaggtggttttaaaatgacaatgatactttcatgcacaaaatgaaagccaaatgcatcatgagattgcactatttggtagttgtaacagaaaaatggtgagaaaattaagatatcaggagtcacttggtggcataggcatgttgaacacaaaagaagctgagctatagcaggcaacaccatagtaacaatacgacggatgacagttttagcaaaatacatcatttgtcacgttaaattactataatatttttaattgaatagtattcattttgtggtttcatttgtatttaatttgtaaatttgttgtggtttttttttagctgtgtaagaactagaaataaaagcacatttttcctactttatattcgtaaat

SEQ ID NO: 915368 - DNA, 4001 bp, Homo sapiens
cccagctgccccagctgtgggtggggcagaccctcctaatctccacggctgcctctgctgcccccaggccccatgctcttgtgccatctcctgctccttgcagacagcaaacaactactgtcccttcctccattcctgggggttgagggttgcttttcttcctcctaatccaggctcagagagtatgatggcctgagttttaaagcaagatcacaaatcctggatgcagcagctttccacaggtgccccaaacagctgctgcctccctctcaggtggcaccctgttctaagggccagaaatggggaggggttcagggccaaggatctctacggtgtcctcaggcttggccagtctggccctatggcccaaggctggggaagggacctatgtggtgatcccagggaaccctgccaagcgcctgctccagggatctggcagctggctgggctgatagtggccccctggaacccaggctatgggccccacccttggccttggtctgcccctagggtggcaccaccttcggatgtcccacctctaaggatgacaggccagtcaggccatgtgtcagcagagagggctggagggctggggtcagttctgatggcggagaacctagcctggaggggtatccaaactctctctcttggcagctgcccgctgcctcccacccctccccatggccctgctggtcccctcgggggttcggttcccccagtggccagcagccagctcacctttgagcaggggcagcggtgtgagctcttgctggttgctctgatagcggaactgagaggagctgtgggagcggcggggccgggctctgcggagggaacggcgggagaagccgtccaccttgtcgggtgggggcacaggcgacagcccgggggaggaggggctagtgggggtgcttgcagggggcagcttcgtctccatggcggtcaggcggcagggcaagctttcagagccccgggggttctctctgggcctgggaggtgctgggtgagactggacagactaacttggtcccatcctgtccggcctttggggggggggcacaaccacagtcctgggcccccccccagggcctcctgcaactgcccagtcctggggggcagacagggtagaaaggaggatggctcaggcctcagatccttcctgggggtcccgaagagtccagttagggttcccaccctggctcttttgaaaacgaagtcaggcagaaagatcagcaagaaagagacagagaaagcccatcagttcctcaggagagccgggaggctgcgtggagtgcccaggtcttttccctcctatccttgcccagaccctaaaataggggtgcagccccctcccatcctggacatgtccctcccttctctcagacagaaagcctccaaaacaacccctcccagaatagggcctatcccccaagccagccccgactcagaatggagccccgatcgtcatccctgcccctttcagaatggaacgcatcgctgctccactaatcccggccacttgggacaaccccaagactggaggtgctgtcccgatgccaccccgctcctagaacctggcaccctcccccacctcagctcctccttcctggccccccaaacctcatggggtgggggacactcacttctcgaaaacctagacttcggtcgccaacccccgggggctgcccgtagggagggcgacggccgttcagggccccttcgcagcggttccgctcggggcgctggggctgggcggcggcgctcctgggttctctcccgggctccgggggggcggctagagcatgcccccaactcagccccgggccgggactgggcgctcggcgggctctgcaccggccgtcgcagcgcgcggatctccgctgaagtcctgggactccgacccaacgcggtgcagcgcaacgggagccccggctcggctccgtgcgcaccggcacccgccgcccagctgctcaggatgacatcaagtcacctccccccacccggcccgcacctccccgcgggctgaaagggggggctgcgtcaggaaggcccggggccgctgggagatgtagtccccgcgccgtttaaagtgagctgccagaccaaaggggacacccctgagggcagactcgggggtgaaggccgaagcttttgaagccagagagcagagtgggatgggctctagccgggggcgggaagcctggattctagaagggaggctgcatagggaaagaggagggcttaggagtttgcaccaggaaagtagggtgatgccaggacactgacaggaaggagtcgcagcaagctacgctaggcccacagatttggcctgggccttctatgccctaggccatccccccaggaacctcacccttaccccagaaccaccagacacttcagaaaccccttggaaaccagcactggactagttaaaagtctgcgatgagtcagtgcttgctgggaggggtgtggtgcacccaagcctgctgggagatgcagtccatcctcaggcctgcagtccccctcccgtcccttgctgtctatggtgacatcatggtctccagtttaaagggccagtcttggagtggcaaagcccgagaggaggaggttttctccttgagctgccacctcatcccaggcagcctggccttcccggatggacctttcagcccccctggaccctaagatgtgctgggtgggtcagtgtctcttgctcaaaatcctgctgctggcatgcaaggcacaggtgggagtccaggagtttggcatgctaaccaaaagttcccagcctgcagtcctgggcccccgtcctaggatcctggaccccaacactctttatagccctgaactccatcccgctacactgctgtgaaatctccaccctgaaatgttgcctggatgagcagctggtccatggtgagcagtaggaaagggtgatgagaccagataatgaggtcggggaggggactaggggccttttcagagtctgccccatcttgctttgggtcttggtgaccactcagtgctccagcggaaccacccagccatcctcccggttgcagaggaagcctgggtgcgcaagaggtgtccgcctaccaaagcaacagaaggcagaggcctgcaccgagggccgcagttcaccaggctggggtccaggactccggcactggagacccagcaagtgctctgcttgctcaggaacctccggcaggccttgcccatccggcccttggtgtccctgtctgtccaatgggaatccatgatctccctccttgcccacctcccaggctcttctgcatccctgaacaagctgagggagggcaggcccacagagcctctgcagccaggcaaggaccccaaggcctagagaggagaagcgccttgcccagtgtcacacagcgtgtcatcaaaagttggggccaggggccaggcttccacctcccagctggctacagcccatctccacaagccccctgggtaccagtgccctggtctcaaggctagactgaccacagaggactggtgttttatataaaggaagtgctaaggccaggtgtgatggctcatacctgtaatctcaatactttgggaggctgaggtgggaagatcacataagcccaggagttagaggctgcagtaagctgtgattgtgctgtcgcattccagcctgggtgacagagaccctgtctcaaaaacaaaacaaaaaacagagatgttccatttgagaaatggggcactgaagagtagaggagagggataagactcttggaagaaaaaaaaaacttttttttttttttgagatggagtctcgctctgttgcccaggctggagtgcagtggcacaaactcggctcactgcaagctccgcctcctgggttcacaccattctcctgcctcagcctcccgaatagctgggacttcaggcgcccaccaccaagcccagctagtttttttgtatttttagtagagacggggtttcaccgtgttagccaggatggtctc

SEQ ID NO: 915369 - DNA, 4001 bp, Homo sapiens
ttctgactgagtgcaggcattttgttcaatgttctagactccctgaccagacatgctgaagtggagaataccttccaaagtatccctccaggacaaaagctatttcccaaactatctttgctgaagaatactgcaatccacggcacccttacagttttcagtaacaaggaggacttacactaagaaaccctagttactgattcgggtggcagtcacccagaaactagtatccaaaagcacatgaggaacaaagcccgacttaagcttgtgatgggcttttctgtatttaaccatctctttaaacattatgaggcgctactactcattaattactccggtaaatgttcctaatttaaggaatggtcaaaaaccctgtcctgaaaaaattaaaataacttatagttttactttttcagcccaactgagtcttacacagagctttctaaaggcagtcaccaagagtcgggactcaaatgctcatctgacttcccaatagtacctaaacatttaaaaatcaaatttaaattaaacaataatagccattaactagcctaaccactaatcagccactgaggtgactgtatgtgccaggcacagctctagctgttttacatgtattagggcaattatcctgacaaacttatggctgggacacttattattattcccatactacagagaaaaaaaaagagaagctgggtaacttgcccaaggtcacagagctaaaaagtggtcactgactccactccacagtgaggaaaacccaaccaccaccataactgggtctcatacacttgctacttgaggcacagttcggtggttggaaacctggagtccctgtcccccttgaagcctatctgcaacatgaccttgaggacaaaatcaaagtaaacgtcccacgaataaaggacaccaccccgtcaacaagtgctgcgaggatgaaagggaacgcctgtcaagcaccccctcccataaaagcaaaacagacccaaagccccacagagaaaacgtgaagtaccaggaaaatgacattaagtcacgcggttgaaacgtcagggcacggaggtacatccaaagacccatcccgttcacctataattaaaaagtctaaattgtgatcacagccagcaggacctcaacaggaaacacctccaagtaaacagtgaatgggcttctttaagagggagggacttcaagccacaagaaggaccacccaccccccccacccccggctcaaatacaccagggaggcattcgagacagtttacatacaagccacctcacaggagttaaaaagccactgggaagggtactgggagcctcggaactggctggtgtggatcccgatgactctgcggcgaattaacagaaacccacaaaacttgtttcccgaagagcagagtccaacaatggtcttcgcgactcttgacggcgagttgctgcctcaacttgacgcgctccccgaggcccccgggaggcccagcgggagcggagaccgggcgcgggccgggcggggggcgagactgcgggccgcggccggcgggcgggaaggctggagccagagccgggtcaggggcgcgcctcgcccgcccgccgcgccaggccgcgaacgtcaacgaggcacaaagtcgccgccccgaccgcgtcccgctcccggcgcccgtcctggcggggcccccggctaacaggagcggacggggagcggccgggaaggactcggcgccgcgcctcccgggcccgcggagcgacgaattccggggggggaggggagaggggccgggacgttccctccctgagccgctgaggccaggtggaggggccccgcgcctgcccgcgcgcctcgcacaccccgcgccgcggcctgctccggcgcctcccctacccccattacctggaggtgcccacgacccgccgctagttgcgctcaggcgggaaacgcgctcaccgacaccatcagcgaagcgcccaaaatggcggacgtatcaagcaggccttgagttcccccccgcccgccctctggccgcctctcagccaatcgcggccctgcccccgcccccagctccaggctcattggcccctctctcccgccccctactacctattggatcgcctagcggctcctttgactacattccgattggcccgcaagcctcgtcagtcaagcgcgaggggcgcattcttttcccatggacttgacggatccggaacctctaggaccccggagcctgagaaacaaatcagaaacggggagaaacctggctgggaccccctacgccgtagcaacagcaggtcctccgcttgacggacgcttcggaccaccaatccgagtggccaatgctttttaaaactaaattgagccaagcccatcatggccgtggagccggagccgtgagggatccaatagggtggcgagctggccgggcggggcgggggcggcgggggacaccggtggtgacgtgagccacaatatgcgccggctgcaaaggttaggccgggctagggaatcagcttaagtggaggagcgttcgtttagtatgtgagaggtaacgggatcgatgcctgcattctccacaggggaatttttatcagaatgatttcccattgcgatctctttacctgaaagaggtggctgtcctcgtagcggggtcaaggtgagggatcgcggaatatccctacctgtgacgcaccgccaagagataagtgcccttgtcctgggagaaggacttagacgagaacttttggggtttggttttgtttgagacggagtttccctgttgtcccccaggctggagtgcagtggtgcgacctcagctcattgcaacctccgcctcccaggttcaagcagttctgtctcagcctcccgtgtagctgggattacaagtgcacgccaccatgcccggctaatttttgtatttttagaagagacgggtgtttcaccatgttggccaggctggtctcgaactcctgacctcaggtgatccgcccacctcagcctcccaaagtgcaggggttataggggtgagccaccgcgcctggcctggggtcttttttgagacaaggtcttgctctgttgtccaggctggagtgcagtggggtgatcatgactcactgcagcctccacctcctgggctcaagcagtccccccacctcagcctcccgagtagctgggaccataggcacgcaccactgggccccgctaatttaatttttttgtagagacagggtttccctgtgcacacgagcttctaaatgctcccccgggcttcccgttccccgccatatctgtgcctcccaggtaggaccgaggtcccggacatcaggacccccgccccaagagccagcccaggacaccgagacagcccacggttagaccccatgctaataacctgccttattccaaaatggatttgaggcgcctctcagagtcccatgaaaatccacaggaggtcacggcgcggtcacgcctgtaatcccagcactttgggaggcggaggcgggtggatcacgaggtcaggagatcgagaccatcctggctaacacggtgaaaccccgtctctactaaaaatacaaaaagaaaaaaaaaatagccgggcgcagtggcgggcgcctgtagtcccagctactcaggaggctgaggcaggagaatggcgtgaacccggaaggcggagcttgcagtgagccgagattgcaccactgaactctagactcgacgacagagcgaaactctgtctcaaaaaataaataaataaataaaaacaaaaaagactggtctcataagattatgatattgtagttgtactggactttttttttttttttttttgagatggagtcttgctctgtcgcccaggctggagtacaatggggcgatctcagctcactgcaacctctgcctcctgggttcaagcaattctccctgcctcagcctccccagtagctgtaattacaggtgcatgccaccatgtcccactaatttttgtatttttagtagagatgggggt

SEQ ID NO: 915370 - DNA, 4001 bp, Homo sapiens
gcaaatagttgtatataaaatcccagcatataaaacaggtaaaagctgaaagagatccaagagagggtactagagcacctaatttggcctccacttcagccttcatccactttccctctgaaacagctccccaaagagcccttaattttcctcagtaaagtgtaaaacacattggtccttgtcccaaccctcctaatttacaaatgagggaattatgccctagagaattaatttaagggagttgcctgagaaaaaagattatttcctagtacccctgctaaaattaaaatgttttctcttcctcataaacttgaactcaaatgtctgggttaaaaattgtttcttggctggggacacagtggcacacgcctgcaatcccagccctttgggaggccaagacaggggcatcgcttgagcccaggagttcaagaccagcctaggcaagatgacaaaatcccatctctatttttaaaaataaaaaaatttttaaattatttctaagttattctggaagtctatgacatccctctaccacaaattcccattccaaattcacataagggctgggctcagtggctcacacctgtaatcccaacactttgggaggctgatgcagaaggattattgagcccacaagttcaagactagcctgggcaacatagtgagccttgtctctgcacaattaacaacaacaaaatttcacataggtctataaccacatattatatgagtgcctacttgaagccagatactctgctaagagtacgttatctgctctcattcaaccatcaccacaaaccccaagagatcaaggaactaggctcacagaagtactgtaacctgcccaaggtcacagagctagcagggtggaatccggttctatctgactcctaaagccaagcttcagacccttgcactctttctaatcccaaccttttccaaatcttttcctatttttacacaggctttcagaaatgctgaactgtaaggattacttgtcatttcacagaggatgtacttttccatcaagacctgtgggggaatgcctcatgctgcagccaagcacaaaggcatcaagcccaaaaacctctaatttcacgttacagaccatagaaaggctaatccccacccccaccacaaactcctacaactccttttacaagcataggctacatacattcagtcttatggggaatagggactgtcaacaattcttaataatagggctacaaaatcagctctgagctgaccccttctgagaggctggcttttaggatggataactatccaatattttctaataggtaaagatattaaaatttgtatttagggctgccttggggcaaaggatgactatcaccgcagactaggtaccagagctggcatttaataatttgaatttgagggaaggtcaagggagttcggattggggcaccctctgggagcagagggagttgaagtgactgtcgtgtccaattacagaaaagcctgaatcaagagtatgcagccaaaactactaccaaattattggtaatgggaggagaaaatttaaacagaactgggatttgggaccaccttctggaagatgttagccaaaaaccgaacagatcctaggcatcaaggggtgtgaatttcgaggtaggctccgttgcccgggctctgagggtcagggttcccggcggttgggcctgggacggcgaagcccccgctcccccttaccttctgttggaagtagagaaccgaatagttcttggctacagccgggagggatgtggggttggttggcaagtgtaggctgccgagggcccttaaggccggccggagggctatggtggcccagggcgccagaaaagacagaagcaggagcaggagggctcggcggcccatggctcaggctggagactgcagtgcgggtgggagggcgaaaaggaggccagcagaagcgcacaggctaagccctgcccagcctgcagctccgcccgccgcaaaacagctcctcccaggggaaacccaaagccagccagctcctcagagacgccgcccaagccaggtcaccacagccactccgcccccatccccgaggacaccgcctccactccactttcctctcgtgccatctgctccttagcactcaccttcattgcggtcacaccccaagtctgcccttatcatgctagggcctcttcctaactcatcgctgtagcccatgctttatctatagcgcccccgaagcccacctgtccttcaggtcacccaatatccctaccattatcatcaccaccaaaccctgccctggccaccgcaattccattgcgacacctcctgccttccgcaaatcctacgtaacggcaataacagctaccatgacaatttattgaaggttcactacaggccagtgtatcacgaggcagggaggcacacgcatcatctcctctaactaaatcgtcacagcaatcttgtgcgtcgtatatgattgttattcccatctacagatgtggaaactgaggctcagagaggtgcgggaacttgcactagatcactcagcagtgagcggagcacgtcgtcgcagaccgctgggtccaggtccaaagactgtgctccttgcacccacctccatctggagcctaaccactccctatgatactccgttcttgggtcaccccaaaactgtgttgctcgcacaacccatccattacacaggtcgccccgggtccacatcgcccctaaatcccgccaggtcccggtcccttctttcaaataacgccccctttcttctccggcacccgaaaacccactccgcgctccacccccctcctgcctcctgccaccgcccccttcctccctccgcccgtgggtagtgctagcccctaggacagcgccgggtctggcttccaaagctccctcaaccctcttcatccagcttccattccctctttcagtcaccccgccagaccccagggcgctgcggctcactccacactttcccgggaaccctacgcccaggaggctcagcgaagctccaaaaccaattttacggactgtactactgatccacctgtcggggagaaagactctacccgcagtttgacgaaaatggtcgtttccagatgcttgtaggatttcctcgctaagctccaccctctgcggcgccttcttctgattggctctgagtaatcagagccaaagcgttacttccggcggaaaaggacgcgggagattcgattggaaggctgccggcgtgctactgagttcggccggtccgagtcactgtgcgtcgcctgggcccgttcctggtcttctcccccaggtgagctgggtaaaggggttctcgggaagccgaagagccggagactcctaaggaggctcttaacttcattatgaatgagacccacccagagcccggcgcttgttttttcacaagtggttctctgtaaacgggcagccatgagggtaacagaatataaacgtcagttattttattttagactcagtgcttttgcaatcacctaacgaacgtttattgaacacttacagtgccatcgagctagactcggagtgagcttttagaatcggaaatagagaggaaaaggcgcgactcttgcttctgtaatgtgcaaatacgtattcagtgggccactgtgcagagtagtacgtgctgaaaggggatcttccaaaatgctatgatggcttagaaggaacatattttaactgagccatgtgcttaaaccagagcttgaaagttttcttccttttcacatccagccagtccctaccagcctcttgaatatctcagatctgttcacttctctccgttttttactgacattattttggttcgaccctatgactgctacatagctgtgacagtaacccccccctcccccgccgccccagctggttctcctgctttcaatcttgctaccttccagtccagtctccacattgctgggctgataaagttcatatttgaccgaggcactccccattgaaaacctttcagt

SEQ ID NO: 915371 - DNA, 4001 bp, Homo sapiens
ggggcccatgcctgcaatcccagcacttagggatgctgcggcggtaggattgcttgagctcagcagttcgtaaccatcctgggcaaaatgatgaaaccccgtttctacaaaaagtagaaaaattagccaggcgtggtggtgcacgcctgtagtcccagctactagggaggctgaagcaggaggatcccttgagcccgggaggtcgagtcggcagtgagccaagatcgcgccactgcactctagcctgggcaaccagagaccctgtctcctaaataaacctagcaaagttcctttctaaataccccatattgaataaacactgtttaaacgctgctttgcccccaaccaatcctaattttaaaaaaaaatcttgttttctctattctagaacaacaaataagtactgctcatcaaagtggaagctattgtgatgctggaatggtaggaagatacaaaaaaaatacaatgtaataatacaccttcttgccttacagcgatggaggagtgatagaaacaaagagaacaggtcagaaaaagaggccacaaaacagtcatgagtgattctgctgtttttaataaaggttaagtactgctaagtttagagaatttggggtgacgagacaggcaaggtttcaacaggcaaagcagcagaattagggcacagggcagagctgggtgggtctcatcacacatctaatcctcgatgacagcacaaagccacctctccttgtgcttaagtgtacacgcacattgattgaaaatgcactaaaatccaactcatccaccaagcaaggctaaaggcgcgcacacaaattcaacagcgctgcgttcgcgtggctggagggcagacggggaatattccattttacttagtagagtatcaacacctagctgcagggttaaacctgcttaacaaaagctggcgaggggctggagaggtgcacaccatcagccctctcccgagcgccgaccggcctcgccctgcctctgcgctgcaccctgggtgcaggcggactggggcagggccgcgaccccggcctcggcctccgcctccgcccggccagccccgacgcggtgccacgggacagacccgcaggggccaccccacacccctgcgggccggccccccgccccggtcccggacgctagcttgggaaggcaggccgggggcccagccatcgatggcaagtgggcggcgcggcctccgcagacaaagctgggcgccccatcgaacaggaccctccgccccacgcgcccgcaaccggccagccccggagccctgcccgcactgccacccccagcccggcgcccggcccccagcccccggtgctcggctcccggccggcggagacctgcccgccgcgcccggagcgcccgcgcaaccgccgccgccggagcgcgcaggccgcccaaccgccgtcccggcccaaccaacgcgggcaggggaggagaggtgcgcgcggccggcggagcgtgcgagccactcgggggtcgcagggggaggctgcgcgcggcgaaggcaggggcgacgagacgccgaggccggcgctgaacgcggcgccaggagggcctgctggagggggccttgccctcttccccttggaaggtgcagatggtttgaccccccaccccgagtgaggtgcctcgtcccagccccggctggactgtaccatcgggcggtgccgccgggatttctcccccccaccaccaccatcaattccccccccacccgggtccgcggtcggttggccccggccgggctctgagacgcggaaagagctgggcgccattttgggtgggactaagcaaagacgaaacaccctcccagtctatggggtagtctggaccctggcttatctggttcccttaatcctttaggtacttacacgacgttgggtgaggggagctggaagatcagcgggtccccgatcctctctccctaggggtgatagaaatcaaccccccccgccacctccaggtggttcttcccgccgcagagtgggagcagcataaaaggcggggtcttattagcataatctgcctggcaacctgatctcgacgttatatgattggttaaactctgtaagccccatgccgtgcctagagacgagaaacgctggggcgaactgacaggcccagatttaggagtcatgacgaagatcctgagacgcttattcagtctgcagagaagccaaaaggagattcacataatggcccaatgactgaaggcctctttatttcgtgctctgctgttcgtgtaaaacccaatcgcagagcgggtctcaggcggcgctcgcctgcgtttctactctcagccaatcagaaaacccgactcttcgcattggggtcaagcccccgctgcggcccgcgtgctaacggggaggaagcttccagctgtgcctgggtgtctcgggcgccgagggcagcctgcgcccgtgctaagcccgcctcccgcgcgcccgagggcccggtgtcccggaagacgcgcgggggtgaggcggccctcgcgtccgcccgccccgccacagattgcctccgaagtggcctggccgtggagcgccggcgaaaaccgaactcccgcccggctcccggagtcgggagcctgccggggtctcgccctcaggacccccagggagcggccgggcgccgcctatcaccctgacccaccgcaccttgagagcgctttcactgcgcctcttttttctcctctaccaatctggaaaggaagtgagtgtcatttcagacattgagaaacattattcaacactggttacccagtgactcagctcactccttaaccgcaggcttccacatcctgctgtcccttaaaattgccttcacaaagggcagccaagagcccagctttggagagatacccagctccaactacccactggcaggcaatacgcagggcagctagatggcagagagaccttggaccttcggaccttcggggagcggttttcccttcggtgatatctaccttgctatgttcgtgatatctaccttgctacgttattttgaagattaagtgagctcttactttaccgagtaaagtgctttgcttagcacactgtctggaacttaaatgagaagtactgacaatataacttacaaaaatcctaaactattgcctgagaaaaagagggagacaggacagctaagcaaaagacgagaatagaaaacacccacagcgtgaaaaactgtaaaattaactcaatagtattctctttactgttttttgttttgttttgttgttttgttttttgatacggagtctcgctctgttgcccaggctggagtgcagtggtgagatctgggctcattgcaacctctgcctcccgggttcaagcgattctcctgcctcagcctctctagtagctgagattacaggcatgcaccaccacgcccggctaatttttgtattttcagtagagatggggtttccccatgttggccaggctggtctcaaactctaacgtcaagtgattctcccgccttggccttccaaattgctgggattacagatgtgagccactgcgtctagtctaccattttgtttctttaaatagctggaaacaacgtggaaagaaaagagagcttttttttttttttaaacttcgtgacagggtgcggtggctcacgcctgtaatcccagaattttgggaggccgaggcgggtggatcgcttgagcacaggcgttcgagaccagcctgggcaacatagtgagactctgtacaaaaaacaaaaagattagccaggcatggcagtacacatctgtggttccagttaccggcaggctgtgcaggagggttacttgagcccaggaagtcaaggctgcagtgagctgtgatcgtgccactgcactacaacctgggtgatagagcaagtctctgtctttaaaaaaacaaaacaacaacaagaagaaacttcagacagttaactgctttgtaaacaacttcacatctaggccgtgtcttgttcttccttaaaccactgta

SEQ ID NO: 915372 - DNA, 4001 bp, Homo sapiens
ccgcccattccaagagcactcggtttgcaccagtccggccacacgccctgcctctttgccaggagcacccacctgtaagctaaccgccagaacgagacaggtacagccccaaaacggaggagagcaaatggaccacacaggccatgcccacaacccttaacacacttaacatgctttaccttactccagctgcatggtgacctggtttaggaaatagttatttttaatttctacaattctcaaataacagagctactttgtattaatattttaaagataaagtgattttctgtgcatttgacttaggagttgcctcaaaaatgtaagaatttttcccaggtgcagtggctcagcctgtaatcccagcactttgggaggctgaggtgggcggatcacttgaggtcaggagttcgagaccagtctcgccaacatggtgaaactccatctctactaaaaatacaaaaaaaaaaaattagctgggcgtggtggtgcacatctgtagtcccaactactctactccggaggctgaggcttgagaattgcttgaacctgggaggcagagggctgcagtgaaccgagcttgaaccactgcactccagcttgggagacagaccaagaccctgtctcaaaattaaagaaaaaaaaacaaaaacaaacaaaaagaaaagaaaagaaaacgtatgaattcaaggaaaaccaaaacgagcaagttctctgttgaactgggattagatgtggagcttgaacactgggcccaagcagacagattttaccaccaccacacagaaggaccaggagaaacaggatgaaaccacaaagctctgaagagcctcagtaatgcaaatcaatgagtaagcactttgccacataagcaagaaaatccacagaaagaaactgatggtttcttggtggtggaatgtgaacccccagcaagcagtagggtggggtggctgatcaagggcgctgccgaggggccagactgcctgaactggagtcctgaccctcaaattattggcacagccctgggaaagctacccacctcatggtagggccatggagggcataaaggaggtagtagactcagggcactcacgcctgggatagaacagcattcttaaaaggctatcatggaagaggcaaagcagcaaggcaaacttgttaaagctgaagtggctgaagagcgcaggatcgggcaaatctaccatggtggtttggtagctgaagctctggtgtgagagacctgggcttggctgcctgatgccccttcgtccctgtgtgacccccagcgagcttcccaatcttctgagcttgtttactcatcagtaaatcagaaaacgaaggagagtgtccctcaaagggctgcagtgaaggccaggtgggatgaagcaagcagagaatgtagcacagttggctgcacacggaaggacctgacgcacgggagctatgttcacacacacgcacacgtacacagacacacaagatggacacagcttccctgggggagacccgtgcccacacttacacaagtcgtgtgggtcgaagggccggggcgggtctggctcccagtcatccagatccgtgtcctcaccgtcttcttcctcatcttcctcagtgtcctcgtcctcatcctcatcctcttcctctttggcctccagtctgcctagaggggtctgcagagttgccaaagggtcggacccatctacactctcgatggaaggcagcacctggttatgaactggcaatgaggcctgggcaaaagttgaaggcacagagtaagcagacatggacacctgcttttggttcgctggtgcctgctggcacaaacagggcgcaagggctggctgaaatctagtcttcctaccaactccttccaggccctggaaaaatgacttccatctaccggctgtgaggaagagctggcttcatttttgatctgactgctcacagcctttaagcctctgccctccctctgccccttctgtcccacacctgggagggctgctaagaaggctcaggtgctccctcctttggcagcagtgggagagtcaacactggcaaggccctgaccacctgcgtcctgaccccacccctaaaacttaataaaacctggtctcttcctggctcattcagccgtttcacactgcttgagaggcctgccctgtctcccaagacttcaaataggtaagcaacagaccgtttcgatgtgtgcacatgtgaggtatcatcagtttccacatctgaactaaacctggggtgggggtccctcttgcctttccagagtagccataccacactggagggggtaaatgagttgacctatcctcaaccacttgtcttttaaaactaaacacgtcgtgcaacacatggttaacaaagttccatagctcacagctctccttttaaacagctcaggcaggctgaggtttttaagtaagaatgaaagagatgaggtgcctgtttgtttcatcatgctgaagtcagtctcctgcaaataagacacagtttgggtcatgtattaggttaatgctatcttatcaaatatcctggcagaaaataaaaatggtaccttaaaaagttctcctgcctccaatctaagtgttatgggattatacactggcctagaatccctttatgcaatcttgctcctcctgcccaattagcacaaggtcatactcaagccatgtcctattcaataaataaagcaagtttttaaaaatgccactccctttatcttctcatatgttgttttcctcacctaaaatactctttcctcagccaccttctaaatcctaccacattccagtttcccagtgaaccgcctttgatgcctccagccctccctgagtctcctctgctctgaactcctgcagcccttggagccatagaatcccactccacaacagcactcagcatctgcttccacatttcatgacctcaccaggcagcctgaatcattctgaaatagttctatgacaatttctgtggagcccagatcttccacgctttggttagggcccaggactttcctctggaggtagctagaataagtgtaacccttccgccacaagaatcaaatatctgaaggccaaaaaaccctaattcattcagtcatttctcacatgaccaaactcccagctccctaatcatcttgttgtcttcatttatttcgcagtggattccatatttttattaatacaacatcagggtgcattagtgtttacgttggccacgttgctctactgcagacccatcctgaacttgcagataactaaaatatctaagtcctcttttcccctcatagagtgctattaaaccatttttcccctcatcaggacttcaagagctgatttttacttaaatgggggattttgcatttatctccagtaaatttcatttcactgcttttatctgttcttcccatctgccaagatctttagacttcagatccagacatctcacacattaactatccccacagctttgcatccattgccaaacaccatctattttggtgatgagtatgcgttttcacatgagtccatcttgcctctccaactgcacctcagggaaatagactatgggctttggagtcaggcatttagagtaaaatccttgccccaccccttagcaagttactacacttctctgaacctcagtttctttgtctgtaaaatggacacagtaatacatgcctcaggttgttgtattaagtgaaacaatatgtatataaggccagtagcagagtgtatagcatttagtaactgcttagtattaatcattattatcctaagttctttaaggaccatgatgatatcatatacttcctcctcaaatttaaaagatcgctgagcataaagtaggtgttcaatgaagattaatttgttgaaatatatttggccttttgggaaataacaccaatcccttcaggcatctagaggaagtctttgcagtactcacagaaacatcctttttctgctgtgcatcttaatcgaagaacttat

SEQ ID NO: 915373 - DNA, 4001 bp, Homo sapiens
gtcaagggcaggggccagatcattcggtagcttttaggtcactacaccaatttggttctttatccccaacacactggaaagacttctaggtgtttaaagcaggaaatgggatgcctgatatgatcctatttggaatggatcactctgactgccatgagggggtgactgcaggtagacattaggaggctcttgctgttgtcctggggagagacagcgatggcttgactacaacactggggaagaggggatggagagaagtggatgggttcatttgagaggataaagttatctgggtctggagatggagtagattggggtgacagagacagagacaccaaggcttctgccttaaagagtagtgggacagtgtgctcttggccaagatcagagccctagaagaggtttagagaggaagattatggacacctttggccactgtgggtttgtcatgcctatgagacagccaagagagcaggccaagaaggcagctgaatccacaggcaggactcccgactcctaccccagtgttctttactttatacttgccaacaacctggaaccagggaaactccctgtaagtccaggagagggcagatccaaataggagaaatcctacttgacaccaaggagaagaaattgatggaacacatcaacccaagaagtctagacgacagaactgtaactcaggtcaaatgagtccataagtgcagaggtgatggctatcatgaccaatctaggactcctaggacaactgaggggagtccctcatctttgtgaacgtcaccagggaaggaaacgagaccctgccaccagctgttccttggggccctgtcagtttgagactggatggaccacggtggggtctgtgggggcaattctgatattcccaggtcagtaccttctgccgtgattctgggggagaacacttcttaaacagtatgccaggccctggaacaggcatttcatctttgctatctcatttaatttcacaacttccttgccgggcaggttttgttggactcagggatggagacacaaggctcagagaggccaaagacaacgatgtgaagtccaaagtcagacagtgactatgaggaggaggtagaattcaaagagagaaagcctttccattaaactgaatacagcaagaggtctgggctctattcccagaagggaaggtttctacacgtgccctatagaactctgcttgtccacctttcagagagtcggcgggcaaagactgtgccctgctccccaactacgaccctacacctccaacaatgaccctaggaaagcccgaaccttcctccctcccaagaggaaatgtgggcaaggaccagcttggttgctacaggcatcatgctccacagaaaattcttctgtccccaaacccccaaagtttatagggtttccaggtaccaagagcaatctctcatcattgcctcctggccccacgcacaaagggctgggtgtgtttccttacagccactctaaattatacagcacagcctttctccacacgaagcaaacgtctaggaaagaggagacgtttcacatttttctcccctaaatcccagcccagcctggggggttctaagcccccatctcccaactgggctctagacacacaccagcaatttttcaccagcatcgcccaagacattggtattctctttgcagcgactcgcctagagcacgctggccttgaccggagagaggtcattggccgctaagtttctgcagtttctgcataggagagtaccttggggactgcgagtggggggtggaggctacgctccggagaggtttcccgaagagtctacaccgcaactgacacttaaaacgcattccagaaatgccctccggctcggccacgcttcgcgggcaatcgcgaaccgcgatggagaaggcttcgtcgcatcccaaaggacgcctcccaccttcatccccgagcaccccgcagcagcccccggcgcggggccgagggcgtccgcgagaactaggccggcggccgcggcgagccctctggcgtcggcgtccgcgccccgccccgtccgtgtcaccgcgttctcattccgagcgctcggcccgggccgccactcccattggtcggcggccacgtccgtcagcgggcgcgccgcttgcggagagaaaaggctacattgtaacaaggcgaggagcgagcgagctgggaggaaggaggcggagggcggcccccggctcccgcggcggcggcagctacctgccgagggttcacccacctcgcggccacggcgggccgccccccaccccgcgccggcgccgtccggacccccgccccgcgcccgcgccgagacccccggccgcccccgcccccagccgccgctcccggcccccgcaccggcggcccccgcgctcgctggcaaactgccgagcgctctccgaagccattttcaatggccacattggctaccggggctgactcaccttcccgggaatgctgcggcagccgcggggcccgggcggcgagagcggcccggcgggcggctcggcggaggcggcgcggcctcggctggcggcccccgcggagggagcggccgcgctgcgggcgcgctggtccccggcgaggcaaagtttcagcgccagcctcggcgcggcggcggcggcgactcgctgctgctctcctcccctgctttgaccaccatcttattagtacaggaaatgacatggaaaacggaagaaagcggcgtttggggcagacgcggaccccccaattcaggggccggagccgggactcaccagccgcgtcccgacccggccccggagaaaactcccggggccccttaggcccgcgccctgcccggaggggggaacccggctctccaaacccaaagggagagggagcgttttataatccagcccgtggagaaatcgagaaaaaaatagatgaaaaaaagaaaaggttaagagagaactttcgaactgggatacttttttggggtcagaagtaaaagttctcaaattttaataaagtcattgtgaggggggctccctggctctcccggtcgcgtggctgtccatttggaaccaaatagtcggggggagtcgacgcgtttggatttttaaccctttcagggctccgcggctggccccctcccggtcccatttaaccctttgaatgctcagcagtttggagatacaaactgaagttgcgagacgcaggcgtcccgcgaaggctgagggtgaggggcttggggttcgttaaaaatattaactctttatgtggggttgcggttttgtagtcacgaatcgcacatgttcttcaagtcaaaatatgttacagagggagagagattctgagaactggaggggctggtccctggctggcttggaaaagatgtttaagcggcattcacttgctcgattcctcagtttctccatctgtgaaatgggattcgacatcacagagagggggtgaagagggaaagactgggccgggggtggaattgtcacagagtgcttgagtgcttgacatgctttcctgagcgcctggaaaactgacaggttgcgatggggctggaagccttggaggagggcaagggacactgcagggtggcgtaaccaggacaaccattccccaatcaacccctttctcgtggcgtcctctacaagtcctgtggcccaatggcgacgtctctcctaccaagggaggatgctctgtgcaagctccaaaattggggcagtaaaccccagttggtgattcccaggaaggcacctgggcgaggcgctgtccagtgctttccccaaacatccacgaagccctgcaagagttgcccagacggcccccagagggtactaccccagggaagcctcctcccaaggcggaaggagttccgtgtcaaccttgctgctggcgatccgcagatgggcgttcatggtcagatgggcgttcatggtcagatgggggtgctcatggcttttggaatctggatgtggagctggaggcggtgggggtgatgagg

SEQ ID NO: 915374 - DNA, 4001 bp, Homo sapiens
ccagactggttttgaactcctgacctcgtgatccacccgccttggcctcccaaagtgctgggattacaggcgtgagccaccgcgcccagctctacccagctctacttgttttgtgatggcactgaaatgctttttaggagtcctatcaggactatgtggaggacttaagagcaacacaaaagatcccaggtcctgatcttcagaaggggaagggcctcaccttggaacatccaggggtgaaggccccaggaactccaaacagcacacccttcttgcccttgaacagctctgccaggttcaccttgttccctggctccccttcaaacacctccactgctgggatggcatctcccacctagaaggaaggactccagggtaaggggggtgagggagccggggcaaaccagaggcaggaaggtgaacagagagcctggcagctgtgcctgcaggaaccggggctgaaacccagcaggatactccagccctgtcagtttccaagggccctccctgcccgctcccactgggttaccccatatcctccaagtttcaaggtggccctgctcctcttaaggggccattggtgacaacagagaaagggagggaaggtttccccatgtgtcgcaaagggttgcataacatgctgtctaggttacaggaaaggagtggaataaaatggacaggggctagagggctgtatttgggggtgaggaggagtccctgacaacatggagggagaggatcttggccaggtctgagggtcccaccctcaggaggaggaagaggaagggcagcggcaggtggaacgttgggggagggtgtccaggcccctacacccaggaggtgtagaacaaaagaaggaatcttttgaagggggaaggatccatccccagagtacttgagggcttcatgggaccagagtgggtagggagagagagtcagaggtgagggcctctgaggagcccaaaggttgagagcaggatgaagtagaaagggaatggggtctcacaaggtttgggaggagaagggggaaggtccaaggccctggggacggttccaggaagtgagtgaaagacagaaaggtgggaattcgccatggggggaggggaggtcatggagtgggatggggtaagcccccgcgggggcgctaagggacagctgtttcagaagataggggaaatcaggccgggagtggtgtctcacacctgtaatcctagcacttcgggaagccgaggcgggggggggcggggggggttcacctgaggtcaggagttcgagaccaatctgaacaacggggtgaaatcccgtctctactaaaaatacaatagctgggcgtggtggctcgcatctgtagtcccagctactcaggaggctgaggcagtagaatcgcttgaacccgggaggcggaggctgcagtgagcagagattgcgtcactgcactccagcctgggcgacacagaaagactccgtctcaaaaaaaaacaaaaaacaaaaaacacaatgcctcgggactgtcccgggaggtgaggcccccacgattggcgagaaaggtgggcagccacgagggccttctgaagggatgagccgggcgggcggaggggaggggtctggcaggcaggaaataaagcgatactctcagactagcgggacggggattgccatgggggtagtgggggatgtcaggcccggccgggccagcggtcaccttgattggggccatggctgcagcggctctgctgaaactgcggaccccgccagacgcccactctccttcactgtaccgtcttgctgccgctgccgcagactgaccgccggccccaccgacgagtatatagcccgctgagcgtctcagggcgcacacgccagctagtcccatacccgccccacggccacttccactccgcctcctggctggtgccaccgcagcaggcggggcaccgctagcggcacagcggcgacaccctgcggaaggcgggcctgggccgcctccactgcgcaggcgcgagcggccacccgcagaacagagcttccgggacccacgcctcgtttgcactgggtgctggacagccgacgcaactacaaatggggcggagctttcggcactggagcagctaatttgcatataggaatgaggtgcggctcggcttccatgggcctaatttacagatagggcggtatttctgccccttaaccgaaagtgggatacagaggacgacggtgttaggcgcctgtgtaggagtaaaatgtgtttattttgcattcaacgagagctcctgcattgcagctattttgcatatgatttgcatcttacgaagaatttgtggcaaaaaaaagctgggcgtgcgccgtaggaacctcctgctgagacgcttccggtagcggcgcgtgacccgacaggtctttcacctacctacctcagctcccacaaacacgagaagttccagcaagttcgccacttccggttctcctggctatccaatagcatcgagaggagcatccccggaagtgaggcagcggaggacgacctttttccggttccggcctggcgagagtttgtgcggcgacatgaaactgcttacccacaatctgctgagctcgcatgtgcggggggtggggtcccgtggcttccccctgcgcctccaggtacccgccggcggcagtcttcccttttcgggcgggatggtgggccggggtccagtgcttgcctaaactcctccgccctgcaggccaccgaggtccgtatctgccctgtggaattcaaccccaacttcgtggcgcgtatgatacctaaagtggagtggtcggcgttcctggaggcggccgataacgtgaggatccttaccccgccccagcatatcccggggaatgcggggcgggcacacctcagccgggctgaggcgggagttcgggatgcccggagataattttggcctcttgcccacagttgcgtctgatccaggtgccgaaagggccggttgagggatatgaggagaatgaggagtttctgaggaccatgcaccacctgctgctggaggtgagaagcggcccatcacttgcttcccgggccacctgcctcccgcactgaggctgccagtgctcagctctgtccctccctgcccgcaggtggaagtgatagagggcaccctgcagtgcccggaatctggacgtatgttccccatcagccgcgggatccccaacatgctgctgagtgaagaggaaactgagagttgattgtgccaggcgccagtttttcttgttatgactgtgtatttttgttgatctataccctgtttccgaattctgccgtgtgtatccccaacccttgacccaatgacaccaaacacagtgtttttgagctcggtattatatatttttttctcattaaaggtttaaaaccaaaagcggtttctctttgcagcaaatatacattaaaatagagtctctgtacagccaagggctctgggccctggcttgccccatgtccctgcgcctccctggccaaacccaaaaataaatatagtgttattgctctgcagggcatagaggcagtgctctcctaccccctgaggaggctcgttgggagctgatggggaagccctggccaccccaggggtccaggggctggagtctgcttggagttattgcttcaaggggggacactaatgcccaatgcaaatgatgagaggaggagcgaagggggcatgggcctttgctctccaagtcccactctgctttgaagagggggtaggattaagcagcagcaaaagcatcacccactgggagactctggcctccatccccttccctccctgagataggtttctgcctcccacgcatcccgtgcagccccctatggcttccgcaaggccccctacactctgggggcacgttatggcttgcaaggggcagcactgtgcccagagcctggacacacgttcccagcttctgacaccccctaggagggggaggagagggcgtggggcctgttcccaggggctgatggc

SEQ ID NO: 915375 - DNA, 4001 bp, Homo sapiens
gaagttgtggatggaaaccaggttgcccctgtagcacctccggcaagtaaactacagggcaggataaaagacaaagaatggagcatccttcctacatgaattcacatgggtcttgagtccccacaattcattccctccctcccctgccacaaccatttgaaggttggagaccaaaatgcaacttctgtttgtaggtggccctcccctcttaccccaacacctctctgaggctcaggttctactgacacccccagggccctcaatgggaaaaagagccagtgatagcaatgctgggggcatatcccacacccgttccatgctcccacctcagcctcagccataggccactcacccaagcttgactaaacgtctgaagacttctcaccaggaggtagcggcaggtctggcacccagggatgcccaccacttttactgtgtcctcttcctcaggacacgtaaggtttttgtccaccatatctggcactgagatagactcaacagccccatctttcttggaggcatcttcacttccagagccccactcctcctcttcctccagctccctgcaaggggtctcctccatctcctgctctggtgtctcctcatcctcaggcagcgtcttagcacccaaaggggtctcaaaggtggaagtctcagaccctggcagggaggatagctaagtgtccttccttcacatctccccttgttcctccccagaaccacagacagctcacaccttgccctgggcatcagagtgctcaactctgcctgggaaggggaacctggaacccagtctctatgaggggaacccaagctgcctgacaaggtcaaggtggttaagagcatggacttagagtcgggcagtcatgggcttgggtactggttccatcatccaccagctgtatttctgtgaaatgggtatacaataccacctacttcatggcgatgctaagagagttaaaggagagaaggcactcagtaagctcaaagtaagcataatggagaaaggacaaaattgggaatgtcacagtagaaccaagaccacagacataacagacgccttgagaaatcctttcaactcctggccatagagtccccatccctttaagcacacagaaattcagaaatagaagacgatcaaagaagggggtgggtgtgtaactctgaccccatctaccatagaaagggaaaaaacagagaaagaaagactgaaggcaaaaaacacttacttagatgaagagcagaaactgccccaaatagaagagccagaagtaaggggagtttcatcttggctttatcctgcaacggagaacacagtttgtcattgacacacacagacacacatgcacacacatcacaatcacaccattaggggaccgtgggagtgaggtggagaaaaagaaggcctgaatagaaatcaggatgggccagaaaagctcatgccaagcccagctcctgatgctccaggatccaggacgcaaggacctctttctaaacagaacgcagcaaaccctgaggggtggctgaggctggctttccttcaggcccggaagtaaagaagggactattacgcttatttgtttgtacttaatgggtccctcagagtctatgacataaaaaaggcgggagaagcaatgattattggctttcctaggaacacataggacttagaaggtatgtcccctcctcagagttcaagaagccacccacaccctcctccatgtctccaccatctcctttccccagccaaggagcactttcacatcccgcagaaggaatgtgcaaggcagaggatgaaggctgcccctgctgacatcctcataacctgaaagccacaggtagacgcctgccagccctccagaaactgtcagccacagccagggacctcctgggagaataaactgtcaccagctccaccacagcagagaaagcactcacccacccagagaccttcctgggtctttagatcttcccaaagcccaggtccttctttgcttcctctcacaaagacttcttatatagaggccttggaggaacttcccccagggagagagagtttgcctctgtcagagggagatagcaaggctgataaggaccatttcatcacttccctggggagcccactcattcattcagtgaagatttctctcccgatacccacttcaggaacccaggggccatctggaacagctctgggcaatggttcttatcctgggctacacttcagaatcgccttgggtgcttttccaaaatacatatctcccctgttttactggtgttttgaactgccacaaacattttgagaacaaatctgtccatacctattaaaataaaaaaatgcacatttgatcagtttcactcttttgagactatcctttaggcataaatgcgcctataagtaataaaacttttacagagttatgttattccttgactatttgtagaaatgaaaacaatattgatatccatcaatcggacactgagtaaaatgtgtcctctctattctacagaatgttatatggctatgaaaagaagagctggacctgtatctataaacctgaagagatgtttctgtgacatgaagtgaaaaaaggcaagatactgaggaaagtatttagtatgtgaatagttttacaaggaaaaaaaaaacccccgcataggtgcttatctgtgagcatccttatgtgaccattgatggagggaatgctaaaaggaatcacaccaaatagttgaccttgttgcctccagaagcaggggaggagagggaagaaagcaggagacagattgttgtttatcttctttttataactttgcatttcttcagtggttatggtaaatgcgtgctgaatctgtaattttgaggctgccttattaaagatttttaaaaatatgcagatgccctgcccagaaacttctgcttggctaataggtctagcgtgaaggtcagatgtctgcatttttttaaaagcttcccagctgactgtgatggaagatgggtctaggagtcactgtcctgaggatcttcaagtacaggaaatgttcacgtatgtctaacttctttccttctgaatcagaccactcagttggccaacctaccagccttcattatggtaacatttactgaacatttttaaatgccatgcatggcaagtggctggatgcagtggctcatgcctgtgatcccagcactttgggaggctgaggtgggtggatcttttgaggtcaggaggttgagaccagcctggtcaacattgcaaagccttgtctctactaaaaatacaaaaattagtcaggcataggggtggctgcctgtaatcccagctacttgggagtctgaggcaggagaatcacttgaacccaggaagtagaggttgcagtgagctgagattgcaccactgcactccagcttgggcgagagagtgagactccgtttcaatcaatcatcaatcaacaaaatactgttcatggcaagtattacctcatttaacctgattttaaaaacctagtgaggtaggtggttgataccccattttccaagtgagacaacccaggctctgtgtggctcctgatctccccgcaacactgcccttattggatcgatgccctgtatacaccctcttgtagctccaggggcttgtccttatcagttagtcattttacttttcttgtgagattacttggttaatggattaacatctgtcttccttcgtgatggtgaaggctgcatctctttactcaccattgtatccttggtgcttagtacagtgcccggcacatagtaggtacttaataaatatacattgaagtaattaatggttaagtaacgtactcacgtaaacaacagggttagaattcaaatccagttctttctggcaccaaacttctctcccctcccatatgcctgcttgtgtgtcaaaaatgatgctatccaggtggagataaaatcagagtgaagcatagatcctgtattcaattagcttacaacctaatttgtaagatga

SEQ ID NO: 915376 - DNA, 4001 bp, Homo sapiens
caacttgcccaggtaacacagctaataaaaggcagaaccagaatttaacacaggcgtttctaacaccaaagccttttgtttaaatcggtggttctccccagaccaacaatatcatcatcacctggggatttgttgtaaatgcaaattctcaggcttcacctcagccctcctaaatcagaagtcgtgcaggtgaggcccagaaagctgtgttttaacaacaactccaggtgattctgatgcatgcgaggctttgagaaccactagcctaaatgaatagggaacagaagactgaatgtactctcttttcccccaggtcctccgcagtagcctccctactacttacctgagcttctgcaaaagttttaggagtccgcaccaataggtagcggcagatcttgcaccttggacttccctgcacttcaacaatgtcttcttccctggggcactggaagtccttgtctaaggcagctgggtccgactccatggcttcctcatcctcaaagttgtcttgacaggcagaagccttgacctcctctccctctgcctgaatcacctcctccgtcagagccaagtctctctcctgctcctttgaactatccagatcctggcctaggtctgcctgtgtctctaggctctccagatggggggcatcattctctgggaagaagaggtaacctgccatcaggtcaagagcttcctagttccagcaccgtggacagctccagcaacgtcgctcgagctttcctaggaattccacctgaagacaagactggaggatttccttggtgttaggtaaggagagatctctcgggtcacacccacaaatggacaagaacctgacttctggccgacaccacgagtgtgtgttttgaaggtgggagaaagcacgtgtgagaagcctggggcagtcaccagcccttcatcttaacaggtgggtggtttttccttctgaaagttcaggttacagtttgccgggtgcggtggctcacgcctgtaatcccagcactttgggaggccggggcgggcgaatcacaaggttaggagtttgagaccagcctggcaaatatggtgaaaccccatctctactaaaaatacaaagattagccaggcgtggtggcatgtgcctgtagtcccagctactcaggaggctgaggcagaagaattgcttgaacccgggaggcggagtttgtggtgagccgagatcgcgccactgcactccagcctgggcaacagagcgagactccgtctcaaaacaaaacaaaaaacaaacaaaaaaaaaaacaaaaacaacaacaacaaaaaaaaatcaaacaaaaaagagaaagttccaggttacagttctgagtccaagtgatatcttaccggagatgagctgtatcagctaaagagggaaggctgtggtcctggcctcatgagtgcaaataaaagcggggggaggggagtgtaggaaaaaggaaaaaagggaaagacgcatgaggagggaagggagagacttacccagatgaagagcagaaactgttcccagcaggagaaagggcaggagcaagaggcattgcatatctactgtcttttagcgaggacactactccaccgtccttcttggggctgtctttgtgtgtctagtatagcccctggcacatagtatagagggaatatttgtttaattgtttgattaaagagcaaacaagattgctttctcctcttgccatgaacagaccctgagctggagagtctagaaaaggaatggtgggagggataactcaggtaccaaatttcatttgtcttccagtctccgttgctgctctccagtatcacccttagcccagactcctgcccctgcggggacaggtctgcttagctatgatgttcctaaggacaggcctcctacgtgtttgccctatgaggtgctgcttcttcccagggcctacactggtcctgcctgggcagccagaaaagaactcaccttccaagagtctgagacctccactctcagtgcctctggcttcaggggccagaagcagcctttatactgggtttttggggaagtgggaagaggccagaatgattgctccaggacagagtgggggacaaaggagctgataatgaagtttgctcagtcttctcaaccctgtgccctgctctctgctgggactgcagggacctgcctcctggggcctactgccttgtttgggtaccccacaccctggtttgcttcagaaggccctagatgttatgtccattgtccaggcataattattatttatgccccctaaaatgccccagtctgaacaacacgccttaactccaggagtagcctcctgctggtggaatcccagagagtgaagtggagatcccagggagctggtgggagacaatggggggaagaaacaagaggggaaagggaggttcagtgctcccaagctctcacccatcctaggggcatagtgtgcaacacacccctcaccctcatctccgcatcatctccaccaggtaccacccctacttcacagaggcaaaatgtgagattcagagaaagagagaaggcaacttgccaaggttccatgggaagtggaagaactggaatttctaagtctttttgactccaaaaccttctctctttctttcctctctctcttttttctctcccttcctctttctcatcttttttttttttctttttgagacggagtcttgctctgtcgcccaggctggagtgcaatggcaagattttggctcactgcaagctccacctcccgggttcaagcgcttctcctgcctcagcctcccaagtagctggctaattttttgtatttttagtagagatggggtttcactatgctggccaggctggtcttgaactcctgacctcgtgatccacccacttcggcctcccaaaatgctgggattacaggcatgagccactgtgcctgtcctcatcttttttttttttaagagacaaaatcttgctctgtcacccaggctggagtgcagtgctgcgatgatagttcactgtaaccctgaattcctgggctcaagtaatcctcctgccacagcctcctgagtcacagggattacaggcacaagctttctcatctttaatgtgtgaaaaatctacatcctttcttctgtgctgtggatctagatcaaggttcctcaactttgtgctattaatatgtgaggtcaaataactctttattgtggaggggctgtcctgggcgttgtagaaagtttaatggtccctctggtctctactcaccagatgtcagtagcccctctccccacccccgcagatgatcaaaaatgtctccacatgtttccaaatgtcctctggggagaaaaatggccccagttgaggatctctgatctaggatatgccaccttgcccaacctcaaggcatagcttcagggctggcaaacaggcagcatgaaaagctccatacagagtctctccagcactctgtagatcatcctctccaaccaacactcccctcctcacctcccatctcccaccagtcttctgtcaccccagggtctggactagaatcaggcaggggaggctctcaactcagacacactaagaaattaaggggacactaagaaatttactattcaagataaataacattttaatgcaacatttcttaaaaattgaaattaatgcaaaacaaaacatcaaaattttaactgaccaagctctagacaaaatttgctgcactttaaagagaggccagcatgtctcaagccttgaatttgccagatgtctctgccaagagctagtggacttgtcagggtgaactcagaggcatccttgtgggatgcttctcagaactatgcctggcacatgagtggagggtgacccttgtcaattaaaatgtgcagattggtaggaccgggcacggtggctcatgcctgtaattccagcactttgggaggcatgtgcgggtggatcacctgaggtcaggtatttgagaccagcctgcccaacacagtgaaaccctgtc

SEQ ID NO: 915377 - DNA, 4001 bp, Homo sapiens
acgcagctggtaggggaggcctaggcatgaatgtcaaccgaaaagtaccctgagtaaaaagagggccaagaaaggaatcctggaaaactcaacttttaggaggtgccaaggaaagaaaagactaagaggaaaaccattagttgacactgagtaagcacctacagcaaggactatactggatgctaaaaaaaaaaacacacacacacactcacacaaaaacaacaacaacaaaaactgcaactgtgtgttcccatgaggaaagtgtttaaagagcaagtggtcagaaggatatttctatgtgtcactggaggctagaacccaggactccgtggaaactggagaaattgtacgattccaggttccaacatttgtcttattccttgtaactgccttcccacatccaaccgcttccccatcccttctcacggagtctggttcgggtgaaattacttttattgatggtgagcgcaagcaggtgtgagtgactgcacctctttcagaggacacaggactgggcttaaggaagggagggccagagcgcccgccttggtggatgtaggattcgctccttattagggcgtgagtgctacattctgaaaggatttattttgggacaaggcacaagcacaggggaggcaggcaacaccagccctcaggctacactctccatttggagcagagcttcttcggcagccccaggtctcccgggatcttcctcggtgtcctgcggaggctctggctccagcgtgggctccagcgcaggctgggcttccggctgggcttcagcgctccggccaggcccaaggcgaggcggcttgaccggggtgggcggtggcgctgcagggcctttccggcccgaaagggcccttcggaggctctgtaccttctgcaatccggtgcgccgcagccgctgggccctggactccaccggctcctcgtccgagctctctccaacttcggcctccagctgctctgggcccagctcggactggtccgccgggcccaagggctctggtgccttctggaaagcgctggctgggacttcaccctcctcctgcatgtgacggacacagcactgatcctggcagctccttacccccagcagcccgaaactcactccttaattacacaagggaaaccttttacctccgcagccagagtctggggggaaaggcaggcgtgggaaggtaaggggagggaaagctgcgtgcgaactgcaaaacgctgtaaagtaggtgaggcctggtgaggggcgagaagaggatagtgcccgcagtcacggaatgccctttcaaccaccgttattttagggattggctgggactcagaccaaattctgcggacgtggcctgagctagagctgggcgggcttggattggccaggcggggctcaggcgtgagagggagggatggggctgggtcttgggaagtgggtgcggctctgtgagtctgttccacagcaacagacggcgggaggggtcaggaatgtgggtgtggtaggtggatggaagcggggagcccccagctggtggcccacaggccggcaaaggcctcggattggggaccgtttgaggtcactgaccttgaagagcagaacgtggagcttcccgcgcgccaccagcagcccgtggttggcctccagccgctgcacctgggctgcgcggcgcaccgcgcgctcttgggcggcgttggcgtgcgagctcacgcgctccgccttggccagcagctgcgccaaggtgttgctggtggtgtcgtggctgcgactcagagcgcccaggccgctctggatgcggcgcacggaccctgccaggcctccctgccttcgagccaggcctccctgccgctcccgcagagtctccagcatggaggccagcttctccagcagggtcaccaccgtcacggcgtgcacgggaccccccgccggcgcctcgggcacaggcccccgctccaacgcactctccctcatgatccctgaccgctctgctccgtctgcctgcaactgctggccgcactacggtcaggggcctcctttccctggctcctccccagctccagctgtgactcaggcaggcggagttggccttctggggcggcgggagggcgcgagggcgtggggatgttggcagcggggtctcttgaaagcgtttcgccttccgctgtcccgcgccgggggcctgctgggaagcctgttggccccaaatcggccccctgcaaaccctctcactctgagtttgagttaccctcctccgctccaattccctggtgtgcctgtttcagttctccactgcaaagggcgagtcacggaaatttttatttcatgcatcttagtgggcgcagagactgtgttggcacggcaaagagataaccagaggggcctccgtcgccgtccactttcggcctcccacaccagtgaagattgcccccaggctggatgcaggcgacagggaggccctggaacattctgcttacagatcgcgaactgtcaaggcccgaggccccgctttgtgacttggacaggctgctcattgtgggctggcgggcggggcatcctctggtgttttcctaatagtcatctccagggtttagcctcaggcttcgtttcctgcttctttatttcgtcctcttgggtagcattatctggtttcttttctctagttttctgccctctctttctttgggtttcactggtaaatctcagccgccccggccccagcacccaagcttggaggataagcaggacaccttcacctcttttaaaatccttaaaagcgttagactaggcactggtctttgctttgatagaggttacttgggctcctgcctgactttttttgcttgtttgtttgtttcttgtgttctgtggaactgcggagagtaaagatttgaaattgctgctgcagagagggagagagtgggcatggaggatccagttaatgatgtggattgtgaatttctaatgtcagcagttcgaaacatcccatgccttagccgggcgcggtggctcatgcttgtaatcccaccactttgggaggccgaggggggaggatcacgtgaggcagggagttccagaccagcctgggcaacatggcaaaaccccgtctctactaaaaatacaaaaattagcagggcgttgtgacacacgcctgtaatcccagctactcgggagggctgaggcagaagaatcgtttgaacctgggaggcagagaatgcagtaaaccaagattgctccactgcactacagcctggaggacagagcaagactccatctcaaaaaaaaaagaaaagaaaaaagaaaatcccgtgccttgtttgtagcaatacttggcaaaccgtctcacaaatgcaagtaatccattaatcctgatgatctctctccctcttcctcttctcactgaacctgtgagggccacttgttgacaactgtggaagaaacttgtgtcactctggaaatagttacatgggcctgaagtgccacagacgtgggcagctaatgccagaaatctggtgatgctaagctgatggctgatttctacaaatacaaggccataagcctgacccctgctgcttaatacaagagaaaataagctctcttgggaatctggtgggaatcaccatctcttccagtgaaactacatttacccagagagatccatcagggatgtaccagttaaaatgctttcagactgagggaacaaaaactcaattcaaacagtacttagtaacaggaaactcaattcaaacataattgaaaaagaggattggtagagtggtgattaagtgtgagtcattcacagctccaaatctggttttctacagttctctccactgctcaactatgagccccatcccgcacctctcacactcccccatgtcccccacacaccccctacccatgtgtatgtgcccacatacgcacaggtgtcagcttcattccaggcctcacaactctgcacaagatcttaaaaaaaaaaggggaccatcttaaaatttaggacatttat

SEQ ID NO: 915378 - DNA, 4001 bp, Homo sapiens
gacctcaagtgatccgcctgcttaggcctcccaaagtgctgggattacaggtgtgagccaccatgcccggcctagacatctattcttgaatgtctatcaggtctctcaaacccaaacttctagtattcctctaccaaacctgctcttcccagtcttccctatctcagcaaatgctcacgttaaaaatcttgaagtcggctgggcgcggtggctcagagcctgttctagcactttgggagaccgacacaggaggactgcttgaagccaggagttcaagaccaacctggccaacatagatttttaaaatcttgaagtcgtccttaagttctctttttcttttacaatctacctccaaaccattagcaaatgatgttggcttcaccttcaaaccatatctcaaatttaccatctcctcctctattaatctggattattacaacagccttttaactggtcttccggctttcacctttgcctccccacaatctaatgagcagccactgatcctgttaaaatttaagtctctgctctaaacccttcaatgacttcctatttcactcataataaaaaccatagtgccttccaagacctacaaggtcctacctaaagaatttgcccctaccatacacacacctttctggtctcatctcacctctctcccagtccctctccctggactcctggttgccctgtctttgccttctttggaatgctgctgcccaaggtatctccatggctggccccttcacctggtctttgctcaaattcaccttcttagtgaggccttctctaatcactgtatttaaaatagcaattgtgcgtcccttgatactacttattcccctaccctctaacctttgtttatttttctccacagtatttatcatcatccgacacactacgtattttacttgtttattccccccccattagaatgtaatcttcatgaaagcaaggacttcgatttgttcatctgtaacccccactgctcacaacaatgccaacacaagtagaccttcaataattaattgaactaattaataaataacataaattatagtcgcccgttgctgcacctgttcccttactggactgagagctttctgcaagcagtgacacccttattcacccatgaactcccagcacctaacatttgcgctcggcacatagtaggcattgattttaaatgaatgaaccaacaagacaggcctatgaaacatctcagcctttcaaacacagtccctatgctatcattccctaaatatgtcagtgtgtgggggttatccgaaggaagaggttccaataccaatttccacgccctcacgcgtacaccctctgttatccctacaatacccaagcgagaaaatgagtaacggtgacagccagaaaatgaatcctgaaccgtgcaatgacaagtccgaaggagaaagcagttgcgatgagatgaaagaaggtagcgggactcaaaacagaaacactgtcccgggggtggtggcaaggagagggaaaggccccagtggccacaaccatagagtcctgctctcttttgacagctaaggaaactaacgcccagagaggaaagcgactcccccgaggtcacacagcaagtgagccacggcgagaacccacagcatcccgcgtccgcgcgccgccccagctccctcgcgtttggggtggtgtcctccgcgcagagcccccaccagcgcacgtgctccgaggtccccggacgcccgcccgcccacggctcggggccggctccccatctcggtccaacgctggggtcgacggcagtgcgctgcgcccgcctcctgcgcccctctcagccagcccgggagcccgccaggggccggcggctggcagcgctcaccgcgaaggtgggcccgggccgcccgctctgcgcccgccgcttacctggcagggtcccgcgggaacctgaagaaggccaagtcggactgcgtgctcttccgcgtgcagttgggggcagcgcagaagttcggcatcgtcgcccgcccgccggccggcccagccctcccctccccgcctcctcagggcagtccgcccgcccgtcggggccggggaggggagccaggccggccggccggctcggcagggccgacgcgcgggggaggggcgggcgggctagaagccgcgagggccaggaggggtgccgcggtccgaggccgggctggggacgcggctccacagtgctgtgagcggccgggaggatttaccgccgccgccgccgctggtgcacctcccgcccgcccgagacgctgccgcctccttcccacaatgcaccctgacgcccgggggtgccctctcttccctcagccttcctcccccgcccctcctttccgccttctcagcaggcgggcacgcgcaaggaagcgcgcctgccggggtgtggcgaggcggaggcgggacctggcgcgcgccgccgcagtgcgactgcgcacagtctaatccgcggggagagagaattgcgcatgcgcgcctgtctcccgggacgctagagcaggcggttcctgggctgctccggtaggtttggcgtgcgcgggtttctgcagatctagggcgagcttgcacgttacatcaccgatgcatctcttcttgcttgcttaatttgccaccacttaggcctttcttgcagaattcgccatatactccttaagggccgcggaatcggagcgaccttggtgactggcaaactctcggcagatgtgcgtgcactggtttgatgcagacgtggttgtaggcgatttaatttttcccagctttgcagcgactgttggcttcccagaacggatctccccagcctcgactggaagctgagggacaaaaattcataaaagcaattactctttcccggcgaggcttctagaagagcaagaagagcgatatgattacacctgcagccctataaagattgatctgtccgtctttcccttacagtcgtggcctgttaaacgttcctgtgttgttcagtgccagaatgagtgaccgctatttagaacaaaggattagtatcaaattttgcgtgaaattgaacaagtctgcaagtgagacccaccatcttttaaaagaagcttatggggatgaagtcatgtcaagggccagagtttttgactggcacaaaaggtttaaagaaggacgggaagatgttcgagatgatgcccgaagtgggcgtccagtcacccaccgaacagatgacaatatccagaaggtcaaggacttggtttgttcaaacaggcagttaaccgtgaggatgatggctgaagagttaaatttagacaaagaaactgttaggctcattttgaaagaaaacttgaacatgaggaagatttctgcaaaagttatttcgggtgttttgaagggtgagcctaaaccacgaaaacttgactttcggtccgatctttcaaaggaaactaggaaaaatagctcatgtttgaggaaaaaggtaacaggttctgaaacatggagttatctccagggtgaagctggtggggaaatgcccctgccggtatcccatcccagagtccactactctgccagtcagcttctgcaggcgtcatcttcaacaagccttccccccagggtagctgagaattggttcaccccatggtgagaggaatgtgagttagctgaaccagaactaggatgctgcctcactgttaggcaccttctttggctgctcacgtatttttcagtcttcaccactcctccctatgtgccatggccctcctcattactctttgctggactcttggaccattttccttgctgttctccataactttgaaaaacttttggctgttcccttctggtatttgcttgttcttgatttcttttgctcaacaagtttggatttcttctctgcccagaccttagcttgttgtggctgtcctgttcctttgttctcaaccttctgcctcagaggatcatgccagtgagaagagaggaacaggatctcctggaatctgtatctctgtgcccagggaagc

SEQ ID NO: 915379 - DNA, 4001 bp, Homo sapiens
accaattatcctttaaatgtcaaagtgaatttatttgtcaaataatatcactgattttatcaaaaggcttttaagagagttccctttgatagagtctgtttctctcaagtcatacaatttctctacttgagattcttttctcctctaagtgtcaactctgctttcagaggctttgaactggcacagctcaaactgcttttagaaataaagcataaaatgtaattttacagctggcatactccccaagtgccttatttcaaaagtgatcttgtagtattcccaacgtacttgcatcacagacactgtgaggatcaatcctctttattatgtgacatgcaaatctgaaggctacttaaagacaggaatacacagcagagaagctgtataccttatctatattcctaacacatgtggagcattagttttccacaaatgtttaccgagataggttatgtcgactatttatggaggctatcacagccacggtaccactggtgctcaataaatattttatgacaactagaatatatacaggcattctatctacccaatggggctacagatgagaacactaacgcaccaccactcagcaccatgcccagatacagggaacactggaaaatgtattaaagtaacaccggccaatgccaaccgggcctctttcatgcctacttgcctaggacaggagccaaagcttcccaagactaacaggcagaattttaagtggcaagaatgtgagtttggaaataagcacaccacagctttgtgaccttgagcaaattattgatactacagtctttttccttaagtgaaaagtcctacttaagtaaggtgaacttccttcttagactatggaaaccgctcaaataaaaaagaaatgtttcacctgagaagctctgtactggtcaaagaattagcatggtaaagccggaaggctccgtagggattatctagttcagggtggctgccaaatatgttactcgttagtagtaactcgttagtaacttcactgttacttccgatcttgtcctcataaaaacagaatattcttagaccccatccctgacttggaaggattcaggtgcagagttcagtatcattttgttttcagcgtctcaagtgacaagatttgggaaccacagattcaatgcactaccagtcaaaagcttgcagtacaaccggccttccagttcacggttccccctctctactaccgagggtcctccttctccacaagccctcaccccagaccagtggttccagaattcaaagacaggccactctggcttgcctcccgcccgaaggcgttcctgggcacacagaccccacgcgcccgggcaccctagggcagaggccaggcgctgaggcggacgaacctgttacagaacaggcagggggtctgctgcttgccgtgggggagatctgcatcgtcctcatcctcccaggcggcctcgtccccgctgtccgacagttctggcaggtcctcctcattctccacagcgccccggccgcctaacacacacacacaacaatcagatcggcctcggacaccggtgcggcccgggggctcgaggagcaggtgacgatgggctctcctccgccccgttcgcccgcggccctcactcagcacctccttcatgatccctgcgagccccccaccctgcccgggcccgtgtcccggagggtcttccaccggccccacagcggcgcggcctggggctggacgagccgggtgctgaggggccagggtacccaccggtagcgcctgacgctaacgagcacatggctgtggtgccccgagagcccggcgtgtctgggggcggggaccgggttgggcaacgagcgcgcgcagcggccgccgactccaggaacgagcgcgagcacaagcgcgaacccgcggcgggacccgggctccggaaacttcgcagaccgccgggaacgccgaagcgcgcgcgctggctcgcaatcgcttccggcctcgaggcgccgtgcgggtcacgtgaggtgggggcggggcgagagcgggggctccgcctcctcctgccgcagggttggcgcagtgcgcgctgaagaggcgcgctgatgacggttaatgttgcagcccggaagatgacttttgtctcctccttgggttgcggcaggcgttagtgggaggtcgcggcccgctgctgtgagccccaaggcagagagacgtcgctgcggttttggggttggcatcctgtcctctgtgcgcccctttttcctgggatgagcggttagcggaggggcgatcggcccatgacgccctctggtggcggaggaggccaaacgctggaggctcggctggtttctgggctcccaggtcctggagggggtgcagctggcgagagggaacgaactgcatgggccagggtgggtctactgcagggacagataggtgtcaaaccccccaagacggattttaatctttggttaagtgagaacgtgaactctagaggcagcctgctgggtttgaatcctacccacgtcactttgtaactgtgatcttgggcaagttactcgacctctctctgcctcagtttcatcaaatacaaaacaaggataataactgcacttgggcagggcacggtggctcacgtctatagtaccagcactttgggaggctgaggcgggcggatcacctgaggtcaggagttggagaccagcctggccaacatggtgaaaccctgtccctactaaaaatacaaaaattaaccaggtgtggtggcacgcgcctgcaatcccagctacttgggaggctgaggcaggagaattgcttgagcccgggaggcggagcttgtggtgagccgagattgtgccaccgtactccagcctgggcaacagagcaagactccatcttaaaaaaaaaaaaacaaaaaacaaaaaacctggactaacttcagaactacagtaaggataaaacgagttaatacatgtaaagtgctcagacataactatttaagccagggagtgatgctctcagatgtgttgagaaagtaacaatctggctgctgtgtggggaagaacacaaatgttcccctgcctgcctcatgccacgtccctttcttcctttccttatatctcttcaaaccatagaacttttttttgtttgatttttgagacggagtttcgctcttgttgcccaggctggagtgcaatggcacgatctcaggctcaccgcaacctccaccttccgggttcaagcgattctcttgcctcagcctcccgagtagttgggattacaggcatgcgccaccacgtccggctgattttggatttttagtagagacagggtttctccatgttggtcaggctggtctggaactcccgacctcaggtgatccacctgcccgcgagccaccgcccggcccagaattcttgcttaggagggagtgccccaggctctagcagagtttatctaattggcctatcaggccctgcataatcctgcctctttccaatggaacccttcaccttgggtcccacccttaagccttttatttactgctaatcattgaatgttctacacatgggtaggtccctttggtctcaaccagaaacactttcctcaggccatttctaaaatagtttccaccattatttcaggagtatcctgttagtttcttagcacccaccatttgcttacttgatttttttttcttttttggtgataccccacagcactgaacaataagggtaagtaagggccatgtctctttactttcatttctctggcacataatatgtggcctggcccatagtattaatagatactgaatgtattcactgaataaaaatgatgccttatattattgctaaatgtacttctaaatgtacttttctcccttaattgtaaattcctagaggacagaatccattaaatattagtttttgtttttgtttttctttgagacagagtctcgctcggttgcccaggctggagtgcagtggtgcgatcttgtcccactgcaacctccacctcc

SEQ ID NO: 915380 - DNA, 4001 bp, Homo sapiens
gtgactcaaacaattgtgggaaacacttatgtttaccagtttattgtaaaggatattacaaaggatacagatgaagaggagcataggatgaggtatgggagaagtacagagcttcccatgccttccctgggcaccccaccctccaggaacccccacatgttctgctatacagaagctctttgaatcctgtccttttgtatttttatgaaaacttcattacaaaggcatgattcaataaatcactggtcactagtgacgacttcagttcctctcatttccccaggtaaatggggggtaggactgaaaatcccaaccttctaataccctttagtcttcctaggtgaccagtccccatcctgaagctattgagtctaccagctaccagtcaactgattagcgtacagacacttatcacctggaagattccaaggagcaaagtggcaatcgctacaataaaaatatttaaaaatatttacatggcacatttgcatggcacatttctatgtgccaagcacaattctaggcatacagtacagtaattcatcttcacaacaacccgcaatagaggtatcatttacactcttgcctgcgtagactgtgcaccccttgaggataaggattacagctggtctctcacttccagtacaatgcagatgcccccagggcactcggtaaacatctaacaaatgagtgaaccatgccaggaaggatggtgctggggaacgtaaaagagagcttcccgaagattggaaggaaacaataaatgtgaaggtactttgcgagctgtaatttcttcaaagtgagggattccttttccatcatttcccttccttcttccccctctttggatcaatgtacaggttctgagaagagaaggaagtgaatagcaaaagggaggggaaacgagtaatctgatgaaacaacgaaaagggaaaggaaaatgtctgtacgtcatgataaaatatcaaagggaaagatagtggaaggtatgaaaaaagcatggattcagggtccaagatccgtgtcacctaactacgtcacccagctctgccactgactagctacgcatccttagataagccccgctcttcctgcgccttgcatcctcatctgcaaaaccaggatctttatttctcctttagggaattcttgtgaggataaaatgagatcatagacttggaagcgcgttgtaaaccaataagggcttataaatgtgcgctgtttttattagtcatacagtgtaaggctgggagccagatacctggctgccagccttgcctctacctctaactcatcatgtgacctttgcaaattgcaaaagctccgactatccgagcgaggcctcgcaaaacatccactgcaatgctctcgattttgcagatggggaaaccgaggcccagagccttgagccaattcataaagccaatgggaggcggaccctggacaagacctcgagttttctgactcctacattaaggctgcttcccttgcaccagctctctctgtccagacctgtttccactctgtagaatgaggcgaccggcctcagtaatgtctgcgacaataaacctcaggcactatgtaaactgcggggcactgcgcaaatgcaccccgctccgacggggggggctccggtgctgacaggccgccgctcggcctccggagcgccccattcccgcctccaccccggcccgggcgccgcagcggaccgcacacgctcccgcgccgctctctggcctcctgagacccgcgcttggccgcagccaacactcactggagcagattagggacatggcgccgtcaccgtgctccgaggcgccacacgccgggctccgggactagcttctgagcctccgcgagccacttccggtcccccgctgctgccgggactgctccgcggcgagctgggagccgccagccgagcgatgctagcgtagcgcttcacgtgggaatggggacagccgcgcgccacagccttcagcacctaacggaaattgccctttcccagaatgcagccgggcaggaaagggcccgccacgaacactcggttatttccggattgactcggctcgttccgtaaagcgccggaggattggctggggcgtcgggagagaggaggctcgaaactacatttcccatgacgcagtgagaatttaaaaccaaaacaattggacagcacttgttttgacaactgtgcggcactgtgccacgggaccctggtctttgaaaccttggcgtgcgcgagaatttcccagtgagtttgttaaaatgcagattcctcgggtctgcgtagacagactgtgccccacgcttttctaagtcagttgtttctcgggctaccctttaagagacactgctggatggcctggtgaagaaaatacagaaacagatgggtacaagaactaagaaaacggctaagaaagtgttttggtcctgactactaccatttcgctctgtgatttggggcaattcacattgccctttcttctttgtcaaaagacaaaatcacaacaaacttagttcaaagattttttttttcttaagagacggactctggcaatgttgcccaggctggaaggcagtggctattcacaggtgcggtcatagcaatcatggctatcacaggtgcatcctggaactcctggcctcaagtgatccttctgcctcagcctccggagtagctgggacttaaggtgcgattctatagaattgggcagtgcctcatactataaaatataatggttgttccaatgagctgaacaggagaacttggttttatagacagaaaaggactgaggaaaacaggaacagagaacaaaaagcggattggtcatttggtaatttcaaaattacttttcttgtaaaggttaaagtggaggggacttatcatgccacctaaaacttgcctgtttgggaatttagctcccccctacacacacacacacacacacacacacacacacacacatacacactcagaaggtcgtaaagatcttcgtttcagcttattggcgtggagcttcagcaggactaactctttttagcttggtctgttaggcctagcagaagagctcagtccaaaccaatggcctcctataaatttctttattttgtattttggattttgtattttctatttctcttccagctcagatagtgtatgattctttgtggatatctgtaagataagatactctcaggaatcatgcaaaagacgtggtgtggactgtaaggtatcaagacaaaagggcaggatgaacaggatgtgagtgagagggactttgacaggtgggcagtattcagaggagaaggagaacgaaaggcattccggaagaagaaacaacgtaagcaaaagcttggagagaaaaataaaagttacaggtacaaaaggcaatatggcatagtggccaagagcatggactctgaagtcagactgtgtgctcaaatcctagcaccactcaggtgattggcagtatgaacttctctatgccttagtttcctcatctgtaaaacagagggagtgatgacaagggtagaactaactcactgaactcttatgaagagttaatatgcaaaagggcatctcatctctgtcttgcaccaacaaagtaacttcccacttgttccttgcttccagcctggcctcctcctcctaatctactttccacagagcagacagtgatccactttgaacgaaatatctattcatgttattccccaggcatttcattcatccaacaaatattgattgggtgcttcctatgtgccaagccctattgtaaaaactggagatagaaaaggtcaacaagaaagacacagtttctgctgtcttggagcttacactctactgtgggtggtgggagcacagagacaatcaacacttaagaagaaaattccagagtagtaagtgctatgaatacaacaaatcagagcaaggtagacagaggtgctggggattggaggaacggctacttgaggcagggcacttagagagtgcatca

SEQ ID NO: 915381 - DNA, 4001 bp, Homo sapiens
tttgtcatggcagtcccagcaaactaatacggcactgcttagatgccagggaactaaggaaggagtcttattaggcaaccagcttcaagggaccagcaactcagagatccccaaagatgagaaataatggtgctctctgaagtatccacaagattgtgcctagagagaaagaactaggtttacacacccaccagaacctgccactgaaatgccagcttgccacagcattaaccaagtacggacttccagctcctttcctgcctcttctcttttccccttccccctgccaggagtcagaatcatcagtaagccagaggagagaaggatggaagcttaacgtgggaaatgagaagccaaccacagaccccctttccaagctgcaggccccactggaggagggagaaaagtctccactgggaaccaaattcaaagatctggctgattccctgggactggacatcccaattgctgaatgaggctgtgctggaactaaaagcgacttaagaacttttgattcctgaagggggcccataagagttgtggacctaccttaattttcatcccagggcaagggaagagggaggacctgctgaaaaaaattagggacaatgataggcaaaaataaagtttgcttccataatataccatgagtcctgtgtatttgacgtatgttctcttacatatgaggcaacttagcctggtctctggccaaaaaagagataccactcattgagcaattcttaccctttcaaattccttcactgtcgtcattgagcaattccatcttcttcaagcaagacaaaagctgatgccaatagaaaaatcatttaaaataaacaaacgaaaaaattccttaagctgtcaacttgggtgcagatgttctatgaagccagaaactgaatgtcaccctctatacaccatgacctagagaagcagaataactccagaccagcagggctgggcgggtctaagattcccatactacttaagagaaaactgaattcaaatccaggctctgccatttaacaactgtgtgaccccgggtgaatgacttaaattatccgtacttcaatttcctcatccataaaatagagatcataaagtatctatctgatgaaatagctgcaaaacagttagaatgctgcctggcacagggcaaaggactcacaatacacatagctatcatcatatatcattgcctctcaaagtgaaatattgtgatgaccttggtttattagcaggatgttgtaaaaaaaaatgctttacaaggggcatgatgacgaaaagcgcagattctagaacccgactccctgggtttgaaagaagcaagaatctgaggcatgttgtataagggtttgctatcattactattcattcaatgagagacatacagtaataggtatacatatgcaatacatagagaaagagcttagtactagcagctattattaaggcaacagccacctcagtaaatctacatgggccatgaagaccctggtcacccagagatatcagaggcactgaacagggccagacagacagagggtatttttctaactgggaggctgctgaacttgacctctgttgcttttcattatttatttaacagcagatggtggctttcaagaaaatcggatgtcttgaagccagaaacccatcctccttgggctggatactcagccatcccctgcaaccccaccccctagccccaagctctcattgtctctcttgtgttacctggtctggtttcttcttccagggcaggtcccaccttgctggggagaggtgaatgaccatggccttccagcctcccgagaaggggatgttccaacgggcgcagagatctctgggcctggcttgccactcactgacctggggcctgaagactgacagagaagcaggcagaaaatataaaaagctgataccccctgcaggaaatcattgtttagcccattccagactaaaaaaacaagtgcaacattggagaaaggagggtaaagtgtcattcggggccattgttacagcggctgctctgtgtggtggggaaacaaagcaggcctgtgtatgtgaggacaatgctgttgtgttactagctgcttctgtgttactcctggggacaggaggatgagaaacgaggccacagtgtcttccctggtggacttcactcatcatagtagccaggccaatcagagctgggagaggaattttggacatttagcccatggcattatgtaataagggtcaggggacgtgccttcaggtgtgaccacctgcctctttgttagtcttctatacatgagagatcacaaatgtccctctccttttctcttacttgctttcagaaacttaccccaagttagagctgaaaagaatgagacatatcatttctctaaacacaaatgtcatccacttcaatgcctaacttttgtgatgggacatctggctgggactaaacctcagccatgcagcacgttagcagcagttggcaagactagatgaatattataaagcttgcacccactgaacccccataatgaaccagacactaggtcatgagcaaccttgcaaaatgacctcattcgctcctgacttcaaattctgactctgcaactattacccatggactgtgagcaagtgttttctctgggtgttagttttcccatctgtaaaccgggattatgattgggttcctaggaggattaaatgaattaatatatgcaaaactcttagaacagtggctggcccataaaagtgatcaagaaccacaaatcacaaattagatgcccacattacacctgaaacttgcttgtactcatgaggagatggtatggggatggctggaaagccaggatcccaagtgtctgtatttagccctgttacctactatggcctaagttcaccctgttaggtccctgaaggaattgggcactaataaatattctcaagtatgagacaggtgacaaatgtgtggagagggcccactgtgatgcaacagtgtgtggcgggaactgtggggatttgaaagctcacaccagtcttcagagggcagccagggctcagcctcagccaaatactgcaatgcagaaaggtggaaacagcatggttgggcctgcacatttttaaagaaaagccagaaggctggattttttatgtcgagttttccaattttgaaacactgtggaccaaacacaacattgttaatgcaatgtgagccctagatcatgcagtttgtgatgcctgatctggaaatttccagatttccagcatttccaagccagtgcaaccctgctgacactcagagcttttgtccccaacttgcgctacggtctgagtgtatgcgtcccccacaaattcatatgctgaaatcttcacccccaggtgatggtatttggaggtgggacctatggggggtgattaggtcatgagtgtggagccctcatgaatgggattagtgcccttataaagaggcccaagagagctcccttgcccacagccaccatttgaggacacagtgagaagacaccatctgtgaaccaggaaaccgtcctcatcaaacatagaatctgccaatgccttggtcttggacttcccagcctccagaactatgagcaacacatttctgttgttgataaagccacccagtttatggtattttgttatattagcccatatggactaagacgactggtgagctgatcaggccacgtcaaagccacaaagggggcataaagtcaaaaagattgatcagccctttccccctgcaacccaccctcatctctggactgagacaaaggtgaggaaaagggaaactaggggaataacaggagggtggcaagggctctccttaaaggactgcaggaccctgggcctaatccacctcctgcaggcattcctctgacaaagaaggcagccaggacttagtagtgaaaccaaaggggagaataggagtttatttaagcttccataaccttcatcagttacctcaaatgaaccaaagtagc

SEQ ID NO: 915382 - DNA, 4001 bp, Homo sapiens
aggcagtacattgggccggtggcatccctttggtccttagcatgggtcatctgaatgtgcacgtgtcgtctgggcaacaggtccagaattctgcccaagcagggaagcccggagattccagcccagagctttttccacgcgggtctccggggcagacgtgcagctcagacgcagcgcgtgaacctttcgtcttgtggggcgcatcgcagtaattgaaaccttgcgcaccgcaggactgccgtggcgtctataaatactcaccgcctaactgctgacaaacaaaacgcgggctcccggcaccgcgggggaagaggcggcggcagcatgtgaccgaggacagggactgggtagaactgggggtaaccccttttgccagacaggaaggcatcccagagcggattcctgaagcacagttagcaagcacacagcctggtcccaccccgggcggcggcctcaaggaaaatgggccggagggttgggcaggcagggtcccagctgcccgggcggggcccctagagcgccccctgcgtgcagcgagcccggcatgcgcgcacagtaagcgcgcagaggaaagcctcgccgaaaggaaggcaggcgggagaaataaaacggaagggggatactgcggactcccagcgcggggtccgcagccgggccgtcccagggcttgctcacagcccgtcccggcgggatccccactggctgggccctggcccaccctagtccgcagagcgcgcgcgtgcagcagcgcacgggacaaagtggctccctgccctgcccttctctcccacgcctccctccagaaaaagggggaccgccgggaaaaggctgctgcaggcgcgaaatctcccgtgcttaagcggggtcagctctttagatttgccccccagagggagaacgagagagtcaaacaagccgactttctttttcgacctcccggctcagcctaggtcccatgatcaccagcatccgcatcccacctcacggcggtacttcaaccaccctaaagagcagaccgggagcgtggcctgcccacctccccaccatggtggtctcgagtaagatcccctacgcctgcctgcagcgtccgatcggaggatccttaaccatgcaggagttcccacctggttgcccccccaaacgtgacacttttccctagctcctacccccgccacgccgcgccccgtcagattagcgcgcggtaattttcgctcaatcctgcgcggttgctgagcctatgactccggcccctcccagagacgccccccacccaccactcacctccttggggtccccggcgtgaatcaccccgagtcgcgcacacccgccgctcgcctccgccccagactccgcgcgcctaggaaaaagtttccggtcttcccgaggaagttttctcaccggagagaaatgagcgacctggatggttctccccgtcgcgctctgcccagctctccctccctccgtccctccctcctcccccagctctgccctcagatggggtcccgtccagcctcggttcctctccagcgcgagtcaacaaacgcttcggccgcggagctcccacagccgggctggtgacacgtttccctcctctctcatcttacggccgcctcctcctcctcctcctcctcctcctcctcttcctcctcctcccccttctccccctcctcccctcttcctccttctcctcccacttttcctgtcccgggcacctagctttagtgtctctccaatgtcccccaactcacttcaccccatctcactcctcctccccttcagcaactctcaccctgctggggagagcggagaggggggccctgcacttacatccagttcaacaatttcaggaaatccaagctttttgacttaaaaaaaaaaaattgccgaggaggatgcagcaggtcaagggagctccgtgcttgcgtttctctcacacaacgggagatctgcagccgacccccgcccccggcccagctgccccgcaatgggaaactgccaagccaagaggtgattctggggctcacttaaaaaggagcagggcggagctgaagagaggagtggagcctggaactctggcgattccagaagttgttttaagtgcattgatgaaaatataatgcaagtgaaatctttcccttgtttgcaaattcttttaaagctcccaaactcattttctaactgcaggtttcatgaattagagggtccttcagagtttgaaaccacagaaaatcaacaagccaaaaattaaaaataatgcataattattttgaaaactgttgggttttgttttgttgttgttcttgttgttttttgcaggtgttaagaatttagtgcagctgtttgcaggactcactacctgcatcatttcaccctatggttgagcaggaaatactttaaaaatgctgcccgatcgcacatcacacataggctttgaaaccacagtgacatttgctgaagaaaaagatgtgcatgtccttttatctcaaaactgagcaagactcattttcattttttgatttggtcattgcgaccctacaaaacctatgtgttacggtggttgtgggcatgagagcgggttgaagaagttctgggtgtctcatttgtcctgcgatattaggtaaagctaaaagatcctcaacagaagccctagaatgatgaagggctttaaatttcatcccaggaatcacacacaatgaaagagactgggcatgggacacatgcctgggaaacaaaatctttttttttttttttgagacagtttcccctctgtcatccaggctggagtgcagtggcatgatctcggctccctgcaacctccacctccccgggttcaaggaattctcatgcttcagcctcccgagtagctgggattacaggcatgcaccaccatacccggctaattattgtatttttagtagagatagggtttcaccatgttggccaggctggtgtagaactcctgacctcaagtgatccacatgtctcggcctcccaaagagctgggattataggcataagccaccgtgcctggcaagaaactgagaggacaatgagcagggaggagacttaaaagaggctcgtctaagggattaagagccaaagcctggagccaaaatggcaaggtctccacagcagctcctcttcttcccatactctggttattagccaagttacttaactttgctgtgcctcagtttactcatatgaaaatggggataaaagtagtagctctgtcttagggtggctatgaggatttagtgaattcatacagaaaaagtgtttagaatccctgctgggattcaaaggatattaagctattatttttcctatcattatccctagggcctgggaagtggaaagggaactagttctacccggctgcagggagatcagtttgggaacatccattctacattgctaactctctcaatctccttcaagttttatttcaataagacctaccctattccacctatttaaagttgtaattcgcccctccctcccagtctccctcattcaactctgctttttttttttaatagcatctataaccttgtaacacattgtatggtttactttaagaaaaaaattttggccgggtgtggtggctcacgcctgtaatcccagcactttgggaggctgaggcggatagatcacgaggtcaggagttcaagaccagcctggccaacatagcgaaaccccatctctactaaaaatacaaaaattagccgggcatggtggcgggtgcctgtaatcccaagtactctggagactgaggcagagaattgcttgaacctgggaggtggaggatatagtgagcactgcactccagcctgggagacagagcaagacaaagaaagaaagagagagagagagagaggaaggaaggaaggaaggaaggaaggaaggaaggaaggaaggaaggaaggaaggaaggaggaaaaaattattatctgtcttttaccacctcctactttcagggtagaacatcagctctataa

SEQ ID NO: 915383 - DNA, 4001 bp, Homo sapiens
ctgcatggacctgggagattccaaatggcatttcctgcaagcagaagctgacccatgcctgcggttctttcacagccactgtcttcacagggaagcttggtggccttgagctaacatgaaccggtaagtcctttcctttttaacagcactttccttggaagaatttctcgcaggccagccttacaggctcctcacatgtccactcgtgtgaggtgtaccggcagtagagttagtcccttgagaggccatatcagggcttactccacagcctctgggacgacagcccagtgtttcagcaaaggagctgcttacaatcttgtctatattaaggcccctggcctttcctttaaagaacagggatccatttaacaccaaaacattttggagccccctctctccatccctatcatcagagtcctgctttctgtgtccattcatttaaaatatccataatgggctgggcacagtggctcacgcctgtaatcccagcactttgggaggcagaggcaggtggatcacttgaggtcaggagttcgagaccagtctggccaacatggtgaaatcccgtctctactaaaaatacaaaatcagtcaggtgtggtggcacgcacttgtaaacccagctacttaggaggctgaggcaggagaatcgcttgaacctgggaggcagagattgcagttagccaagattgcaccactgcactccagcctgggtaacagagcaagattgtctcaagaaaagaaaaaagagaaaagatccataacgatccaaactacaaagaattcagtcatgcttcaaaataatgatgcatttaattactccaaacagtgtctgcaaagatttgaaaaacagtagcccacaagcatataagacatagtgctgattcagtctgctcaattcttggtgcacaaaaggttggctagacacctaacaaaactctgtgcctcctcttccaagcacctgtggctcacaggtcttcataatcttgggtttatgccaatcatttaatttttcacagacatgttttatcttcccaagtgggaagtaggttacttaaggtttcttatagaagcccactctcggataggctgacagtttcaggtgtgactaatgagcatgaatagtgaccgtaaattccagtgcaactgtcccagtctggtaaactgactctaacaggccagaggccctcagtggtctattttctggctactgaaacaaagaaagctaacagacacgctggatattaaaaaaaacttgctctcttggccaggtgcagtagctcacacccataatcccagcgctttggaaggccgaggtgggagtgatcccttgaggccaggagttcaaggccagcctgggcagtatagtgagaccccatctctttaaaaaaaaattgcttttttaattagctgggtgtggtggcatgtgcctgtagtcccagctactcgggaggctggggcaggaggatcgcccgagcccagaagtttgaggctgcagtgaactataattgcacgactgcactccagcctgggtgacagagtgagaccctgtctcttaaaaaaggaaaaaaagaaaatttgctctcgtcattatttacccccataatcacggccttcccagaatcagcagaagctcagtcagcccccggatgcctccctccctgccatggcccttggcagccctccaccccacatcctgcagcctccttcacctgttccaggctgagctggagctcagctgcagagcctgccgagctgcttggaatcggggaaggtcgctgagcacgggggagctcatgaagcgcggtctaggcctgcggaaggagcccatcttgtggaactcgacgggcagaatgggagcgaagccgcgggtcataagtcctggtgacagttcagcttcacctctaggaccagaaggttccgaatgccctcggaaagggcttctccaggggctgccttcaggccctcaggctttcttaaaaccacaaacgtagccaacacctgaaaagagagggaagcttttattgagaactcctggcctgagaacacctcttagaggaagttggctgggactttccagcctaactaccccgaaaacaactgcgggacccagcaatagcatctattccctggcaggttcccattcacaagtttgcacagggctcttttcggttgtaacagtgtggtcaccctcaagtgggaagacagtgacaatggggccagcctaaggccagtcctgcagaaaaatgatttctaagctgtgctagactctggttccaatatgcagccatcagtttgagcactgcctgggttcctgtggcccacgatgttgtgcagtaagagatggatttttaaaaaatgtctcaaggaggacacaagagctcctcatcctggcattgatgaccatccatgatatgcccttaccaagccagtctgcatatattgctcagtttttctcaaagtatcagtgactcttcactcaagcacatctcaccttcccttacctgctgttccttcactcatttcatcaggacacactcactgagtgtttgctatttattaaccactgtgagttgcagaacatccaaagatttctaagaccaaatccctgctctcagggtactcagcctatggagaagataacagtcttttcaagtattcactcatgcaataaatatttattgagcagctactatgcatagccactcaggcactgggagatataagatggctccagaggccctggtgccctgccccgtggagctcgcaaccagcaggcactcttctatgtcatgcacagtccttcccccacacttttgctcgtaccaactactcctcttgcccagaattctcttcctttttccctctgcttatttaaacccaactcgccctgcagggttgggttcaaggacactgtccccttgtagcagttgctgggagacttcatggcttcgcggttaaaggcagtggcttcaggtttgagtcttaacttggccactcccaagttgtgtgactttgaacacactgagtctgaagtcctcagctgttactaatgcccactttccaggactggagagatgaaatgagatcatgtgacatggctggcagaatggcggagccatgggcctcaaggactggctatttccattcagatgaatttctttctttcctttacacctttggacctgtaatttcagtctcttattctttagtgactctaaagtctaaatgaatgacttaaaaggcgagaattagagttcagcagagtgaaggacaaaaggaaacaccacgaatctcatagtcactttttacttgacggtttagtaggtttagcccagaagtgttttcactgccatctctctcaccagctaactctgctatgtcccaaaaactaatgatgcaagaaaaagatattctagccttaagtcaaccttcaggttgccaggggagaagatttttgcagctccagctggttagcacttgaagaaggaggaaccgaagtctcacctccaaatcaaacatgctgttgtggtcagaagagtgagttaagccactcagatgggcatggaggcaagccatcgagagggcacgggaggtgttagcagctatctgcaggcaacaggcatagcaacaaggaacttgtaatacgaagaggcagaaaagaaatggcttgtcctgtctcttaacttttttcttttaaggaaagcagacttatgtcctgttttcctgtacagtctttgccccttcaccccctgctcagaatgagttcaacagttttgttaaactttattaacaaaagaagcataacaggctgtcaagtttcagaaggcctcagcagcttcataaatgccactgcaacgtggaaagatctacacaaaccaaaaaatgaggtgatgaagaaataaagccacagaaggtccttccatatccttaaattggctagctttgggatttaactcacccagtaaaggtcacactactaagacaggatccatttcgct

SEQ ID NO: 915384 - DNA, 4001 bp, Homo sapiens
ctcactgcagcctctgcctcccgggtagctgggattataggcacgtgccaccaagccaggctaatttttgtatatttagtagagacggggtttcaccatgttggccaggctggtctcgaactcctgaccgcaggtgatccacctgcctcggcctcccaaagtgctaggattacaggtgtgagccaccgtgccggcgagagtgtctcttatacccgtgtcatgtgaatgaatgattgcactcacaatcattttagggaagagcatctgattatggaaccttataagtgcaaccttctaagtggacttacatatatggtgcagcttgagagggactaaaaaggatcctcttccaaaatctctccctctctctctagctagcctatccagttgctagaattctgtcatcagagtttcacgcctttgggttaatggattgttctagctcaacacacacaaacacagctgtattaatcattaataaagtcagttaggagtactagtgtaacagatccttcccaaatgaaaatgagctgagaatcggatctgatgagaagggataagagacaggaatgtgtggggacgtggatccagagtactgacactgagtggggaagcaccatgaatagtcagggagaaggatgctgagagacagaggctttttttttcttctggttttactaggttaggcttttaagatataggcaggaaacaaactgttaatgatctgaaacctaaaaactgtggacttccaggttagcaagccccaaacctaatcttttctcaactagctgcttttatctagacaactagaccatctgaagtcaaaaaggacctcagagatcattttacgccccacccgcatcacttttacagatgaagacattcaagccaaacgggattaagttatctcgcccagggtctcgcaagtccagactagatcctggactccccgttcgcctctccaggaagaacaagtaattatgcttattataatcgccacacagcttcatctagagaaatgtcactcactgattttcagaagctgaaataggttttccattcaattaaccacaaactaggtcttacgtatatacttattaaaggagactcacagacatcaaattctataaattgcagttaaagaacataaaaaaacacaaccttgccaaatatgccacaaattaaactaaaggatattttagtgtttctatgattgctgggggtatgtaatttcaaatactgcactttctcactgagatctgtgctatgcggctctgggttccagggacgttttagtgcttaccttcttctcccgcatgcttagaagcctttggacctcttgcgcaatgaggaaaccccagggtaactgtgggcagttggctgagtagaaccagaagcgtaaacatagtctggcaactgtcaaacaaactaaaacaaacaaaaaaaaatattaaaaaaaaaaggcccctagctcagcactttgagtttctgtcgaactgaatcaccaacctgttgtactcaaagcctaggcgcaagagcgcccggcgcgcggtttcggtcgccggaacccgacgcgcgcccaggaagcagcccctgagagcgcctgggacaaacgccgtgcccagtgaccctgccgagggctgatcgggcacctgtcgccgcgggcaaccctcgctatgtgttcgaatccaacccagtccgccgaggtggccccttccaggtaaccccctccccgccgaggtcctgccgccaggcctcgtacctgtgtccccccgcacatgttccagcagcccccgggccagaggctcttcttggggcggttccttcggccgccaggccctcggtctccggcgccctcaaacctcggcgacgctccgggcctcgctctccgcagggtctggatggcccccgcgcgcaaacctgggaagggcctggggttcgcagaggggcgcccggggaacacgcgcggggtgaggtcctgcctcggtccggggaggcggccgacggaggacgggaggaggcggctacctggggacacctggccgcgccccacctcccgggggccgggcctacctgcggcgagcgggcgggcagtgggccggcgtctcccgggagcccgcgctgcgctctcagccgccccagcttctgccccatccccgggcgggccagccgcctgccgccagttctggccccgccttggcggcgcgggtggctgcttttcgatttgtgtctgcactcggcgttctcaatgatcctaattcaggaagcatttcggttctcagtcttaagcagagcgccctcggcgcgtccagggcttttcgctttgggtcccactgggccaggagtcctgtggttaccttaggtcaactgttctcaaaagggtggtccggggacgaggacaagatattcatcagacaaaataccctttattcgtgataagaaatggaaatgaccttacaagtaattgattacattggttctccaatggtggtccgccaggtctgggatgtctccaagatcttttccaggggtctctgagggcaaaactatttccattatagtaacaataaatgatttgccattttcactttcattctctcaagagtgtacagtggaaatttccaggggctatttgaagtgtaataacgtcatcattctgtctcctaatagaatacctgagtgagcgtgcttgtattttctggtattttccatagtagtatgtttacattatcagtatgtacattttatagagatttatgtagatttatagagattaataaaatttgttctcagtacttgtgaacttaattttttttctttccttttttctttttcagagtagggggtctcactttgttgcccaggaactcctgggctcaagagatcctcctgtctcatcctccagagtagctgggactacaggtgtccaccaactctcttggctactgcttttgtactttgattagttctatttgttcatatctactaggatagctataacctcatttttctgaagtaattatcttgaaatcttgatcttttccttgagtctatgcataaacataacaaaaagtaagctttgttgtcttgatttcaaataatattttgaaaatttctcagttttaatgttagataataaatatcattagataaaattcacataagtgaaagctctttggggtccttgataatgtaaaagagcgtaaaaaggtcttgattaaagacttcaaaaactgctgcatcaagtaatgaaggcagcaggtggacagagtacctatgccaggtgatggtcacatccttctttatccaaagaacgtgcttaacagttctttgaaacactatttatgctttggtcgaagtggtctggcacttgctggggaccaagggaaacattttttcccccttcattttttttttttttttcttgagacagagtcttgctctgtcacccaggctggagtacagtggcacaatcttggcttactgtaaccttcgcctcctgggttcaagcgattctcctgcctcagccttccgagtagctgggattacaggcatccaccaccacgcccggctaattttttgtacatttaggagagaggggttttcaccatgttggccaggttgttctcaaactcctgacctcaggtgatccacctacctcggcctcccaaagtgctgggattacaggcatgagccactgtgcccggcctcaaatttttgactaattcaatttttaccaaattctgtttttctcctcccaaaggatattgtctattttattattattattgataatcaactgaattattcctaagttttctgcagaaattttgttttcactgattccttctaggcagtgcttttcctttcccttcttccaatcccttcctcttcactttccatttgtctacctcgtggtctaaactatttctatgatggattcttctttccctcttattcaagcaattgggatcagactatgaagaggccagacatggttt

SEQ ID NO: 915385 - DNA, 4001 bp, Homo sapiens
aacaagaacagagtgcaaaaaaacctgctaatattgagaacatgagaaacaaattccctggagtctgtgggagttaggcatgaataatgcctggtggatgaaatcctaagggatctatgagaagagttactgggagaacctgagactattaaccattgcagactggggacaaaaatgttctcagatgcattaatggacacttatgctacaaccagaaaatgcatccatgttaaccatccagctgaataagtcgtcagtgttacaaaaatgagatccatattaggcaccttggaaaaaggcttccttcccagttcaggcacaggaaaggacaagttaccgcttgactttatttaactaggaaaactgcaagtgaaacaaccttttcgtacgcagatggggtgcaaacactttcacaaataaacatagtggcttctgggggcattttctaagttccttctccccacttcacctccaatccactcctgacagacttcatggtaggcacggttataaacctgtcacaaatactcgcatgcacaagtaggatcttgaaacaacatgcaataaatatcctgatactactttgacatagggcttttgaccacagctgacctcatctataaattcaattctttctcacatgaccatgtgatgaggattctggcactggcctacctgttcctaaggagtgcacagggagccctcaaatttagtttcaggagctgagagaagcaagccctattccaatacctacactgagctgcttaattcttactggtgtcacccagtgggcagtaaaacaaacaggatttttatcagctgctttctcctgaggtgctggaaagcaaacctaatttgtattctggagaggagtggtggtgttccttcatctgaacaagtcttctcccgctccttttaaaactttaaaacttttatttaaaagttaactcgtgatgaatgcctacaggcagaagaactatttgcttacaacaactgttgttagttcagactgtagtgtctagggttagcacccccggaacgcacacggacaaccactccggagaaaagattctatttcccagcctgtatttgctgcacttttgcacttctcttgcttgcttaggtgtgttcacaatcacatgcccagggttaaaacttaatattcagaacttgatggaatccggtatatgcaaaactcaaggaaaagaagtagtggtggtggtgtgttgggggggtgcatgggggtgtagccatcgcccccgccgaaggacagcttgccgagagccggctctctctgcttcccaaccaacatcctgcacccaagacagcaggatcttctttccccatccgtttcatgggtgacactgcatgaatccaaatgacctgcagcccccgccgtctccccagagctccttcaggcccccagcccgtgtcctggaaccccgaggactgccctggcgaagtcctgcggtgcctccggcagcccgcagttaccctaccccgcgcatacccggccctttgtcccgctcctcccggcgcctcgcctctcccgcgcccgggcggatgccccagtcggtgcccgcactcacccgcgccgagcagcccgcccgggccgcggctcgctgcgccgctcagacaggtgtgggcgccgggagagagcgcgcggctcccatgcctgccccgccgcacagccgagtgcgagcaagctggcgagcagcgcaggcagctggcgggtccgccccccgcgccacccgaggcccgcccgccccgcctccggcctcggggaagccgcgcggacgccgcccgccccactgcacataaaccgtgcccccctcccctcgccgctcgcctgcggccggagcagggtggagcagcccagagggcctgaggccgagcgtccctgcgcaggtgggccccggtggcgcggcagcagtcgccagtccgggcctctcggcgccaggcagcaccggctctggcgggctctcctgcccgggacccgcgcgccgtcaccctttgaacaccgcgcatccccgggtctggcgcgcggcctcctgagcgagactacggccttcgctgctgggagcacgctgccagctcgcaaaaagaccaggtcccctacaaaaggcgacccctcccccaacagcctagaactagggacgcgggccacacctggtgtatggggagccctgggcaaatttgaagaattggttcagaacctgtgtgcgccccacccccacgtacacttttagcgccttaaggtgctgaccgaactcctagtttctccggtgcctccaaagaacagaaacctgtattcccatggcagggccaccaatgctttgcatttccttacagcactcagtgctgtgcgtggggcccaaagcaccgggggtgcttggcagcttctgagcggcggtggctggggagcccactggcctcagttcttcatcggggcaccagctggtggagccacctccttgtccagtgggcctacttccctgaatcactccaagcggtcgttatcttggtggtggtggttgggggccagggtaggggggtgtgcggggagtcctctcctaaccaggctggagaccttgccatttaaggtcctagtgttagagccttcctatttagtatagattactgtgtattgagcgttttcggtcaagagctttacatataggccattgtggtgaagaaggtgcagagattacactaatttttataaggaacaggaggtttggagaggttttatgacttgcccaaaatcacacagctactgaatggtaggacaagattttgcactgagccatgctttctatcaagctacttagctttcctttctcctatcaaagtctactctcagaaagggaaggtctaaagtgctatttcacaccaaggtgttactgatatgcctaatacgttggtgtttgcaattacttttacatgagaaagccctgaacacattattgtgtggtcttttcttttattttattttcaagacaagtactccctctgtagctcattctggagtgcagtagcaggatcatagctcactgcagcgtagacctcctgggctcaagtatcctcccttctcagcaagtattacacgcgtgagtcactgctcccggcctggtatttcttaaatagaaaggaaactgatattttccaccattttaagggcaaatttttcttagcttagcttcaattgttttcttttaaaatgtcacattaatatatagagacataggccaggctcagtggctcacgcctgtaatcgtagcactttggaagaccaaagtgggcagattgcttgaacttaggagtttgagaccagcctgggcaacatggcaaaaccccatctctataaaaaatacaaaaaacctagccagttgtggtggcacacgcctgtggtctcagctatttgggaggctgaggtgggaggatggcttgagcccaggaggtggaggttgcaatgagctatgatcaccactgcactccaacctgggtgacagaccaagaccctgtctcaaaacacacacagacacaaaaccagatataaacttatgttacagcttttgaacaactcgcaaataaaaccaaaacagatttataaaaattttcttccagaataataaaattgaaattagtaacgtttcctggactactatcagcattgcatggtactgacagctgaggcgtcagtacctttgacttccctgtggctctgccactctcatgatgtgtgaggtgcccaatgcagactcaattctctcacctctttccttcgttccatctaccatatctcctttgcccacaccatatgtcattgcaatgggtttctcttgactctaatacattatttaggtatttgtgctgtttctctcttattagcatagcaagtgaagtggtaactcttgctgccaaagactagtacacacaggtgctgcaatcaagaggcagtacttggcatgagatggtcatcccaatgatccagaatgtgt

SEQ ID NO: 915386 - DNA, 4001 bp, Homo sapiens
catggtgaaatcccatctctacaaaaaaatacaaaaattagctgagcctagtgacgtgtgcttgtagtcccagctacctggggggcttgagcctgggaggtcaaggttgcagtgagctgtgactgtaccactgcatttcagcctgggtgacaaagtgagaccctgtctcaaaaaaagaatggagtttgaaaaacgtcatccgtaagtttaccccacttctacaattgaaccacttctgttcccaagatgtgctctgtgctttttttttgccttgctgtctttgttcatatctgaaactctttcatatccatctgtctacattctgtccatttttcaaaggcctaacacaatgttacatcttctacaaagtatttttgttggcctttgatttcccataacactttctgtaactttctcatagctcttgtaattttattcgttttattttcagcttatgtttctcctcccctactgttgaataccatgagtttgcatctctggcctgcaccttttttggctgggtgtgttattcagggtcttggcaatagcacattggttcaaatgatgatactttaatgaagtggctacttatggaggtgaagacagggtagagggaacaaacaagccagagaggcatccagggtctagcagcagtgggaagccatcactcatctgggcaggaggcagaaaggagaaaatgctgtcccagagcccagtgagcatgagcaccttggagggaagcctgcttccaattgccgagtagtccatggagagttgcagctgctgcaagaaatggctccccaaggacggaggaagttggaaagaagcaccctgacctcttctcttcctactctgatctcccgaggcctaccaaagtcagctcacaagggagtcaggttgtgctgtctgtaaggaccagccttctgagcacagtgcagggtagtgaagggtggagaactcatgggagagaggcagacagaaaataatcagcacattgggaaagcctgcttcaaaataggggtagtgaccagtaccctcctcacagggctgtaaggagattatagggatttcattagaaaatgtatccaaatattaacatatcgcacagagcctgattctcaaattattttagctagtcataagaaccctgtgaatagctactggtataaaagctcattgaagaagatgtcatgcattgcttatttttcagctcttacacatggcagcataggccctctgagcagtaggaccatgaatggatgccatcaggtgtgccacggggagccaccttgaacagaggtcacagggaagctagtttggctgttttgactaaaatcatcagtcagtctgaccttggaaaacagacagcagtgagctgactttaagacttatttttaactttcagcagattgttctggcacttcttccccacagtctaggcctctaggttttcctttgtctctttgtggaggtgagagctgctgaaaaacaagtgagcttgtgaaaagtgcctcacagccatcactggaaatggcaccaatttgtcacatttgaaagccagctagaggtggctggcccaggggttcagcaggaggatttgtacttacagaagcaaattgcttcctcctttttcagaagagtaacctgttttatttcaaacacaggatcacctggctccttctgccctccgcacacagattagggaaaccacaagaataatcatccatgtgttcttttcacttcaaagccctgcagaatgccacaagggctggttctcccacctgaaacaagagaggcccttccagggctgtgctggtttaagaaagccctttcctgggaactgggggagtgaggtgggacttaccagatgaaggcaaatctgtgtcagacaaggaagccacacaggtaccctccactgcagctctgcgcctgtgctcctggaggaagggtgagtttgcagggtgacagctctgtggaacctgtcacactgacagaggcaatgaaggtcacactgggatgagattccagtactgacaccagcagctgcaggtagggacttccttcaaggaggagtgacttttttatccgggtttccggcagactaaatttagtgggaaaaagccccttgatcctgtgggatctgtaagtagttgctcacattgttgtccctgcccctgggaaatcaagacataaacccaaactgttaataaatggctctgatgtcactacacccacaagcctcacactttcttagtgggccaatcttgagtcctctggcttttcctggagcacacagatatttagtctctactcaaggctggcagaggtgctgtttggggaattgtgtgcagtcagggtgaggatagactctccagacaagaagtgggtccattccatcaaacagcagggtgataggtaatacagtggtttgaggatcatgctgccaataaaaatgggctcttcccagcaatgtgacaccactccaagatgacatgacaatttttcttgtaatgtgaaaatgaaaaagtcacttggctacaatccaggaagacccaggaagtctaaactacctaaactaccatgacctcacagttgtataaatagcattttggaaaatgaggttatccaagctatttgctctttcaggacaagagatagcaatctctctctccctctctcagtgtaataaaattgaactcttaaatccttaaaaaccttcctgcaggaaaacttaaaacaaatacatgacaagcctttgatttcttagcctagctttgaagggttgattgctgacttcaaggcaaattccagtcttggtagcagtcccccaaccccaactacaatctgtaattttattatcaactctttcatcctctgcccaacgatctccaagcttcagggaaatgaagttcactcagagattgggtattcttgatctaagcatgataggtgtcaacctttgcatttattctgatccctacctgacaagaaaagaaaggatgagttagctataaaatggttttgtgtaaagttgtagttttaaatagtataggttggtgcaaaagttactgcgatttttgcattgttgaaatttgccatttgatactggaatacattattaaatgttatgttatatatcactttaatgtacatttctcactttatgttttttgctaatgacttcttacttgctgtttattttcgactataaaaatgatgttagacaaaaagcaaatttgagcaattttcttattcgagttcaaaatgggtcgtaaagcagcagagacaatttgcaacatcaacaacacatttggctcaggaactgctaacgaaggtacagtgcagtggtggttcaagaagttttgcaaaggaggggagagccttgaagataaggagcatagtgactggccgtcggaagttgacaacaaccgagagcagtcattgaagctgaacctcttaaaacaacacgagaagttgctgaaaaactcaacatctaccattctatggttgtttggcatttgaagcaaattggagaggtgaaaaagctcaataagtacccactcataggtgcctcatgagctgagaaaaaaaaatgtcgttttgaagcgtcatcttattctatgcaacaacaacaaaccatttcttgattggattgtgatgtgcgacaaaagtggatttcatatgacaactgatgatgaccagctcagtggttggaactagattcttctcactccaaagcacttcccaaagccaaacttgcaccaaaaaaggtcatggtcactgtttggtggtctgctgccagtctgatccactacaacttgctgaatcccggtgaagccattacatctgagaagtatgctcagcaaattgatgagatgtgtcaaaaactgaaaggtctacggtcgcatcggtcaacagaaaggggcccagttcttctccacaacaacgcccgaatgcacattgcacaaccaatgcttccataagttgagcaaactgggtta

SEQ ID NO: 915387 - DNA, 4001 bp, Homo sapiens
aacatgatgttataagatacacatatatagtagggtcactatcgcagaatgaacacatccgttgtctcacatagttacccattttcctctgctgtggcaagggctataaactactcatttaacaaaaatcttgaatacaaaacactacctgcattattaactgtagtcttcatgttgtacattagatctttccacttgctcaacctacatatttgctactttgtatctcctcttttttcctccccactgccaccccctaccctggtaaccactgttttactctctctatatatatatttgcccttttaaacaaaagattccacatataagtgagagcatgaaacatttttctttctgtttctggcttatttcacttaacataatgtcctctaggtccatcaggaaacctattttaattataaatgcaacttccaagaacgtctaaaataattatattccattttccccaagcctacgctctcacaagtttctaaatatattgcagccacaaaaagccacttcacagaaaaggtttaaaaacattattttacctgggggctccaaacagtgacatcattgtcatactgatttcgaaactaaaagtaaaagaaaaaaatacctgttaatagaagaacatttcaaatcccaactcttaacattcattaagaaatatgcttgtatttccattcaatgttaaggcactctgttcatgcagtcttactggaagattactactgtactcagatgtaagccaattctacatttaccataaactcgtgggagagggagaagcagatctaaatgggtcctatttttccaaactcttattctaacaccctccatatcaacccctttaggctcaattactaaagttcacaatcaactttcttgcctatttttgcttatgctgctcccttttattgggccctaataaatggttaaaagtcttccttttctttaaggtagcttaaatgtcgatttcttgaagtcttctccttttcttcccaaatccccctaacatatactcccacagctctttatctaaacgtccctttctgtttttatgattagggacatgtatgacttattttttaatgttcactgtagttatgcctgtacaagtgctgtctgtatattcacattgaatgaacaaaaatgtcctcacaaagttagaggtggacacaaatagctgcagcgatagaaccattacggctattacgactattataataatagtcatgggagtgagattgagtgctagaatggcagacagaactggaaacccagaaccctatattgtaaccctgattccatcacttcccctctcagcctcggcttactcatccgcaactaggtgactggacaaaatgattgaaaagggcctcttctaatcgaagtctaggcgagagataaatagacggacccaccaggaaaacggacgctgtccaggaacacaaacctgggggtcaagtccgcactggtggtacaggtaggcctccaagtcaagtctctgtcttctcctctcccatacacagcactaggagctattctggaccgctcagaatctactccactgaaggaacctgaggggcgaactcatctagctgaccgaggaggaagtgtcggaggctccccgggaagcgaaagcggtggaaaggccgcactggctaccgataacccctagcccggccaggccggagatgctgaatcactgccggagcccggccgtctgccgaggctctcatacctcgtggcaccgggcgacgctaaggatgacaggagaggtggctcgtcatcccccagtcaccagagctctgccctaaaccttccagagatcgggattcaacgtaccatggtggcggcgcgggcctggttgcggcctccagcaaaactgagaatcaaggaggtgctgccgaaagtatcgctcagcgatctacagagaagtctgcgggagtttgacggcggcggcgcagggtagcgcagtctattccagagatatcgataggcttgcaacacttccccctccttaaaactttccgaccgctcggcggcgggcggagcctcggaagatctaggaactgagactggcgggaaaacctggctgggagtgccggcggctgagagctgcggggcagcccctgtcacgtagcccttctaggttcctgtgtatggcggattccctccagtttctcccgctggcgggctgcatctaaagtcgtccgagtcaacagccgtgactctgggtgatactagctctcattaaccgtccacagatttggggtgttatgtgactgaaaggaacgaggctgcaggaaagccacaagataacgatccgtttctgtgtgtcagctgtattcttcctcgagtatcttgtttgtgtacatgcttttatttgcattaaggttggtgcaaaagtaactgcggtttttgccatttggcaaaatactttggaatgctcttccttattccctggagatgttatctttcaagggtctgttgtcgttaacccctcattgttattatgattgatttcttccaccagactttgaactccatgagggcgctaatgtctttctatgcccccaaaaccaagcatggtacctgacagattaggccactgagaaaaaatggacactttctttcgatttatctatttcgtcttttgagagcatctttccataacgaaatagtctgacatccaccggctatttatattctttgtaaaaaagagactgggtgtggtggctcacgcctgtaatcccagcgctattggaggccgagggcggaggatcgcttgaacccaggagtttgagatcactatattattttaatacagtgggacctcgtcgctacaataataataagaataagaataagaataagaataataaaaaaaaaaggctgggcatgttggcatgggcctgtggtcccagccactcgggaagctgatgtgggaggatctcttgagccagggagatcgaggttgcagtgagccatggtcgcgccgttgcactccagcccgcctgggcaatagagattctgtttcaaaaaaaaaaaaagccgggcgcggtggctcacgcttgtaatcccaacactttggaaggcagaggcgggtggatcacgaggtcaggagatcggaccatcctggccaacatggtaaaaccccgtctctactaaaaatacaaaaattagccgggcgtggtggcgtgcctcaggaggctgaggcaggagaatcgcttgaacccgggaggcggaggttgcagtgagctgagatcgtgccactgcactccagcctgggcgacagagtgcgactccatctcaaaaaaaaaaaaacaaaaaacaaagtactaaattgttctccagaaatgttttaccaacatatactctcaacagtagtatatgaggttaccttctctaattcatcaacactggttattgtcgtatttctgaaaaacactgttgatttggtggactaaattaacagattaaattaatagattgttctctttcgtttctccaggacctagcacaatgcgtagcacatattaagtgtttataaatagtgctaactgattaaataaatgctcatttaaaaattgtcatatactacataaacattttgaaaattctttccatatatatctctctagtcacatgcctcacacagatgtgtaataaatatacaatttttaaaaataagatgatactgtttttattaatacacttaaaaagttatagctatcatatgtccataagtaatggtctatattattttcaatagtcgcatagtattttattgtatggaaatataataatttgcttaattattagtgtgcaattcaattgtttccaagttattggtatcataaaaatactataatgaatattcttgtacatacacacctattgtgtgcataattaccttacctgatgaagaattcatagaagtagaattgtggggtcaaagggaacttacatttacagttatgataaatatggct

SEQ ID NO: 915388 - DNA, 4001 bp, Homo sapiens
aaggcggctagagaatcttgaagacgattttgtgaagagggctttggattttatttttcagaaaacagtcatttgacacaatccctttatttttacttgtcaacactgagactttggtttagtttggtagtataaataatataaaaggttgctcttggctcttgctcttattatattattggcaacctgaaaggtgagtcttaaggatgcctatgtatttttggcatacagaaatcagagctttttaagactagaaaggatttcaaaggttatctaaattaattgcttcatttcacatttgagaagaacaaggccagtaaaagttataggattgcttaatggcagagtatgaatggctaggcccagacaaaaactcacaaaactggatttctactccctaccgtttccatgatcacgtgccaatcctactttagatgataacttcagattaaatgcccacacacatacacgcacatgcacacacacacacctgttaatctgaatttgttctaattttcaaatcaatttattatttcctatggaatttataacgggaatttcaataatgctggtgctagttttgtcacgcccttctgtacaaactcaaaatgtatccattttttactttaatcttcaactggtggtaatgagttctatgcacatcatataaaaaatacatttgctgagttttgctgaaatgagcattttttttcttgtcatggggataaaatgaccttttgaatttttatcttttaggacaagcatttgggtaatacattagaaaaggaaaagcaaaggaaagggaattctggaactttttcattttggttaaattcttgtgctaatttcttagtgccttttgctatgcatgtgaactatgaccatatacgaaaatggtctgttttaggtcatgactgtgggcagagattaattggtgaaaaatgggcctgtttgtgggatttaccacacagtaaggtttctcatctgcctggaaaaatgtggaattagctctttgagaaatgcagtccggtcatgaggttgaagcgagagcttagggagggaaacacagttcactctctaaggcagttatgattggttagattccagagcagtccctttggtgtagtaaagttcttttcttctcgctttcaggtctgtgtttcctaatgttgctagtttcaccagtacttcacagatagcatcttattcggcttccttcaaggcctgctgatccaaactggggagtggtcttggagaggattcctagttctctccgctcccccatctagaaagtgctgttacagtgaaaaagccttcaatttgcaaagaccaattgcgacagcaaatctgtgctgtgtggaaggggatacaagttgtgaaccggcggatatgtatgacaagggtacaaaatggaaggcgagacgttagttcttcgcctgtgaagatggttcttgagcaacactcaagaacgtgcacgtggagtgctactagagtgcactccacgtgcacgttcctccctaagagccactgcaaggatcctgggcctgctgcgtggcccaagaatccacgttgcttctgaggctagatctagccacagcgattagggtttcttcgccatggccttggtggtggctggccctaaactggtcacagtctgaagacccaccctgaaagggactaaggttagagacagcgcccctcccctcccacccttagctcagcatccccactaagcacaccccttggggaccacaaacgccctctttcccgaagaccccagtagtgacctgtgggattctggctgggtgtccgtgacttaccctcaaagagaacctgcacgcctggggtcccaggatggctggcttgcccctcccgtccgaagatgacctcgtccttctctttcagtcccggtgggtcttcggactgccgccgccgcgctttcctcggcctgggcacgctgggtcggcgtggtcccggctcgcgtccctgttgggcggccgcggcgcgggtggcggcgggacaagtcgtgagcgcgcgctgggcgcgcgcccggccggggcagtcgcgggggaggagcgcccgcccgccgctcgcgcgcccaacggaccaggctggggccgtgaggtaactgttgcagccagcggaggtgggaggcgacactgagtctccagtcccgagaggtgcccgagggaaaaggaggcggcagctaaactggtcctggagagaagccccttccgcccctctcctcagccagcatgtcccggactccgccgctcctcagtccgcgcggtggggaccccgggccgtggcggccggcgcagccctgacgggttgcgaaccagggggcgccccgaacgcgggggttggggtctgggagcgcgagcggccgctacggtacgagcggggtgtgctgagtcccgtggccacccccggccccagccatgaggagggacgagcgagacgccaaagccatgcggtccctgcagccgccggatggggccggctcgccccccgagagtctgaggaacggctacgtgaagagctgcgtgagccccttgcggcaggaccctccgcgcggcttcttcttccacctctgccgcttctgcaacgtggagctgcggccgccgccggcctctccccagcagccgcggcgctgctcccccttctgccgggcgcgcctctcgctgggcgccctggctgcctttgtcctcgccctgctgctgggcgcggaacccgagagctgggctgccggggccgcctggctgcggacgctgctgagcgtgtgttcgcacagcttgagccccctcttcagcatcgcctgtgccttcttcttcctcacctgcttcctcacccggaccaagcggggacccggcccgggccggagctgcggctcctggtggctgctggcgctgcccgcctgctgttacctgggggacttcttggtgtggcagtggtggtcttggccttggggggatggcgacgcagggtccgcggccccgcacacgcccccggaggcggcagcgggcaggttgctgctggtgctgagctgcgtagggctgctgctgacgctcgcgcacccgctgcggctccggcactgcgttctggtgctgctcctggccagcttcgtctggtgggtctccttcaccagcctcgggtcgctgccctccgccctcaggccgctgctctccggcctggtggggggcgctggctgcctgctggccctggggttggatcacttctttcaaatcagggaagcgcctcttcatcctcgactgtccagtgccgccgaagaaaaagtgcctgtgatccgaccccggaggaggtccagctgcgtgtcgttaggagaaactgcagccagttactatggcagttgcaaaatattcaggagaccgtcgttgccttgtatttccagagaacaggtatgttagctggaaggcgaggtctgggacgcgagcgggttcgggtttaccgctgcagtttccgagttgaattcgcttatttcaaagcatgttaactttcagaatggaaaaagggtgtgttgcggggggggggggggaggaaataatgttttattctggaaaggattcttaaaatacaggaagccttttaaaaatgcagaagcaagtagcttttgtcattgaatagaaatcaaatagcccgctaatcacatggcactttttaaggactgtatatgcaatagatgagttcgcagaagaatgaggtgaatcatttgtggttgaatagattgactactcccgcttttggcatcctctgatatgtgtctttttggtgccatttatctgtttgctgttataatgatgcctacccaaaaataacatacagcctttagaatgagaggatacatctatgagttttaatcagtgtggtttcgttattgaaaatcgagaggaaaaatctgagattttatcgttacaagacatgagctttgcaaatgagagtaatttagatgaaaagacagcagtataggtgaatataatatt

SEQ ID NO: 915389 - DNA, 4001 bp, Homo sapiens
cacaggaaggaagtacgtctgtggacaagttacaggggcagtctcagttagtgtcctcagggaaggctccctagtcctgtcccacatccgctcctcaccctcctccagtctctcattgctgagccacgctcacctgtcgtgtagaggttttgatcacagcacacttgcccttcctctgggagtccaggtcaatattggcaccatcctcctcttggtcattaggatcaacatccaggagctgggaaggaaaaaatactcagctccttgaactccccaaggcccagtgcttcctaagacagttcctaatacctgcagggctggccatccttacctccctcctccaatagccctgagcccaccaaacgtgggtgcccctgctaagcccagggattgatctctgtgtaggtgctgctcctctgcacagggctcatctaccccggaggagacataaccaacagaaaaggagacacgtgagacctcccaggactttgcaggccccgtcttccccatgaaagtgccccaggaggtgtagctctgacatgcagtttggcctcaatacctccacccactctttccctagtggccccaccccaggctgtccccattccctgctgactccctctcttcccctccacatacacacacacctcgatgacgttggagacaaggtacggcagggtcttgttcactttgattttctcactgttctcttttatcttgtccttcatggcttggagctcatgggtgactctcaacacttcactcttcatgatctgagatcaggaggggaggagaagcaaatataaaccctggcacagcttatgctagagccctgtaactagtgaggtccagggtgcccaggggaccctcccgcatccattcatccagctctgaggctctctgaaggcagagtctgactgtgtccacatcctgcagaagtcaaaagaggaggccagtttggaaacctcctggtgaaatagtggtagtattggaataaaagcaggcctccgagagaggcaaacataggttttaggttctgcctcatagtaagaactgggtgctttatcgcagtacaaacctctctgggcctgtctcctcatctgtaaaataggcattttactaaaagaaggattcttgagaggattattcccagttctcactgggaaaggcaatctgataacttctcatctcagcccaggcctcccaccaccccctacctgtcttcttgtcccttttaaggcttagttttctttcctctcttcctgatatgagggggaagcccgagccccatgtctcccccagggtgcccgattaggaagtacgagaggcgactcggatcgccggggcctgtcctgtgggggctccatcgcccgcacaggagctgtgcgcccaccttgatctcactgtccagcagccgtgtgcgctggatgatctcctccgtggacatcttgagcacctcctccccaattccatcttgctgtaaaaaattatttgtttatttatatatttacttttactcaggacaagcatccctcgttctccgaacccactcacagcctcagtttccacgcccataaaaccaggatggagtcaggacccctgcccacatcccaaacaaccccgtccccgggatcgggccagaccttgacccccagccacctccttccctcttgtcaatggcgtctccctgcgggccccggttcccggaccgccagctcgcccggtgcccacctcggcctcatcccacacggtcgccatcttctcctgccgagtcactggactctcaatattcggcagcagattcatttcctggaggagcgggcagaagatgggaccaggcgggagccgcaacgggagattaataccgtctttcttaaagccttctcttgaccagtggaaaacctctccccacaaatcccgactcttgacccgaccagctccggccgtgctgcggagcagcgaatctgcctctccgattccaaagaccaacccctggccacaggccccgcccccgcggaccccgaaacgttcccgcccgcgtcctatttttgccgggcgcgagaggtggggccgctattggccgacacgcgcgttgggggcggggcctatgtgtaaaaccggaaagggagggagaagggtgggatccgcgagggcctttgggaaatgtagtctttaatctggcccgtgacagatgcttgcggaggggcgcgttcaaactcagaccgtgaccccgctaggaataaggggatttacacaatgacactgcctcccaattaataaacgacataggccagccgtgtgcaaagggccaaaaaggcatgccacctcagtccgcatttttacaattatttaagtacaagctggccacccggagttacgggagggaatcattaaccagctttaaagagaaatcgctgctgctcctaacgtcagagcaggcttcacggaattgtccacgtgggaagaactcaattgaccatcagcctctacgattaaaaacattatgactcgggccgggcgcggtggctcacgcctgtaatcccagcactttgggaggccgaggcgggcggatcacgaggtcaggagatcgagaccatcctggctaacacggtgaaaccccgtctctactaaatatacaaaaaattagccgggcgtggtggtgggcgcccgtagtcccagctactccgggctgagccaggagaatggcatgaacctcggaggcggagcttgcagtgagccgtgatcgcgccactgcactccagcctgggcgacagagcgagactccgtctcaaaaaaaattatgtctcgtatctgcaattgtttgttttctctgaccatggttagtaatctcagtgagcagagcgggtctccggatcatgggagactcattcgttgtacccttgtcggctattttaaatgatctctccttatcctttgaggtgagccctggagcccctttaaagggaacttcatgtaagcaacatagcttatatttcaagtcaaaccatcacaaacactctgttaacctgatgaaaatctgtgcaatcgttgccttttttttgtttgcttgtttgttttttgttttttgagacggagtctcgctctgtcgcccaggctggaatgcagtggcgcggtctctccctaccgcaacctccgcctcccgggttcaatggattctcctgcctcagcctctcaagtagctgggattacaggcacccaccaccacgcccaactaatttttgtatttttagtagagacaaggtttcaccatgttgaccaggctggtctcaaactcctgggcgtaagtgatcttcctgcctcagcctcctaaagtgttggtactataggcatgaaccactacacctagcctttgcagtagttttttttggaacacggttgaaagcagaatttttttctttaaataacaacatgtacagctgctcactcaggctgacaaagcgtctcctcaagtaacagtgctttattccattctctcaacaagcctgccttgtggacagactgaattaccattctcaaatttaaataagcatagggaggctcagagaggttaagtgccttgctggaggttattcagtgagtcactggcagcactaggactgctgaccccaaattctcactttgagttgcccgataggagccaagaagcccagaggggaaagactgtccaatctgtgctggtcccactatgcctgggtcagttgggtcccattctggggcctacttttggagatcctgacaaatacgaatatgtttagaaagcctccagcctgggcctaggagggatgcagacattctccccttaaccaacttttaggtaggctcttctgagccatctttttttttttttttttttttttgagacggagtttcgctctgtcgcccaggctggagtgcagtggcgggatctcggctcactgcaagctccgcctcccgggttcacgccattctcctgcctcagcctcccaagtagctgggactac

SEQ ID NO: 915390 - DNA, 4001 bp, Homo sapiens
cactggagcatctcagatttcagatttttgatttatggatactgaacgggtaagtatatatcgcaaatatttcaaaatttgaaaaaatactaaatccaaaaaaacttttgccccaatgcatttctttctttcttttttgagacagagtctgactctgttgcccaggctgtagtgcagtggcgccatctcggctcactgcaacctctgcctcccaggatcaagtgattctcctgcctcagcctcccgagtagcagggattacaggcatgagccactgcgcccggccgccccaatgcatttctgataagggatactaaatccatactaaccagtctctacggtgtagcagaaagaatgctaaagcagatgtgataaacctgagttcttttcctggctctgctattgaatggctatgtcactttgagatcacttaacttctctaagactcagttttcccaggtatgaaatggagaacattaatctagattaactcaaagggttattgtgaggtttcactggaaacgagaactttggaatcatacatatctaacttgagatgctggctcttctacctattagctgagtatctcagggaaggcaattaaaatgagcttcagtttcctcctctgtgaaaaggatgaataaaggattaaataagctaatatttaaaacctcagggacagtgacatagcgcttcatccaaaacccaaaggctaatatttaataacgcagataaaatgctttgaaaattaccaagtgctatccaacacaaaccattatttgccaaacattaatttgctctcaaaaactgctaatagcagaaggctgctgaatgctaaacatcatcaaaacatgtatggaacatctatgtgaaaggtattatattaaatgctagggttaacagggaggttactacaggagatgtattttctatggaatagctccagcccaatgccagcaatttattctactcatattaaaaggaggttagtgcttagcaagaatttaattgctctgcaattcatcctgtttctaaacaaacctaaactttaagatctttctaggggcagaaagcccatgagaaatacaatggaaggtaaagacaatgggacggcggaagtggttgcaccccgtgcaaccagctgcagaatgaatagggaaaacagcaaagctgtactagcctctggtttatcaactccagaccatgagaaagataactgtagatacagttacactatgacaaggctaagcacgaatcaccaacatgtttcccaaagtgggtggtggccctgaaagtgtgtttgcttgttagatggaatcaagagctaaaatcaaaggctactcctgaaccgttttagtaagacccgaggtaggagttcagaagcctcagtctcagtcccccgttaaggaagcagtgaatctcagaccgaaacatcctggctacagctcttggccctcgtggtctgtcatccctcttattcctcgaccctgccactcaaggttcctcagcaaaccttgccggcacagccggtcgctacacgtccccgtttccccccaacttgggtctgggcgccctcagcccatcaagggtccgctcctccgcccgcctgccccctccgtctccctctatcgccggggcccagggcccgtctgctcggcgctcacttcttcgtgtagagctcctccagacggtgccacacagcgggctgcccgggcccggagttctggctctgctgtaggaagcccggtacgtccttcatgacagcaggaagacccccggcacagaagaacaaccgggatgtcagcaccgcggggatggctgccggaaatgctcactcacttccggcgccgagcggcgcggggcaggctgggagcgccgtagcaggccgggggcgggccccgctggttgctcggttacagcgcgtctctgcgctccggacaaaactctccggcgtttgcagcccacttcccgcgcacttggctgtgccattgaggcgtcaaagagtgtgggcgcctgtggtcgaacccgctacggactagctttgtggtgtcagcctttgtgacccggaattgctcctgtcaaatgaggatcttcccagtagtgttttgcgaggattaggtgtaaatataatgcctgaccatagtaaaagcgctcagaaagtattaactatcaccgccatccgggttgaaaaaggtgtgagcgcagggtacagaaatgctggctccaggtttgacctccggggcgagagatgagacaccagactagggaacttcctctactcgcctctacgtctacctgggcgcgccggaggcgtcggcaaggaggcgggggcggggcgcggaggcgggaccggggcgccgggggcgggggcggtaggcggaggcggggctggggcgccgggggcgggggtgggaggcggaggcggggccggggcgccgggggcggggcgagtccggaggactccttggactgcgcggaacatggcgttctggggttggcgcgccgcggcagccctccggctgtggggccgggtagttgaacgggtcgaggccgggggaggcgtggggccgtttcaggcctgcggctgtcggctggtgcttggcggcagggacgatgtgagtgcggggctgagaggcagccatggggcccgcggtgagcccttggacccggcgcgccccttgcagaggcctcccagacccgaggtgcccagggcattccggaggcagccgagggcagcagctcccagtttcttcttttcgaggtattttgggcaaggacaagcacttcttgcgtgttcgttgtcgacacctcgcccactctttctcaccttgccgtgtttcctttgcggcatgtctgggagtttacgtgcgttccaacaccggggcctccgtctttatgctgatctgtggacgtcacttatgggggttttgtcgtttatttcaccattccctcattgaaatacgttctaacctttagttattgtgcatcatgctgtggtgaataaccttgttggcacctcactgtttgcataaattcctagtactgggattgctaggtccaaaagtatatgcatttaacgctttaatgatccctcataaatgttgtgcggttaatactcccactggcatgtgatcgtacccgtctccatagtaattgcatctaagaactgaggctacataggaaaaaatcttaaggtccatggttgttaggtatcagatgccctataatggatgaatatttaagtaaataatggcacattgacttgctgtctgacacaactgctgaaaatgttggtgaaaagtgagtctcgaagtggtagctcacacttgtaataccagcactttcggaggctgagacggggatcgctcgaggccaggagttcaagagcagcctgggcaacataacgagacccccatctctaccaaaaatttaaaaattagccgggcatggtggcgcaagcctgttgtcccagttactcctgagactaaggcaagaggatcccttgagtccaggagttcaaggctgcagtgagctatgattgagccactgcactccagcctgggtgacagagcaagactcttatctacctgtgggaaaaaaaaaagaaaaaagtttaatagatcctgaagagttggccgggcgcggtagctcacgcctgtaatcccagcactttgggaggatgagacgggtggataacgaggtcaggagttcgagaccagctgggccaacatggtgaaaccccatttctactgaaattacaaaaattagccgggcgtggtggcgggcgcctgtaatcctagctactcaggaggcggaggcaggagaatcacttgaacccggaaggcagaggttgcagtgagccgagatggcaccattgcactccagcccgggcgaaagagcaaaaactccgtctcaaaaaaaaacaaagatcccgaagagtcagtcgttcatccaagaagccctgactgagctcttattctgtgccagactctgttctaggt

SEQ ID NO: 915391 - DNA, 4001 bp, Homo sapiens
ctgctatgtcccgtagaacggtaactgacaggcagtaggggtccccacaatgtgctgaacggccaaatgagaaacaagaagagccagtctggtctcctcgctccgggacctcagaggagcccgtctgttctccttgctccgggatgtcagaggagcccgtctggtcttcttgctccgggacctcagaagagccagtctggtctccttgctccaggacctcagagactccggtggtccccagctgtgctgcgggaggacagcctgaaggggtgtggcagggcacctgatggagaggcctgatgtccacagggcccggaagccagagggtccacgtggcaggcaccccatctcctctccctcccgagggccccgcagccacccggtacactcatctccccaaaggagagctcggatgccctccctgcaacagcagctgcccacacctcacggaagaccctgcgtggggcctcctccaccctaacctgctttcccaccacttggacagtctctctccagagcttcggctgcggtgacaggccaggaccggttaagtccctgtctgtggtggcgccttcccctgacaagtcccttactcctccatcaggccctcctcgcccctcagatttgctctccgaccatcccacagcatggttctcttggaagcgtccataaagccttccttccactgctggccgcaggcgcctgtctcccacacgttttcctggggctgaccccacctctactgcccctgtgcccccgggccttccacaggatgggaactgggcaccttgcagtcaagaagagccaaaccctcctctcacgaagcctgctttcaggtcgacggcttgatccttctcacagaggagcatcggcaaagggccagcccagggtcgcagctgtcgggagtaggagcggcacctggagcctgtctggacacagagtgccacactccagctgctcccgggggcctcttccttttccacccccattaaaggcagagtggcggacagggggaccccaaggtgtagctagggctgagttgtgcagggaggaggcgctggccccgctaggggcaactgaggagagaaacagagcctggattcgacgaacaccgactacattcctgaagcacgcacaacactctgctaatcaacacgatcgccacgtggggtcgggcgcgacacacaagatgatttcgtgcagccgcaagcactgaggagcaaccacaggcagaatgacgggggacacaggtgaagcttcgacagcaggacagagaaagcgtttctggggtgacgctggaggcgggtggcggggaaggggtctggatcgcagaaccgcgcggtcagagccaaggcgggcaggggtggggagggcggcgagagagacgcaaagcggccgcagggagggtctgcccagggtctcccccacctacagcgccgccctccgcccgacccggcgtcgggagctcggtccggccgctccccgggacccggggggcggtgctgccacaccctcaaacccccggccacagtcctggactccaagacggcgagagggcgctgccggggacccccaggccagcggtgccggaacccccaggtcgagggcaccctcgccgccccgcggccgcccactgccctcaccagaagaaggtgttggtgccgtcgtcgtagacctcggactcggtgctgcggcggccctcgcccggcccggtggcttggccggcagacggcccgtcaggcggctcctccagcgaggccctgcccgcgggcaccggggactcgggccgcggacctccggcgtccctgcgctcgcccctccgcatggcgtttcggcccggagccactccgcccggcgcctcgaccccacgcacaccgggtcaccggcgagaggacgcgccgcacacagcgcgaggagcgctgggaaggggtcgcggcgctggcccgcggggtcttaggagagcagcgcggggccggccagtaaagggtgtgcggtgcattgtggggcttgtagtccgcgcggggcatgctgggccttgtggtccgacgtcgcgggttggacgcagtgcttgctgggaaggatgacgcctggttgctgggaaaccggagccggaccgccctgcggctgaggtcgcaggaaccaagctgcggatggcgcgggtctcgccaaggcctccagagcttggaggtaaccacagacatccccggcggcctggcccgagtccctccaccccttcgccccttcctcgccgacggatcccggagcccagccccgttctccttttggggcgcttcccgacccttcaccccatgcgacccgggtcattcctttttgagacggagtctcgcactgccgcccgagctggagtgcaatggcgcgatcccggctcactgcaacctccgcctctcggattcaaacgattcttctgtctcaagcttcccgagtagctgggattacaggcggccgccatcacgcccggctaatttttgtatttttagtagagacggggtttcactatgttggccaggccaatctcgaactcctgaccttgtgatctgccgcctcggcctcccaaagtgctgggattacaggcgcgagccaccgcgcccggaccggtctgggtcattctttcgcaggatcgcgtgaaattgggcgggcgaaaatggtgcggacacgctgattttagttgacccaaattgttgacatggtaccctgcaaaaaaattagctcctgagccactctgaaaagcaatgtggcagctcctcaaacctggaaacaagtgtccacgccaaatttacacactagcgctcctagttgcagcattttgataatagcggcatgttattagccatagaggagcgaagcatgcgcatgctacagcacagctggaccttgaaaacattatgctaggcaggccgggcgcggcggcgcacgcctgtcatcccagcactttgggaggccaaggcgggcggatgacttgaggtcaggagttcgagaccagcctaggcaaagtggtgacaccccatctttactaaaaatacaaaaattgccctggcattgtggcgggcgcttgtaatcctagctactcgggaggctgaggtgggagaatcccttaaatccgggaggtggaggttgcagtgagccgagattgtgccactgcactccatcctgggcgacagagcgagactccgtctcaaaaaaaaaaaaaaaaatgctaggtgaaagaagccagtcacaggagactacgcattatgtgatccatttgtatgaaatgtccaggaaatgcaaatctatgaagacagaaattagatgagttttcaccgggggctggggaaggggtaataaggagcgactacaaagggtagcaggtttctttcggggcgatgaaagtgctgtaatattgacctcagctcctatctgtgaatgtcctaaaaaccactcaactgtccactcgaaacgagttgaatgggtgaactgcatgatatgtgaagtatatctcatatcagctttattgaaatataactcacatactaaatatataaacatatttgcggggctcctgcacagccacgcccagcagggatggggcctgactgtgatgggaccttcaccccagctcctgacacacaggctgggcagtgcgggaggcgctggctccagggggcgtgctgttgggcctccccaggcctggccccctgccccaggccctggccgcgtccagctggggtcggctgagtggccagagcagccagctcccgtccatgccatctttccagcaatcacccgacaggcctggttccctgtgaaccatccttcaggtcccctcccagacctcttcccatcccagcaggtggcgctcacattccaggcgccctctcggtggcgttggggtcatttcctgcgtatgggtgttctctcaaactgcacagagagccctcctgccgtccctccagggtgcagaggccggggcggggagatgtaccggccccactggggtccct

SEQ ID NO: 915392 - DNA, 4001 bp, Homo sapiens
gagttattgggagaattaagtgagtttaatacataaaagcatttagaacatggcctggcacagagcaagcactttatcagtgtcattgtgatgattatggagcaaatggtctaagatcacacagagaaaaaggaacaaggtcaggccacacaggactcctttttcccatccccagagcactggcgggtgaaggaggccccacaattagggcaagaggattctgctggcctgggcgatggagatgctgccccttcccacagcatccacagcgcccccagatgttgcctctctacagatcctccatgcagctccccgcactcagtggtggctggttagatgtgccgaccataaacagtggaaccagcccctcctctgatggttggagaggaaataagataagagccaggagagctggggaggaggaactcccacatggggctctggaggcccagtggggccaaaagatctctcccttctcaggagcagccacagcagctctctccgccccaggaaacccacccctgttcattcacttactccatcatgcactcatccaacaaataagacgtgcatgcttacatcctcattgaaagcccgaaagaccatctgatgtgaggctggtcaagaccagtgagggctgaggaaattccatgaggctccatgcaggaggtaggaggcaagtagcaggggacagggactcagggtgtcctgggcaccaatgacactccaggtactatggtaggtccttcacataggtgctgtctttctggctctagaaaaatggtgctagtactccatcctattttacagatgagaaaactgagcctcaagtggttaaataactggcccagagccacccagacagcacaaacatgtggaggagaaagtttcatgctcagcctgtgctctttcctctacccctactccaaggaagagaggatggaggaggaggaagaaaagcgggagaggggagcaatggtcttcagtactcatctttctagggaaaacactgttggccaggatgagaaaacccactcccttccagagaccacagtcctttgtagagtggggttctggaatatcaaactagaattctgctggcggaggagccccttggagctagagacctgcaggtagatggaagaggagcctgtgcttcctgagaatggtcatacttcctaggctttagaatgtgcagagcagttactcttgcaatgaacctatgacaccccatttttcagaagaagaaacaacaacttgcccagcgttcctcagctgcaacagtggggctgggacttcactcccagcagatagccaagtaccacccgctgtctgccctgaaacattccctgcagaccagctgctgctgatccaagtcctatggggatgatcagagagcacagtcctgccacacccttgggcaccaccagatcagtccttctaactctatagagacagcccccagcctcccaggattctcaggagccaagcagctaaggtccggctttggcaggttaagaaaaaaaaaaaaaaaaagggacagagagtgcaagctgtgggagtccaagacctgggtttgaatcccagctcctcagcttcctggctgcgtgaccttgggccagttactctaagcgtgctggtgtcatcttcccacccagactgcttgtgaatattgacagacagttgagtggtttcccctcgtatctgacatctagttaatgcctaagagaagctaatccttccctcctctgagcaccaagtcccctccagtctttggtaaactcaatcttctgccatcctagctggtaacagccctctcacctggtaaaactttgccttcttctgtgggtctagagagggcactaggctgcccaacccctgggccactcctccttacctgggcacagagggagcacaggattccagccctggaggcagtcagctcctgacagcagctagacaagaggcagcgggcagacagaggtgggagagggaggctgagagaggaaatagctgtcagccccagtgcatgtgtgtttaggggtggggttgggggaggcggggacagctggagagtgagttgccacacagatgttcaaatatcatcaatttccatcaatgccggcagcccctgctccacccatccccgcttcatgaaggagactgcagaagtccagagggcagtgcaagtgcacgtgaaaaaatcgatgtgtgcaagagagtgtgagcccgagtgtgactaggggtgtgcttttgagagtgaccagtgtgtaggataagtgcgtgagaaggagaatgtctcatccatctgtccactgttcctgggcttccatctcccgacaccagaatcctcagagaagaaacccctccagctgttctgagtttcccaggcagtgtgggggcctgtccatgagggacccgagggctctaaggccaggaaagtacagtggggtagtgggggcagtggcaagaacgcagtccaagaggtcagtcacttctgtttgctgagccctggggttgtcatctgtgaacgggagcagtaacatcggccttacaggctgtggtaagggttgaatgagatggattgcacaaagctcgtggcacacagtaagtgcttataaaaatcagcttccttctcctctgagggaaaaatgaatataggctctaaggcaaaggtcatatagcttttatttaaaacaggctcaattttgggaggccgaggcggatggatcacttgaggtcaggagttcaagaccagactggccaatgtggcaaaacccctgtctgtactaaaaatacaaaactcagccaggcgtggtggcacatgcctgtaaccccagctacttgggaggctgaggcatgagaatcgcttaaacccaggaggtggaggttgcattgagccgagatcacaccactgcactccaacctgggtgacagagtaaaaactccatctcaaaaaaaaaaaaatggaaatttaaactaaaaaacaaaaacaaacaaacaaaaaaacacacaggctcaaagccctaggataagagaagtttgcatttcattgttccctaactccttactctcatttgctgaccaagcttcctggggtcaggaccatcccttcaacctcagcatctcagcacctaatggatactcattaaaacattttaagaactcaatatccctgtatcgaggcaaaggcacctcccatgagatggacagcacaagcatcttccatttaggcctagtcttaacgcagagactaatgcataatacgctcttgctgagaggctaccatcatgagtggaaaatgagtaaaatgctatgcccttgtgatggggataatacatctcactgtagcccaatatggcagatcagtaagagccttggtgatccaaatcattaacaataggaaaatgtcccctctcctccaggtcagggaaggcttgatttccaaagacaaatgcctgcagccctccagagaacataggtggatgattccattctgcatggggaaagtgccctcttttccacccaccccggacacccaacccactgaaccacagacaaggccacgtgtgccttgtctgcgcacagagagtgtcaggctgtggttaagcccagggactctggggccagaccaccagtgtctggatctggcactgccactcctcagctatgtgatcttgggcaagtaacttcacagcagtaaaatatgaactttaaatggtgttccttctgcacagtcccaccctcaaaggacaggggttggagcccagatttatctttggactaagaaaaagaatcaccccttccccaccaccccaccccacagacacatctcagcaccagggcatcaggcttgagataaggcacagcccttcctctggatctcagcccacccttgacccttccactggtatccttgtacagtgaacatcctgcacaacctctcctggccaccctgctgaggtgcttcttttctggctaaaaaacccttactcatctgc

SEQ ID NO: 915393 - DNA, 4001 bp, Homo sapiens
taaatatttattagtgcctgttgttacccatgtctccttgattttccagaaaaataattcatgttttttttttcttctcattgctaagctcacttagaaaaattaggcaccatttaaaagacttggagaacagaccagcgtggcttcttgggcacagctggatggtgctggaagccaggcctgggatttggagagaagagtctccaacagataaacccacggaggtcaccagccctccctgcatctactctcctaacagctcaggatggccctgttacactactgccagccctggtgactcgctttcttagcaatttttaaagccctcttcattatgtacttcctacttaaaattcagaacctctgtgataagcaatgcctctgtcatacagaatgctggatctcagtttactgagcctctccctgtagtgtcacaggctgtgcactcacctagatgagcccctaagagcagggtttgcttctgcttcatctaatgccacatcttccctcaaatgtgtggtcaccaaatgttctgcaaaaagggtctctagctttttacttttctttttggcaaattaagccctttaaaatacttctgacctatctttatactcagatctcacctcatctcaagttttatggggtaatgcgccagtgaaaggtacagtggtattagtgagttctgaagcttctaattacatagacaatagaggctggctggtgagccatgcttctcatgctcccttctgtcacactgcagaaatcttaagctacaagaggaatgaaagagcctatttttgagaaatccccccgcactgcattttatgttgattatacctaaatgtttataacttgcttgaaaatgcctaattttcttcatagtgtaaattgttaacactatttacgtagcaaatccttttcttaagtaaccttcatttcaggcattgtaataaccataaataccaaactaataggtgctaatctagagattttcactaaattaattcacatttctcctagcattaaaaataatgtgtcaaagcatttaaaaatcatctgattaattacttgtgatatggatttcgagctttatctctgaatggaatgcttgtttgtagcttatttcttcaacttattttattaacaattatcttttaatataacttttgtctctttcctcgtttcacatcagtataggatattcttgccttaatctgcatttcagtacttgcaaaggctgttattatagaagtgcttttccttaatgctcagtgtactaccttttaacatacacatagagtagttatgtactcctattttacagggaaactgcatcatttagaaatagcataggaaatactgttttcagaatacagctgtcatttatgtaaaggaaataaatatttactagtcaaactgggcttatccaactttagtatacagattgggctctttatgagccataaaataaataatctagataagaatactctgcaggaaaaacagaatattaactccacttaataaatttataaagattatttaaatcagaactattcattcaccatcaacctgttttatttcaaaattttgacaccgatactattatattaaagcatagcatgccaaattttaatgattttttgttgtaatttcagatgaggttttaaaaggcaaggtatctcagaagactttaatcaaaaaggattttgtgatttgagtagcattaatttattttgtatgtggcattttatattaaacataactcaaacttcttagcattttaccttgaagaaacaacatggtatttgtagaaatggtacacattaaataataacttgattatcaaaatctcatgagattcagaagtgaatttttaagtttacttaccatacaatgtcttagaacaagatcttcgttcaggtatgttagtagctgatgctgagtaaactaaagacaactgatgaattggactgcagaccccttaaatggtgacttttatatataggtcttctgcttaccaagagaggctcttttattgttacagatgatgtcactcccaattctctggatctcaactataggttcaaagcagcacatacacacacccattgggcggtgcacactcttcttaagtttcagataattggatactaaaaggaaaacagcatttggcttgacaaggggcttatgcaaagacttttaacaaatacagaattataccatcgagaaaaattctatgtggattaatgaatctgaatttatactgtaaaaagactgatttcaaaggtttatgataaagtcattatcttacttgaaaataaaacccaaaaataagtgtatttgttataaccgtactgttggtacagtttttatggtaataaatcataaatgttaggcttactttacaagccattttcaaccaatccatgtcacttctggtcatctttcaaaaaacagatatagcccttttcttaaaggaagtgttaagaataatttgagaaaatgctcttagtacataattactttaaaagcttcaaaagtgaaattattttaaaatttatttaacttatattttatttgtgcatcttaatctataataataacatttgataagcactaactgcatgcctaactacatatattatcccactagatcttcacagcagtcctttaaagttagtacttaaagtactaaagttaagtgcttatccccatttttacatgaggaaacttaggcttggaaagcagaaaagatggaattcaacaaaggtctttatgacaccagattcttactacctcagtttctgcctagaaatacagcccttctttgaactccagtcttcttgactttaatttgcaaagtcatctgaaaacacagcaaaagctctttgcaacattttcccctaggggttaggtctttattctcatgttccctaagggatgatgagagcctgctccaaaacctattggaggcatgatgctgccacatgtctgacttcaaatattcctccagcaatattttcctggtccacctgtcaaaacaccctgaatgtctttgatatatctaggactcctttagacagctttgccttcccaccaaagatccggtgccagagtgggatcagttctctcagctctggtcccatcctggcttcatgtcatcctttttcctactagccattgtcaaggtttgactctaccttaggtaagagccagtacaaatttgaatagtaaccgtatggagtttataatgagagatatatactagtcctgtcctaggagattctccactctgggttaacctcacttagagtgttgctccaggctccattttagaagcagtagaaacaaatgggaacatacactgaggatatcaatcagtttggtgaaaatgttgaaaactataacatgagaagtagttgaatgaaactagaaaagtctgaggaaaaaaagacgggatgactttatagctgtgtttaattatttatagggttaccataaggaagaaggagtattctctgtggtttaagaaggaagggctgggttcattgggtttaacttggacattataattgtcaaaataaggaatcaagtaccttctcaaatagtgatttctccatcactgagaatattcaagtagaaggtagatgagcatttatcaggcatactatagagattcatacatagaagaaagttgaactagataaccaagaggtctcttttaactgtaaaaatctgttgtcttgatctttttaaagacctcttctgatgcaaactctacatgtgatgtttgtgtgtcatttttctgctatactctgttgagaagaagaattggaaatacagatggtttttcttttttctttgagataggatctcactctgtcactcagactggagtggtgcagtggtatggacatggcagcctcaactttcggggctcaagcagtccttccacctcagccttctgagtagtgggggctataggcacacagcaccac

SEQ ID NO: 915394 - DNA, 4001 bp, Homo sapiens
agatcagtaattcttttttttttttgagacggagactcactctgtcgcccaggctggcgtgcagtggtgcaatctcggcccactgcaacttctgcctcccgggttcaagcgattctcctgcctcagcctcccaagtagctaggattacaggcgcctgccaccacgcccggctaatttttttgtgtgattttagtacagacggggtttcaccattttggccaggctgatctcaaactcctgacctcaggtgatccacccacctcagcctcccaaagtgctgggattacaggtgtgagagccaccacgcctggccaagtcacaaatattttcaaggtttcaaaaaaatcctcaggttgaaataatagtatcttcatcatgctatatcagtaaaacaaatgagaaagataattgtttagtgctattagatgccaaacgctataaagatagggcaacattaaaaaaaaatcaaatagctcagattgtagataacatcttctaataaccattgtggaagattccacaaacaggccagtcacatttaatgaaagttatgttttaggcctaaactttgttatgagagaactttggagttccaccatgatttctaatatatgactaaaaattcccccaaatcagagccaaatgaactctacagttttcaatggatagttttatgaaaaatctggggaggggagagtgttaagggggtgcttttcgtcttacagttggcagggccttcatctggaatccctaacactgggaatgctgacccatactcagagctcaaagtatagaaagaatgaatgaaatcaggaaggcatgggaaagttgcctttcaattttagtttctgattttggttaccgaaataagaatacattacatttgttcacaaaggagaaatcaggctttgtcaacttccactttttttttttttttttttgagacattgtttcactcctgtcgcccaaggctgggctggaatgcaatggcgagatgtcggctcactgcaacctccacctcccgggctaaagtgattctcctgccttagcctcccaagtagctgggagtacaggcgcacgccaccactcccggctactttttgtatttttgtagggacgggggcctcgccatgttgcccaggctggtcaggaactcctgggctcaagtgatctgcccgcctcctcctcccgcctcccaaagtgctgggattacaggcgtgagtccccgcgcccggcccaacttgaacttttaaataaacgcctttcacagcttctagcctacctccaggtgccatttagaggcacagaccggaggcaaagcagcttgagacacctggctccggtgcatggtgacctcccccacacttctctagccgtcccaggctcagggcggtgggcgagggggagcgggcccccgagcctgcccctcggcccggtccctcacctgtgaagagttgcacaggaacctcgtctcgtactcctcgttcatggtgatcaccccgcgcacgttctcgtcctgtaccagctgccgaggcaaagaggtggctcagcaaagacggtggagaccccagcggcccgacagggacggagcggcggggacggggcaggggcccgggctccccggcccggctcacctggcgcgtcaagctccgcaacggcagcgcgcccagcagcacggtggggtcgatgcggtggtaccagtcccggtgcgcccgacccggcaccttcccgcggaacagggtgtagagcagcgtcgggtagaagagcacccgcgccaggccggcctccagcagcgcggtggccgccatcccggcccggcgcagcggcgacccgtcggcccccgcgctcgcggtccggacccgcgagaagagcaggcgggtgccggggcggggctgccagctgcactaggcctctcgcgggctcgcaccgggtgacggcggggactggcctggactctgggggactggcgggactctggaggagggcccggcggcctcggaggagggaccgaggtttcctgggcgggaaactgggaccccggcgaagggagagcgcgtcgcaggccagacacgtgtgagccctgtagcgtgggaaactgaggcccccgcctgtggccggtgacctccctcctccgagggaggggggttgtgaccccaggtgagaggggcaggaaggacccctgcgtgtggaactgtgactccggccgagggaggaggggacactccccccaaccctcgaccagaggaagggggcagtgacccaggtgcgggtgtgaccccgccaaagggaagacaagacaaggagaggctgtgtggcggggtagccctgaagaggacagtggaagggcttagagctttcaaacagaggagctacctgggtgagggcctgatcccagggtgaacaggggtcctgggttgaggtcgccttcctcctcccctcccctgtcctagggcagggctccctccttcatctgaccaaacagcagtgtttacatagcaggaaaaaataggaaaatatacattatattaatatatccttaagaaaaatattatgaagagctcaaatataaaacctgcaacctacaaaaaggtaagaagaatggttgtaatgccagctatttactttttgtttgtttgttttgagacggagtctcactctgttgcccaggctagagggcagtcgcaagatctcagctcactgcaacctccgcctcccgggttcaaacgattctcctgcctcagcctcctgagtagctgggattacaggtgcatgccaccacacccagctaacttttgtttttagtagagacgaggtttcaccttgtcagccaggctggtctcgaacctaaggtgatccgcccacctcagcctcccaaagtgctggcattacaggcatgagccactgcacccggcccaagcatctggtggagtttttgttttttgttttttgtttttgagacagagtttcactattgtcacccaagctgcagtgcaatggcgtgatctcagcacactgcaacctctgcctcccaggttcaagcaattctcctgcctcagcctcccgagtagctgggattacaggtacatgtcaccacgcccagctaagttttgtatttttagtgagatggcttcaacatgttgaccaggctggtctcaaactcctgacctcaggtgatccatccccctggcctcccaaagtgccaggattacaggcatgagccaccgcgcccggctttctttttttttttttttttttttttgtatttttagtagagatggggtttcaccatgttggccaggctagtcttgaactcctgacctatggtgatctgccagcctcagcctcccaaagtgttgggattacaggcatgagccacacgcccggcccaagcatctggtggagattttgtttgtttgtttgtttttaagatagagtttcactcttgtcacccaagctggagtgcaatggcgtgatctcagctcactgcaacctctgcctcccaggttcaagcaattctcctgcctcagcctcccgagtagctgccaccacgcccagctaagttttgtatttttagtagagacagggtttcaccatgttggccagactggtctcaaagtcctgacctgaggagatccgtccccctcggccttccaaagtgccgggattacaggcataagccaccatgcccggcccatctggtggttttaaaagattcattttcttttttttatattttgtttttgagacggagtctccttctattgactaggctgaagtgtagtggcgccatctccactcactgcaacctccacctcccgggttcaagcagttctcctgcctcatcctccccagtagctagaactacaggtgcccgccaccatgcctggctaattttgtgtgtgtttttaatagagatggggtttcaccatgttggccgggctgctcttgaactcctgacctcaggtgttccacccgccttggtctcccaaagtgctgggatt

SEQ ID NO: 915395 - DNA, 4001 bp, Homo sapiens
gtatactctgggtgatgggtgcaccaaattctcacaaatcaccgttaaagaacttactcacgaaaccaaataccacctgttccccaaaaatctatggaaataaaataaaaaaaggaagttcttgagaccagaacctcaggtccctggagactgaacactgccctccttgccaactattccatccagtctcctccaaggtgactgactccatcccttcaccatccgtctatgcttgtactccttcaacacatctctcggggcaccctctctgcaccaggcatcaggctcagctctggggacacctggctgcccttgagggagccgcgtgctgagaaaccacccgaacctggtgtgattgtaactcaagcttccccagcagctttgtcagcagcaccaagaggctgcccttaacgagccccaaggagaaagaggtggggacctccgcaaagggatgactacaggggcctggttggagtagaagatctggccctcaagcgggagggaagggtgactgggagggcatgcagtcaggacacagtggagaagaggacgaatcctgggatgccacatcacctggtccaactgaggacactcaggctcagtgtgtcctgggtggatcaggactaacgcctgggaatctgatctcaggtcctgggcttcttcattctcccaaacgaatcccaaacccggagtgtttgagtgttatgagagctctcctttgaggttgaaggaagcaaattaaagccccctctcccctttttttggtaccataggtagggaaggtagaaaatgaatggcacctgcccctccaagtggggcagggctggaattacacactttcgtggtacactcaggtgaattttggggttctggggcttcaatgtgggtgggatctagttgtgtaggaggggagcatgagtatgaaaaccaggaaccctagattctaatgaaagctttaccactaactctctggtgaccttggtccgccaccttactgggcctcagtttccccatctgtaaaatgagaaggttgaataagttcccaggattcgtctggccctgatcttctaagccctgtgatccttgataaggtaagcctcccaaggctctgacccgggcaatctccggttttgcaggagcctgggcctcaaccagaaacaagcagcatgctgggggaggggagcgcgctaagcttgtattctaggggagggtgggacgcgggaggctaaagctaaagggtcggtggaggcgaagcaatgggaaggctgggagccgcgctttagaggccagaaggctagcggcgatttccaatctccctcaggggcttcaggctccggagaggcgatgcagcccagagccgcgcaccagcctccgccggccgcagaggctcagaccccaaaccactatcccgattcctccccggaaccgcgcacgggcttcgtggggagtggctgccgctccctcccggctaccaagcgacaagccccctcctctgcatgggggacccctcccccagcatgcgggcgcccagagccccacgggggcgtggcgggggcgggcgccggctcctcggccgggagggctggagaaggtgtcagttgcggggccgcccgaaggagggacccgcgccctccaccttccggctccgcacacaaaggcgcagacggaggcgccgcacttaccggccagagcgggctccgggcgccggcgagcaggcgggcaggctggcgggaggatgcgcgcgcgagtgtgcgtgtgtctgcgtgtgtccctgcttgtgtctgtgccagtgtgtatgcgacgggggccgcgccgagctctgtgcgtctgcgtgtgcgggggcgtccgtccttcggtgcctccgtccttcggtccgtccgcctggcgctccgtcccgcgctccgtgcgcgctccctcgcccgaccgcctcaccaaatgcgcttcagctgcagagtcgctggcgcagccgccgggtgggtttggcaccccccagccccggctccgccccgcccccgggcgggcttccgccgctcgccgggaattgcgcagggctggcggggcgggggaccgggagagcggcctgctcccggggcacgaagggggccggatcacagacccttaacccctgacctcatctcaggtgcctccctctcccgagcaactctgcgcggagtctccgcagtcgtcgcccccatgccaaggttgcttggacaaggagggcggaggagtgggagcagcgcatccatttcattcatgattttttctcctcttgggagccccgggtcgggccgcgcggctacggcaactgccagagggaccccggcagggccgtgcgcgctgaacctgggacgggacagacaggcagacagaaggagtaggggccagcgagacaaagggggcagagttgggggagggagtcggctcattgggggcatgccgtggcgctccccgcatgttgccaacacctgcgcaagtggagcggccccatactagggcgcatgcaataccaggtgccgaggactcgttctaggacgctgaggaggcgtcctttttcccagttctccctgttcagcctctggggagctagagcgagtggacagcccctccctccactgagtcttgccctcctgacgtgcggcgcggggcacgcacctgttttggttttctcgtgggcaccaggggcccggacgagcagggagctgcccatgtgccccacaatcctgccacaatcttccgtattctccaggctgctagtgcgctggccagaggtttccggcattccatccccatgggggcttgaggctgtgggctgcacacagggcagggatcctaaactccattttttacacggggaatcagaggcgagccaccacgtagctaccaccctggttccagccaccatccacccccgccccccgggatttccattatagtctctttactggtctcccagcttccacccttggccccctgcagctgattctctacacagcagtcaaggcgatcctttaaaatttaagtcagagcacgtcgttcctttactggaaatcctacactagcactccatttcatccaagggaaagttaaaggcccctcatgacctgcaaagcccttcaggaactggctcctttttagctctttaacctctctttctaccaccctcccccttctcccacgctccagtcacattggcctttttaatgcatcatcggcgtggcagccctgtggcctcaggacctttgcactgctggtctgtctgcctggaaactcttccctctgatagtcacacggctactcctttacctcttcaaagtgtcactccccccacccccccgcccccgagacggagtcttgctctgtcgtccaggctggagtgcagtggctccatctcagctcactgcaacccctgcctcctgggttcaagcgattctcctgtctcagccttccgagtagctgggactacaggcgcccgccaccatgcccagctaatttttgtatttttagttgagacggggtttcgccatgttggccgggctggtctcgaactcctgacctcatgatccgcccgtcttggcctcccaaagtgctgggattacaggcgtgagccaccctgcccaggctcaatgtgtcgcttctaagataattgctgtaactatcctgtttaaagttgctggccctccctcctcattttctccatgcagctatgacttttatttctgttccctgcccctgaggctcactggcttcattgccagctcccatctcaatcccctcccatcccaatccttcagcctcacctcactaatctgttttttaaacaaaccctgtgttttcctgtctctaggcctttgttcacgttgtccctgttcagtctggaatgccatccctcccatgtcttgactaatttttaaggtccagcttaaataccacctccttctccccacatttccagggacactcagctctcattactttctgtctgctgtgatagtggttccttc

SEQ ID NO: 915396 - DNA, 4001 bp, Homo sapiens
aatgtgggtgggatctagttgtgtaggaggggagcatgagtatgaaaaccaggaaccctagattctaatgaaagctttaccactaactctctggtgaccttggtccgccaccttactgggcctcagtttccccatctgtaaaatgagaaggttgaataagttcccaggattcgtctggccctgatcttctaagccctgtgatccttgataaggtaagcctcccaaggctctgacccgggcaatctccggttttgcaggagcctgggcctcaaccagaaacaagcagcatgctgggggaggggagcgcgctaagcttgtattctaggggagggtgggacgcgggaggctaaagctaaagggtcggtggaggcgaagcaatgggaaggctgggagccgcgctttagaggccagaaggctagcggcgatttccaatctccctcaggggcttcaggctccggagaggcgatgcagcccagagccgcgcaccagcctccgccggccgcagaggctcagaccccaaaccactatcccgattcctccccggaaccgcgcacgggcttcgtggggagtggctgccgctccctcccggctaccaagcgacaagccccctcctctgcatgggggacccctcccccagcatgcgggcgcccagagccccacgggggcgtggcgggggcgggcgccggctcctcggccgggagggctggagaaggtgtcagttgcggggccgcccgaaggagggacccgcgccctccaccttccggctccgcacacaaaggcgcagacggaggcgccgcacttaccggccagagcgggctccgggcgccggcgagcaggcgggcaggctggcgggaggatgcgcgcgcgagtgtgcgtgtgtctgcgtgtgtccctgcttgtgtctgtgccagtgtgtatgcgacgggggccgcgccgagctctgtgcgtctgcgtgtgcgggggcgtccgtccttcggtgcctccgtccttcggtccgtccgcctggcgctccgtcccgcgctccgtgcgcgctccctcgcccgaccgcctcaccaaatgcgcttcagctgcagagtcgctggcgcagccgccgggtgggtttggcaccccccagccccggctccgccccgcccccgggcgggcttccgccgctcgccgggaattgcgcagggctggcggggcgggggaccgggagagcggcctgctcccggggcacgaagggggccggatcacagacccttaacccctgacctcatctcaggtgcctccctctcccgagcaactctgcgcggagtctccgcagtcgtcgcccccatgccaaggttgcttggacaaggagggcggaggagtgggagcagcgcatccatttcattcatgattttttctcctcttgggagccccgggtcgggccgcgcggctacggcaactgccagagggaccccggcagggccgtgcgcgctgaacctgggacgggacagacaggcagacagaaggagtaggggccagcgagacaaagggggcagagttgggggagggagtcggctcattgggggcatgccgtggcgctccccgcatgttgccaacacctgcgcaagtggagcggccccatactagggcgcatgcaataccaggtgccgaggactcgttctaggacgctgaggaggcgtcctttttcccagttctccctgttcagcctctggggagctagagcgagtggacagcccctccctccactgagtcttgccctcctgacgtgcggcgcggggcacgcacctgttttggttttctcgtgggcaccaggggcccggacgagcagggagctgcccatgtgccccacaatcctgccacaatcttccgtattctccaggctgctagtgcgctggccagaggtttccggcattccatccccatgggggcttgaggctgtgggctgcacacagggcagggatcctaaactccattttttacacggggaatcagaggcgagccaccacgtagctaccaccctggttccagccaccatccacccccgccccccgggatttccattatagtctctttactggtctcccagcttccacccttggccccctgcagctgattctctacacagcagtcaaggcgatcctttaaaatttaagtcagagcacgtcgttcctttactggaaatcctacactagcactccatttcatccaagggaaagttaaaggcccctcatgacctgcaaagcccttcaggaactggctcctttttagctctttaacctctctttctaccaccctcccccttctcccacgctccagtcacattggcctttttaatgcatcatcggcgtggcagccctgtggcctcaggacctttgcactgctggtctgtctgcctggaaactcttccctctgatagtcacacggctactcctttacctcttcaaagtgtcactccccccacccccccgcccccgagacggagtcttgctctgtcgtccaggctggagtgcagtggctccatctcagctcactgcaacccctgcctcctgggttcaagcgattctcctgtctcagccttccgagtagctgggactacaggcgcccgccaccatgcccagctaatttttgtatttttagttgagacggggtttcgccatgttggccgggctggtctcgaactcctgacctcatgatccgcccgtcttggcctcccaaagtgctgggattacaggcgtgagccaccctgcccaggctcaatgtgtcgcttctaagataattgctgtaactatcctgtttaaagttgctggccctccctcctcattttctccatgcagctatgacttttatttctgttccctgcccctgaggctcactggcttcattgccagctcccatctcaatcccctcccatcccaatccttcagcctcacctcactaatctgttttttaaacaaaccctgtgttttcctgtctctaggcctttgttcacgttgtccctgttcagtctggaatgccatccctcccatgtcttgactaatttttaaggtccagcttaaataccacctccttctccccacatttccagggacactcagctctcattactttctgtctgctgtgatagtggttccttctctttttccccaggtgcactatgaactcctggaaagtagggcggggtgtcttccctttccccagttcccagcacagaagggcccatcagcacatgtttgtggatcaacggcactgattgggaggccctaggctgggcctcaattggtcttttttttttttttttcccctaggaaaagacctagagacctagacccaattaggtccctgtgttgccctcaaggagtttcctgtggggtgggggaggattatatattgggtaaaaaggccatactgcttgggttgtgtggaagtgtgagtagacatttcagcctgtacgccaggacctgctccctaccccccgagagcatcatcaccatggttcggcatgaggctgatttctccaggctgcatcagttgaacaatagcagctactatacatgggcactttagtatgtgccaggtagtgttttgtgttttctcaaggcactgctctattgaatcttcatgacatctgtgggaggtaggccttttgacatccccaatttcagtagaggaagcagaaggaataagtgagttacttaaggtcacttaagaggtgtgtgtttcaaattcagatctagccagttccatagcacgtggtcacagaagcagggatgccttaacatgaaagccctttgggctgatggaaggaaggggagaaagtagggcttagagagcttcagtggcatcagcctggcccagattcttgatgtccccagctcaggggtcacagagtcatggtactccaggtgcactggggcctcacaggttcctgtcagtgctgcctctgatgtcctgtggtggaggctaatggctgcccttgtaaaggcaacttcggaaagctagcggtgcctcgcaaa

SEQ ID NO: 915397 - DNA, 4001 bp, Homo sapiens
ggcacggggagtgagcggctgtgacagggatgggacaccaagaccggcctctacagtgcggtgacatggaggccctggcccccagctgccctggcgctgtcatcccaggctgcgctgccagcaaaggcgtgcaggtcactcagcagggcctcagcactgccccctgcgctcgctggtcctggggagccgaggaccaggtcgccctccgtgtcactgtctctggcttcctcagcccgcacggggacctgctctgggctggacgcctctccacattgctgctcgccttccccagggtcagcctgcaggccaccatccgcgacgtggtcatagtctgtgtcctgctcatcctcctgtcgctcaaggtcattgtctgtggaccccagctcagctcgggcctgcagccagcgacctggggggctggcccagagcaggcgccgcgtgcggccccacagcgcggcacctaggcgggccgggtggtagtagccccctgagtcacggctgaggcggcgccaggccagtgctaggccagtggccagcagtaggagcagcagcagcagcaggacaacggtgacagagctggagcccacgctgtcctccgcgctgccacccgagcccaaggcccctggcagggccagcagcatcccgagccctaaggtgcagggcagagcctgtgggagacaggcaggggctcagagggctcagcacctggggtggggcctggtgtggggcaggctgggtgaccaagaccactttcgtttttttctctttgggatcctcttgggacagccaagcagaaaaggccaaggccttatttggtcaaccaggctctggccctgtgagatcagcccccatccctccagcctcctccctaccactcacctcccccaacagctgcattaagccacctgcctggggccttcgcactggctgttccctctgcccggaaagctccacctcctcccatcctcccctcccccgggctgcatggcctgctcaccgtgctcaaacttcaccccagtgaggctgaacctgaccttaacctctaccctgatgtctatcactgcagcccaccccagcaccccccagcactcagtgcctttttccttccatgtcacctaacgcaggagataactgtactcattttttatgtctattgtcttatctaccccccacaataagctgctaggaaacgggggctttttgggtcaagcatgttagtaggtgctcaataagtatggattaaatgtgtctaggctgcctgggtgggtgggagaggagatgggagggagggaaggaggttgctagctggtgtcagggctggctctccctgaggcctgggatgggggatggaggggcctggatgcacccagaggcaactgctcatcttctgcttggccaggtccccaaacgggggtccgtgaggcccctcttcctccctccccaccacggggctgccccagcggcagggtttccgttccactcccagtccctgagggccacaggcgtgcagggccgggggctggggggggctgggggaggcgggcgcagctgccagaggaagtctgcggtcggaacaggctaggtggggggtgtcgggggaggggtgctgaggtgcagccagcctcccccaccaccccaggctgtccgcccaggctccaggaatgcaagttcccgctcacaggaagaccaggtaagggccttcccagggctcctgacaggggcctggtccggtatggggtgctgggggccaggcctggagtcccagggagcccagctcaggtgagagaaaggttcagcctctgccatactcctcttaggtctcacctcttccctggggccaatgtggggccctccttagctccacaggcccagacattctagccccgaccgcctgtggcccccatcccaagaacccggggggctccgaggcttaccattggtccgcaggcccctccgtgccgggcacccacctccagctctggctgtgtcgagcgagaagtgagctcagtgctcgtctgcagtgaagggtggcccaggcttccgcttcctgcccacataccccacctgcccctccctgctgcaggacccctggtccacaccagaccctccccagtctctctggaggaggctgggctgccgggcctgtcctccaaggaagaagcagcaccaacttgaagctggatgcagccttgcatgtgttctcaggtcttctgcctcagtttccctgcctgacaatccaggggagcaatgcctgtggggctgctcactgcccccagaccttctgcacatgtgtgactcctgtgacatcctctgtctccaggtttccagacttctcagccccacccttgcagcagcaggtcagcctggcttttagaaagagaattttatttggaatgaaaatatagagcccaccctcccgcctcctctggggagggagcagagggctgggcagtggtcggggagatggtccctcagaggtcgaggagctcgcctgggcgtagacatcctccacaggaacagtgaggaaagctgggcgctggcttcggcctgggcctgggacgggtgggggtgggaactgacccctgcgctgcctcagaggctctgggcagccagctagcccggtgcgacccgctggcagaagctgagtgggaagggggcggcggaggagatgaaggtggcgtgtggctgtggccctacgcatccccgttctccatgcggcccagctgctcctccaggcggcagatgcggtcgccctgctccttgaccagcgccctcagggcccgcagctcctgcatcacctcctccagcttcccagcctcctgtggggacatgaagcaggggtagggggcggtggtcaggggctgctaagccatagccctcccaaacccaccactaccccagagagggacagcgaatggctgaagcccacacagcaggccagggccacacctggggctcccagcaccacccctgcctgcgcgtgcataccccggctctggccaggctgccgctgggggtggcatcagcagcagtggtggtggaggcgggggcccctaggtgggaggagcccggggccatggcgggccggctgtcagacaacacgttgcgccggctgatcttcaggtcccgctgcttgctgggcacgtaggcctcccgcagtgagatgaggatcgggtcggcatcccgcccgctcacccactcctcagcctccagggctgcctcgggcccggctgtgtcggggtacagatcatcctggaagaggtccgactgggcagggggccggggaggtcaggatcagttaggaggccccatcagggtcccctcatccctcccctggcctccaggcttgcactctgttaacccattctcccacggcctggaaagctcaaatctggcctttaacttcctttctggacaccatcaacagctccctcggaagctttcccacccttctgagcaaggcccctgtcatcaccttcccctgcaaggcacaggggccactatgtggctttatgggattctggggcccatggactgtgagctcctggagcaggccctatcagctcagctccactccccaaaatgtgcctggcatgttgaaagagcagtcggcaaatgctggccagagaatcatggaagcgtgtccgaggctcttggcatctgaggccaagccacatgtggcccggtcccctcttcatgggattccccactgcagccagactccttgttcctctctccattcccaccactgtgcccttcgcctggcctgcccccagtggatggcgccaccccagctgtgttatgggtcctgcctccttcaggaagatctgtgtggctgccactccctccctgactgcctggtgtccttctcctgtggctcatccagagcagggcccctgctcaccctctgtctcatccccacttgccccctgactggcacagcccaacagctggctggtacaagggcaagctggcatctgtccagctcactgcccacaaac

SEQ ID NO: 915398 - DNA, 4001 bp, Homo sapiens
aagaaatcttcaaatacaaggcttttttaacttcagacactgcttccctgaatttccttacatggacagggagaagacagcccccacaggcactgtaccttaataatgagaatcccatgtggaaacccttaatatttacaaagttcttttagacattggccagtggaagcccctcaaacaattccattgggcagagggtgctatactcattctacagatgcggttaactgagggtagagaagcctgaagagcaagtccagccctgtggcccggccctggagccagtctcctgacatctactcccaggttctctgcaggaggtcacattgccttctggcccccaggagagcctgtgcagaacctgctggggaaactgcgaggagagacccttgggtgccgagggtcacgcagcccccaggccccagcccccttctcctacagcctgctaggcggcattgctgccccagggtgatgcttctgctctctcctgtattcgcgctggagaagttttccctgaaaccaggttccatccccagccaataactcatttcctcagagatggtgtctgtataaaacaagcaagatggtcatttgcagaaacgcacagcaaggcagccctagaccgcttcccctgcgggttcaaaccccaacaggctccagaggctaagaggacgtgcccgctggctcagctcccatggcacgggctgggtgctccgctatttcacttctctccctcagttccccatctgtgaaatgggaatgccccttcagctgctctgcctcagcccctatggaaatgccaggaaggggaaaggtcggtcaccaaaacgccagggacagcattatctgaaaagtgaagccagaaaagagggtgagggtggggtggggagggggagccagcgcccacaaagcacgaattaaacacccatgaaatcaagcacgacgccaagagggccggctgccttgagaaaagccagcgtgcggccaccttttccccggcctgggaactttccccaggaacagggccctcggcccggagtcccgcgcctcgcccagggccccactgcccagcgcctggccctgccctgtcgcccccgccgcccctcgggcccctgcaggccgggtcggaggtctgtcggcaaaggctcagccaggccgcccggctctgcgtccccagacctccgcaaacacgccccctccggccgcctccggctaggaagccgggcccgtgcccgccagatgtgcccagcgccgggaagagccgggccagggacggcctggagcccgcgcggaggctttccccgggaggctcgggcaccgcggcacccggatcccgcctctctcccccgatcctgggcagccggaaaagggatcgatcgccggcgtgcgaggccggccggggtccccgcaagtcgccttccggggatccggggatccggacccccgcccccttccccggaaccccccgggggggtacgctcgggcaggtgcagtcaatgccagtcccgccccagcctcctgccccccgcccgagcccacccggcgcttacctggcccaggcgcagcagcagcagcagcagcggcagcgcccagcgcagcccgggcgagcgcggaggcagccgcgcctcccgcgccgccggcttcatgccccgcgcgccctggaacgtgccccggacgcgcgaatcgggccccgccgtgcgcccgagcccgggcaccgtcgtcgccgcctcctgccgtctccttcgcctcctcctccgccagccggtccgcctcgtccccgctccgcccgccccgggcttccccggagacatggcagcggcggcggcggccgcggccacacgccggagcctagcgcggctgccgcgggggggccgcgtccctgagcgcgcaggggcttcgcggggcggagcgagcggcgcccacccccagcgcgcggctacccggtcccggctcccgcggctgctcccgctgcctcctccgcgcgtcatgcggctggggctgctgcagggagccgcggcgagcgctcggccccctcccttcccctccccctctgaatattcatcgcttcctcccgccccggccggcccggcggctgcggagctccgcagcccctcgccgccgcccgccgctgcccccgccccctccgagccggccgcggatcccctcccgcgggcagaggaagcgctcccgcctcgcccgcccctccgcccagccctcccacattcctgggacttggagcccgggaccaggctccgtggctctagcgcctcgagccggcacccctcaggacgggctccccagcctcacaccaggtccacggcgccgggttcgggtgggcagaggttgaccgagacccctactgagagcgcagccaagcctgattgtagacagcaacccggcgaaggcgcgtttgacctggccctgggtgggcttgggggtgcgtgaaccccgaaattgtagaaggcacgctgtacattgtgttctgtcccccagcccccgagcgccggccagggaggcagagagcccagtacaagccagtccagggattagaaccccagctgtggcatatggtggacggggctctgctggtagtaccagccctgtgaactctggagacgcatttctcctctctggccgaccccacccaccctcctctcctcccgtgtgaaataaagatcgtactaggacgtgtggagagagaggtccactgcattcgcgattaaacgagacagtagttagtaaagtcctaaacacctagcctgacacatcgtgggactccacatacattagctcttctggaagctttcatcacgttgttaaagaggtcaatgaactgacaggagttaaagatcacagcagatattactcctgtgcccatgcacagaggaagacactaggatcagggaggctatgccacttgcccaggagaagccgcaagagaaagggccaaaccagagagtgctaaggaggaagaggttaattccaaccaggagagaggtgacacctgagctgggctttgaaggatgtgttgagtttcaccaggccagtagaggggagaagtgtctcaggaggtggggccaacttggcagaaacgaggcagcagatgcttcgagcttggccttcggagaaacaggaatgggaggctgggggattcatactgggggagacttcaaaggccaggataatgagtctaggctggattctgtgtgcagcaagatgcagaccacgaggtgtccaacactacctccagacacccgttgggcctcaggttaccatctacaagatgggaatacacattcacttacagggtctaagtggttcccaccagacaacacacccagacaagcactgaggataaagaaactttgccaggccgcacgatggctcacgcctgtaatcccagcacttccggaggccaaggtgactagatcacttaagctcaagagttcgaaaccagcctgggcaacggggtgaaacccagtttctacaaaaattagccgggtgtggtggcacacagctgtagactaagctacctgggaggccgatacaaggatggcttgaacctaggctgcagtaaaccaagatggcaacactgcactccaacctggggaataacgtgaaaacctgtctcaaaaaaaaaaaaaaaaaaaagaagaggctgggcgtggtggctcacaccacacctgtaaccccagcacttcaggaggccggggcaggcagatcacttgaggtcaggagtgcgagaccagcttggccaacatggtgaaaacccatctctactaaaaatacaaaagttagctgggcgtgatggcgtgcctgtaatctcagctactccagaggctgagggcaggagaatcgcttgaacccgggagacggaggttgcagtgagccaagattgcaccactgcactccagcctgggtgacagagtgagactccatctcaaaaaaaagaaaagaaaaagaaaaaagaaaccttacctatggacttacacaccttgcca

SEQ ID NO: 915399 - DNA, 4001 bp, Homo sapiens
aacaaaccttaacttcaacccccttgttccacagcaactgatctgctcatgggccttccacttttcaattcaacattactgagtgcctacaatgtaacaggcaagtgctgaatgaaataacagcatataatgataaacatagatggtgatccgcaaagtggcttactatctcatttctctcagaagctaaactactcatccagaaaaaataatttaaaaaaattacatgacctggtaagtctcctatttagcaatcttgctttatactatgtctcaactactgcctcatgagaactttaccaatctgttgaggaatattccaagcaggtgaatttttaaaattacaatctttggctgtcgtctcagacagaaaacaaattgcttaatgtttatacttatacccatccattcaatttcgcatcgtctatgagaccttaccaccctcaggtgtttaagcttattatacaaccccttttttttgagatcctctttattattccccccaatgtagtttggatgtttgtcccctccaattgtcatgttgaaatgtgatccccagtgttggagatggggcctagtgggagatgtttggctcatggaagtggatcccttatgaatggcttggtgccctccctgaagcaatgagtgagttctcgctctattagtcaatgggcgagctggttgttaaaaaaagcctggcacctcctctcctctctcttgctccctcacttgccctgtgagttgcctgcttgctcgcccttcgccttccaccatgagtggaaggtccctgaggcctcaacagaagcagatgctggtgccatgcttcttgtacagcctgcagaaccaaataaacctcttttctttataaaataccagtctcagtattcctttgtggcaatgcaaaatggaataacacacccccactttctcctgctcagccacttcttgtatttagagtgctaaagtcttttgcacaaaattttctcagtgtaccctccacaaaataggccagattggaaaccccatacaagatccctgatgcatccgttacctagcacaagccctgacaagcacgaaacaaaacctggtttagcgaatggagggatgaatcctgttagatagcgatggtcatcctcatttcacagacgacgatacggagggccagagggtggagctggttagtgcgtggtaaaattcctcaaaatcaactcgtcagtgcatgcaagcagtatgtatgatcgggattcaaatcccaactatgctgcttcggaaactgaacgtctgggctcatttttttttttttttctcctagccactagaccaccagggactgggttcatccagtctttggtaaaaaaggggctaaaatttgccttgtaattacattagatatggtggccaatgctcctggcatacaagattagctaacatttactgagtgtctacgccgcgccaggtactgtgtaacataggcgagtttaacactgctgagtttcacagcaaccctgtggtctacaccaagggactcctaggggcagagacgtttcttcgagtcgcagaaccgggtgtgggccccgcacccagacgtgggccatcgccctccgcagtcggctccgttaaccatcaagctcccccacccctccagggctggggacactccagcccccatcaggatgctggaggccgtccgaagccccacgaagccgaccagcgcgcgtcgccccagcagcccccgcgcccctcccgggcccgacgtcagcacgcccgccggccccgccccggtgacgttccggggcccggcgcccaccgcccgccgctgtacctgtgtgcacaccctacctgtacaatcggtggctcgcgctgaaggagatgcggcgggacacttgtgcctggcagcgacggccaccaccttccgtgctcatcttcccggcgctgtctgcggtgctcggccggcacctcctcccgccgcgcggccggtgcctcctcccaccgcggctgcgcagtgcgtgccagacgcgcccctaggaagtgcgtctccgcttccgctctggccaatcccggcctcgggagacagttaagggtgtctctcgctatctgaatctcttcggagagcaagatttgggatacctaagcataccctggagtggtcagggtgggtggggaccctgtgtccttgatctgtttgccccgcctgaggtcacgccacgtagttagggcccgtctgggcacactttgggtcctgagtgacctctctgagcctcctctcccactctctcctgtaaagctccagtgactggtgactcaatcggatgaaccccagggccacagtccgctttatagaccaaaaggagcaggaattgagccaggcgggcgtggtgacgcactcctgtagccccagctattgagaaggagagggatcacttcagcccaggagtccaacctgggcaatagagcaagaccctcgtttctctttttcttttttctttttaattattattatactttaagttctagggtacatgtgcacaacgtgcaggtttgttacataggtattcatgtgttatgttggtttgctgcacccatcaactcgtcatttacattaggtatttctcctaatgctatccctcccccagccccctactccctgacaggcaccggtgtgtgatgttccccaccctgtgtccatgtgttctcattgtttgattcccacctatgggtgagaacatgcagtgtttggttttctgtccttgtgatagtttgctgagaatgatggtttccagcttcatccatgtccctgcaaaggacatgaattcatcgtttttatggctgcataatattccatggtgtacatgtgccacattttcttaatccagtctatcattaatggacatttgggttggttccaagtctttgcaattgtgaatagtgccacaataaacatacaggtgcatgtgtctttaaagtagcatgatttataatcctttgggtatatacccagtaatgggatggctgggtcaaatgatatttctagttctagatccttgaggaatcgtcacactgtcttccacaatggttgaactcatttacactcccaccaacagtgtaaaagcattcctatttctccacatcctctccaacatctgttgtttcccaactttttaatgatcgccattctaactggtgtgaaatggtatctcattgtggttttgattggcatttctctgatggccagtgatgatgagcattttttcatgtgtctgttggctgcagaaatgtcttcttttgagaagtgtctgttcatatgctttgcccactttttgatggggttgtttgattttttttcttataaatttgtttaagttctttgtagattctggatattagccctttgtcagatgggtagattgcaaaaattttctcccattctgtaggttgcctgttcactctgatggtagattcttttgccgtacagaagctctttagtttaattagatcccttttgtctattttggcttttgttgccattgcttttggtgttgtagtcatgaagtccttgcccatgcctatgtcctgaatggcattgcctaggctttcttctagggtttttatggttttcggtctgatatttaagtctttaatccatcttgagttaatttttgtgtaaggtgtaaggaagggatccagtttcagctttctacatatggctagccagttttcccagcaccatttatttaatagggaatcctttccccatttcttgtttttatcaggtttgtctaagatcagatggttgtagatgtgtggtgttatttctgaggcctctgttgtgttccattggtgtatatatctgttttggtacccataccatgctgtttttgttactgtaggcttgtagtatagttcgaagtcaggtagcgtgatgcctccagctttgttctttttgcttaggattaataccgtttctttaaaaaaaaatttttaaagagcaagaatttgagagc

SEQ ID NO: 915400 - DNA, 4001 bp, Homo sapiens
gcctgccagctgttatttctggaataccattctttttataatttgcccctgagatttttgtaggaattatgcatcatttggaagggtattcctactccagtagaaattcaaactagtaacatctggaatcagatgcaaacataaataccaatatgaacctagcctgtttgggtgcagatcaaaataggaattctgctcaccttaaattgtaatttatctgttcttgatatttctgacccaacggggaccatctaaaatctgaaagttgtcagttttaacaccagaggccagaagaatgatagtacagtttgcttgttcacagagaaaaagttctaacataaaggtgaatgaccttgaccgttactatctgcgaaaatcattttccctgtaacatttaaagccacataattcacacattcacccagttctatttgttaggcatttgtctggaaaagaagtaatcaatgactcaggtacatgtaggatatactcaccgcaaaaaagtagaaactgcaaactgtccaccaacagtggaatagtaaatgtctttaaagacattagaatattaaatagtcattgggaatcttgggaaagtaatatgggaaggtgaaattaagtgacatgaatgtatcataaactatacaggatgatctcagtacacacagggaaagatcaaaacctaacgagtagtgggattaaaggtaatttgtatttatacctcgactttttatgaggtcaaaaattacatggtgattttaacatgcaaaacactccagtgattatttggatctcaaagtccaacattaccaaagtctccaaagttcaactcccgtgctaactaaagaactaggccagggagtgagtctagttggtcataaggcagatttgtggcaaaaacaggacttggtacactacagtgctttttccagcacaccttaccctaattcagggtgaagtgcaggagttcccaagcagacgtttaaagtaacaccctggccagggctgcgaagtaaccacagagagggaattcgtgtgtcccctaagcaccaattacaaactaaaacggccatcaccagatgttccatacattgggccaggcgccgtggctcacgcctgtcatcccaacattttgagaggccaagacggggtggtggcgggggggagggggggtcgctcgaagtcaggagttcgagaccaacctgggcaacacagcgagaccgtgtgttaattaaaaaattaaaaactaggctgccaagatggcgcacgcctgcagtcccagctagttggaggctgaggtggaaggatcgcttgagcccaggaggtagaggctgcagtgagcagtgatcacgccacttcactcagcctgggcgacagtcttaaaaaaaaaaaaaaaaaagtcctaatctcaggaaccagtgggttaacacataaatagcattcctcttgataaactttatattaatccaaagggaagaagagggagtactgtccaaaggattagcagacacgcactatgatcactagaaagcaatcgtggtctgtatgtaaggcaatccccaaaataatttgaaaattgctgccacagcctcccacatactcctgggttctcaacttctactgttttatgagcacccaattctaagtggggcagcagagcacttttgtactccacagtacaagtaccactgaagctcccgtcacaacggaattaaagacgaccctactgcggcgagtttccaccgagagctccagaaagtaccaggcacaaaagaaaaatacatggtcttaagcgaggtctcatttccatacggcaatgctttcctgaaaagaccaaagtatgtgaaagagggcaaaaagaagacaacagacaaccgttcagcagtgtgtccatttgtcccttcccctgtggaacccagaaagtaacccactccaaaaatcccacacttactttccggcagccggccgcgccgcgtttccgagaaaggaagctgtcactgtgcgtcttctgcgcaggcgcccgagccctcatgggaggtgtagtccaagtttgtgggaaatgtagttctgagaaccgagcttggtgctagaatctacctgaggttttctagtccagctaccgtttctccgcccacagggcagaatctgggcctgtggcgggacagcaataaaaggaggaattgtagtgctacgctaaaataatagaaaaaaggtaatttttcaaattctgctatccttatacgaaaactaaaagattgaagatcttggctcgattttatacctagttaaatgagaagaaagttaccattgagagacaaaaacatttactattagaattcaaattaaaagctgaaatgaatatgataatctcaaaacaaacgactaggtgccctgagagtgaccgaacagagcggggagcgttgcttcagcaccacggagagatcatgactgcagtttcgtgtgggtttttgtatttttgcccccaattccagaaatgctgatcaaaatctcaaaattacaattagaaaactggggggcgggggggaggtggaatttggttctttcgtccaaattgagcggtcattaaatcattagtaccagggatccagggatctataccggattatgcaaacgcatgtaggacgtagaggttataccgaaaggtaatgtttttaacaagagaccacatttcagaataaaagctttaaaaagcctatgtggaacatcacaggtatctagggcaggaacagcagttagagcttgaacagttctgcttcctttccgcaactgtggcattcgaggtcattcgtcatatcaaattcatcagattttgtctccactttgctaaccaattcgctaacctttctgacatcttgtgatgtggaggcggaaatttccagggaaaccgacacggggcgtaaagcgcggcggggagtccggggggctcccgcctggagggctgtgtgagcggcgggccgcggggcggcgcggggggcgctctccactctgcggaagctgccccctctgccctccggtccgcgccctttcgccccgctctctgccctccgccccgctctctgccctccgccccgctctctgccccccgccccgctctctgccctccgccccttccgcgcgccacccagccttccagcgcctgcgcgccgcaccgcggtggtcgcgggcgcggacgcggacgcctgccccctaaggaagcccattggccagcggatggggccagcaccgcctcgcgccggtggtggaagcacgtgctgggggcgggagcagcaatcgcagccatggcgtcgttactgtggggaggcgacgcaggggcggcggagagcgagcggctgaacagccacgtaaccgccaccgagccggggggccacagccgcgggggtggagctcccactcgcagagggagatcggctgggaggggagggagagcccgcgagcgttcgaagtggggcgtcagatgctggaggggagatgcgggaagggtttggaagagggccacagagggagaccccgtccccacccccacgagaggcaagacctttggttagaaagggcaaaaatgacgacccctggaaatccagggtgggaacgcagctggtagtcccagctagaccccgagttttctactctgcccatttgcccattaagcctcacctcgcttccatccatttgccagcgcactttcctagccaccctccccttgttggtgccgtgagccccaagtactgcccaactctaaactagaggcctaggaaagagaaactgcatgtacagggaatacagaaaatctccaattttagggtaactcatacaggaaacccaaccttgaaaggaatctgctgctacctaatattgcaaaggaagcaatacccgggtgtccttccctgaatccctcccagcccctgtggtagggaagcactgggctgcttgagggcttgcatcctaatattggttgaaatttgtgtctctcaatagttttcaaacct

SEQ ID NO: 915401 - DNA, 4001 bp, Homo sapiens
acccttcccaccaccctttgtccatcccaggattacgttaacccctagtgtgctggaccaaccagagctctgggaagctctcgtttctctgggttccggatgtggacatatgtaattgaagggttcctggaagctcaaatccccatggccaggcaagtcctagagcccgaacttctgtatctctggctggcttcccaggccatccagtgtgagaagacctctcactctcaccaagaccaccctctgggggcagggtgggcagtgacacctgtgagccctggattttccccaccccccacatcgagcagggcagcaccccaggcttcacgggtggaggcaccccagtactggctttcacaaactgcttcccagacatccaccacttagtgagattggcggggccctcgtagtgagctggctggcagcagaagaggcatagaagggaatgaggccaggcttctgccttccaggagtgcaccctagccccggaactaggcagccagactgttccctcgataacaaactgcctggccattctgcggcaaagcacattgcaggaactcgggatctaatattcctgccccacgaggagatggtctctgtacactgaccccctattctgccaccccaaggcggggaccacgtgctccagtcaagatccgcccccctccccaaaatcccatcttgctagagctgcaggtcgtctctggtttctacccagagagctggaggaactccccacaccccttgacccacgcttggtgtccagtcagccggcgagctcggcagcttccccagggacacaaagggttaaatccaggcgaggggactcggtcggatttgcctcctaaacgcattttccagttcattccccagcacaatatgcctgggctggtcccagcctccgtccccaccccacccgtcagaatgggccaccagggccaccccggggtcgggcgcgaggttaacccctcggctgccggcagcccgcacctcgaggaaggacacgcggggcaccctcgggaaagtgggtcatgcagctacttggatggcaggaagcccgcggtgtctcctccagggagagcccccagagctgggagcagagttccgagggggagcccggtcccgcgccaggccgggaggaggctgccccggcctcaccctccaggaaaggaaccgcaggtgagcgaggagccgcctctgccgcagcagccgactctccgcgcccgctgtggggcggtgtggggcgggagggggcccgagcgtcctgagccgtctggcaaaggggccgccgaaagagacgaagcccccccgccatactccaaacccgcagctccgagactgacgccctccccctggggctgttgtctcccaccccaagacggtgattacggtgattattttgcatttatgtaacacgcagtgtttccaaactgcttcccgagcagagagctggttattaaataaacagaacgctattacatattattattttttgtaaagaactgagcggagaaagtgctttcatgctacatagagacgtgcatctgactgcttccctgcagggcaggcggttcggcttctcaacctctttctccgccgtgccacctcccaccccctttacccaagccgtgacccaacttttctggctcctttcactccccacaatccagtcgtgcccgccatccggctcccagccccggggaggcattggatgggggtggggacagcagaggtgagcgctcttacctgggaggaagaatgcggtcaagccgagagcgagtccccaccagcgtccagcggcgcccgcaagccccatccgagccatcgggggccgggggtccggcgagaggggcggcgagggcagcgctcctcgcgcagcagaaaccagcccggaagatgagggaagatcgctggcggtcggcgggcgctcgaaggatccaggtcagctgcagccgtcggccggggcggggtgggctgggtgggatccgcgcggccgcagtccgggccccgggccgccgccggctcagaggctcggcagatgcccgccgcaagttgcacgagtcatgccccttcgcctcctccgctctcctcccggcgccggtccccgccctcttcttccacgcagagcggggctggggagagggacccacccccggcgcgcccggctgcccggttgcgcggcgcgggctcctggccccggcccgctcacaccctcccgctcggctccaacttgcaggcgtccatggccggccgtcctccgagggtggcgggacgcacccgggcggcgcagaaggctcggggcccaggcggcgggcgcggggctcggcggtcggcggcccgggtggctctggctgcgcggccgggcgcgaggagaacgggtcggaggcgccgcgcgtcccagccgccgccgctctgccgggtgccggcgatccgcaacaatgtggagccgcgctcgctgctctcgctctctttctctcactcgccgagctccagcctctcacccgctcgcccgtgatgtcagccagaggggaggggttagcgttaaccccctcctggcctcgatgcgcgcccgccggggcccggtcggagcccgagcgcacgcgccttcccgaccgaagcagaggcggatcgcgagcgcgggctgcggggtccggctcaggaccctcgctcgggagctacccctcggccgccttccagctggggagccggctggagcgcgggctgccctcctcctccgctgacaaaggcaggcagtgacccctagcggccggcggcgccgaggcgcggcgggtgggggtggagttaggaccgggccgggggcggcggtggaggagagggcgggatggagaatcccggctagcagcgtgggagctggcagggcttctgcaagccctctgctcccaccctggccccatttcacagacgaggaaacaaaggcccaaagaagagttccgcccgggacggaacgtggcatagctcgcaacagaacccagtctccggagatccctctcctctgcaccacttggacgttccacggagaggcagcggtgcgcggggcgacggggagctgccagagaagtcagtggtgggcatgagtgggtgagacgggcccactgaggtttctggtagagtttcttttctaatccctgctcccttcgggggttccttttccaaaaattgaagcaccccgcgccccgcccttgcccaaacatagcctgaaaacgagctctcctccagtttccaggaccttagttttgagagatttgtgggattcccgcgaaagtggatcgtccagtcagtgtccctggcagggcagggactctccgccccatcccgttcaccacccactacatccgggtgtggtaggatttctgccaaggcgactgcgccctccgggccttccctcttccccttactctggtcctcctatccccatcccctccccctgggggaggaagacagacagagtttcccactaaggagagccgaattctccccagaccctggccggacactgctccctctaccctttgcccagccctctaggcgggcaggagcagaggggaagtggctgtttctgataacacgtaaattctggttcctcactggagaaggggcaaagacagcgccatattcccactgtctggaatccggccctggagtgtctcggtttctcgcggaagtagtcagatctggcattgtcatgaacactcacccactcactgtatggtcttttacatttaacaaatgtaacctgggctttctttgtgtcaaaacacagtgcctggcttggggatacagagacatcatcattgtcctgaaggaactcaatctagttgaagggtgggggaagacagacatagaaacggatgtcgtaaacaaatatttaatatgggattgtgtgggtttggtgggtcacagaaaaagtgcccagtttagcccggggtggggttggtgtaaaggcttcagggaagcgaacacagggtctcggtgagtca

SEQ ID NO: 915402 - DNA, 4001 bp, Homo sapiens
gacggatgggcagggaatggggtcagggccacacaccaacactcagccaggcccagccacgcctggacctctggcccgcctgccctgctcagcagtcccatccctgtccccaatttgtttctccctgtctcaggctttggggcccagcggttaaggttctggtcccagcattcctctgactttggacaaatcactctctttggcctcagtctcctcatctgggaaatagcgctggccatacccacttcagggactgaggtactcgggagaatgggcaccccttccccctgcacacacccccagagaaaaaagtcatttgctcaaggtcacacagtggctagagactgggctagagactgtcacctcccatccttgcactgtccagttccccttggccctcaagcctcaatcccaaggagacccagaggcaccagaaactaggatgctgccagtgcctggtctcccagtttcctgggtcccctcctgggccgtctgcccgcccctcccccactccccaccgaggcgtgtcaggttgctgacatttaccagtgaccccaccggacacttgatctctgccgccccagctgccccagccccgcctgctgcacaggcacaccgcgcatacatgcagcaactgatgtgtccttccacctgggcccagccaggccacaggcgccgtcctgcccaccagcacccactccaaccttctccgagtgggcactgaccctttgcagccagcccacctgctctgagctccctgacccccactcctgccccaggtttctccctcagattgtcccagcaccccttgtgcctggcacccctggattctccacccccaagaacctagagtgacgaggggcagccacttaagtcaagatcgccagctccctggcagcgccttcagcccatacccccaccccaggctccccagcagcaccttggggtccttctcatagtagtgctgctgcgtgcggatccagcgccccacgaggtggtcgcgcacggtatgggccagagcaaagtagtagtctcgtggggtggccacattgcggtcctttacgagtgtgaaatgcaggtgccggttgaagttctttttcagctcagtcacgttctccacgccggccaggccacgcacactgatttgctttcttttctcttggtctgacaggggccgggacatggctgcaggagggcgggccggactggactgatggtagaggggacggcggcctcagcactgcctccagccaaggagtggagctccccagcctcaaggggatttaaagcctggctctgggcagcacgccccgcctcccctgcaatgggagggtcttggcctggcagctcagggagctattttgagggcaaggggaggagaggagaggggagggagaggtgagctccacttgggccgccaagactggcctggcttgttcacaggcctgtgctgacccacttcctccaggccttgcacatggtcttctgtcccttgtccctgccttttggagggttggatacaagaaggagcaggcagagtgctggattggggagctgtctgtcagtggctgaaccaggatgggaggccatgtgttgtggcaaaaggaaccaggaccccctgcaggctgtggtgcaggagccaagtcagtgtcccctgacggaagaggtgcaactagcagaggccactggatgtctttgagaaaggggcccacgaccctgcattgcaggggtggtgtgagggaggttgtgtgaggcagggccacagccctcactccacccccaccgaagctgagcagctctaggctccccctgttgctgtccctcaaggagccctgaagtgaccttttggagagggatgctcaggttactggccagcattggcgggaggccgctagcctgcagcacggggccctgggaactgtagtcctataggccctcggcggtgggagaaactgaggcattccccactccatcatcatactggtttaatgacagtaagttctccctgtgattccactgcttaggaagtgattagaggccttctttcacttcttcctgccacctggggccacactctgagcaggattttgtaaaccagctctgtgacctggcctataaaatgggtgcctaatctgtacctcgaggacctcaccccatttgtgtgcatagccccacagctttgagcccttccctggaggctttggctatcctcccattcactgctgtgttctggccccagcactgacttgctgtgtgacctcaagctggttgctttacctttctgagctttggattccttcaccaaatttagactctccaatgagaaaaaaaaaaatccctgcctctcagctgctgcctcctcatcttgtgagggcaggcttcggatcctgctgttctttaagagaaaggaaccaggaccttgtgctagttcaaaggctgtttgggcctcccgggtggtgggccggtggaggggaagagctgggtgttctgttctgaaggccaaggaagcaggtcaaaagcctggacagctgcaggatactattgagagcctggttcggagaaagccaagctgtttctgagaacttttttttttttttttttgaggtagagtttcattcttgtcgcccaggctagagtgcaatggcatgatctcagctcactgcaacctccgcctcctgggctcaagcaattctgcctcagcctcctgagtagctgggattacaggcacccaccaccatgcccagctaagttttgtatttttagtagagacggggtttcaccatgttggaccaggctggtctggaactcctgacctgaggtgatccgcccaccttggcctcccaaaatgctgggattacaggcatgagccacagcgcccggcctccgatcactttctgagccatggcagacccagccctggaatcaccggcttagtatgtgggccaaacttcaagtcctacagaggtctccaggctcccaagccctgctctacccctgcccccaaaaggcacgggcacactgtcttctgtggtgcctgccacatttccaagtagagaaaaaagatcgggaaaaaaacaccaaaatacacctccacagacacggggatgcaaacaacttttccttacatttttctgttaatttccaatttctcttaagaagtgtttcataaaccattaaaaaacaatgctggccgggcgcggtggctcacgcctgtaatcctagcactttgaggccgaggtgggtggatcacctgaggtcaggagttcgagaccagcctgatcaacatggcgaaaccccgtctctactaaaaatacaaatattagccaagcatggtggcacatgcctgtaatcctagctactcgggaggctgaggcaggagaatcacttgagcccgggaggcagaggttgcagtgagccgagatcacgccactgcacaccagcctgggcgacacagcgagactctgtctcaaaaacaaacaaaaaaacaatgctggcagctgtctggtctcttcccctttcacagtttgcaccccagcctcagctcctgggcctcatccccatcctccactaagcacagcttggactccagcttggcctggcatccaaggttcttcacagcccgcacttgtcccttggagggttgctgtgagtagagctgagacttcttggcagtccactgccaggcaggcagtagcttgttaaccatgccgtcacctcacagcccaatcgtggcagcctgctttggccacacacaccttctttgcattgacccctatttcctgcaagactttatgttcctgccactgaggacccgatccccatagaccatccacatcttacaggcagggaaggccaagttcattccatcctttcccagctactctcccctcttgcacccagggcgcttgctctcaggaacatttttactgggaaatttttaactttctccaactaccttttctgtggcttctttccgtctttgtcatgccatcactccccac

SEQ ID NO: 915403 - DNA, 4001 bp, Homo sapiens
gtgaatctacttactgttttcaagtgtgtttgggaagtcatttcgtgttactctgataaataacatttggaaaatatgacaagtagattttagtttcttgcctcagaagtattctactaaaagaagtaactaggtagtatttcagttccatttacctaataaatatttttcatttaaaagataaaaaatgcggcacaaatacctatcatgctgttcaatgatgagaaagtaattttcatttgtaaattatcctagtcaatgcaaaaagctacttgaaaaagatagtcaaattaccatcagcaagaaataatgggtgaagtgccaaacgtctttcatgaaactccttaaaatggcttacttgtatgtaatacaaaattatggctatttctgaaaggtttcagcatttaattacttagctccaaattggcacatcacattatttttgttaactcccaagtcttgaaaacaaagggcctaaaattttctgagaaagcttatattcctattcttgaagcaaatttttctcattctttcacaatcgtcccaatggacaatctaagacaaagaccagctacccttcacacttatttgctcaatcatgaacgtagaactttcgtaaaaacaaagaagataacctggaacacggtaatgtataaacttaaaacaaaagttcacttctgtcgtgaaaaataatgaagaaatctgatgagatcataaagccacgaagcttcctgttggtagctgaggatgaagtcattagcaacccaggattccctggtccatgtaatcagaagctgcacctaccagattctgtattgttcgggagaggtggctttaaaacaccccgctcaccaattctccaaaccagaccacgccttccagttatcattcaaatgggaccgtttcacagtgtggcactactacacatttcccgcgagcttaaatatcaagtaggagtcaaaattttagattcccttggtcatgcaagatgaactcttgaaccccacgctacataatgcacccggaccttaaaggccgagatggagaagcatgctttggttcttcaacctttacggccttcactacccccaccccaacccccgccccatttcttcccaactctcagtcaccccgaggcatagaaggcaaagaaagattccttacttcctgctgttgttaaaaggggaggaaacctaagagcaactttgaacgcgtggaagaaaaatcgcctaaatcttggccaccagcgcaaacatatgtcacccggccctggagccgcgttcgcgccctgccgggccccctcttctgccctgcgccccggggattctcccgtagcccagccctcccgggccccccagtgtctccgggacgcggttccgcgactcttcctctcccgcctccgcaaccctcacacgccggagtccccaagaccgcattgtcggccacccaggttccaatacaatggatcgccactgccccaaactctccggcgcccccttcggacccccggcgccaatcctgggtctcacagatcccgagttcagccacgagcccaaacttcaccatgtgagagcccaggacccaagaggtgacggagccccacgactcccgcccagctattccttcacccgccgtccccaggcgcgaatcctgcaccgggcgcccccacctacccgcgaccaccccgtaggagtcatcagccgcctcccccgagctggccgagggcgagcggagggctccccgcccggcccagacctctgggcggcgctgcaaccgagcgaaggccccaaacgcatccccggcctttcctggtccaccgcgaccccgccgcccaccctccctacctggccttgaggctggggctgctgccgctactgcagctgccactgctgcagctgctgctggcggcggcggcggcggctcggggttcgtacgcccaggctggggcggggggctgcgcagcggcgctggcggggacgggggcggcggggggcgcgggcggcggcggcggcggcggctcggtgaagcccgaggtcgcgtagttcctgtccatcgtgggggtggcgtagggagggcgggcagcagcgggggatcctccagggctccgtgtgacgggggcgggcagggagagggggcgggggaggaagagggggcggcggcggtggagggagctgccccctcacatggccccggcgagcaggcgggagaagggcgcgctggcgagtctgggccgcaaagacccgggccgcggcgggcggcgaggccccagctgggcgtcagggaagcggaggcacccgcggccgggactcgcggcgacggcggcggcggcggcggccgctgcgccccatgttggtggatttcccaggatgcacctcccgcccccctccgccccgcggccttgccccgcctcccctctgagccccgcgcttgccgctcgcggggctggcgggcggccgcgaggcctccgccaccgcaggacgcttcgcgagggacagttggggccgagaaggcgcgggtcctgcggggcccggccgacttcagggactccgaggggcgcccgccagccggagcccgcgaaccgcagacttcccgccttccgcagcccggaagggagctgtccgcactcgccgcggcccgcgtgggaagggaccgcgcctggctatcgccccgcgcgggggaggggaagtggagtggaacccagcgtagggcgctgctcaggggtagccgggtcaacgctttgcttggagctcactatttgacccttcgggttattttgagggactccagtactcagttccctgatcgcgatttctttctctgcgccccaatccagaaacagctgagcgagctcttttgcagttccgcttactccctccccaaagcttgctgggctagaggacccttttcctgctgttaggggagatttatattcaaagagattcaaattcaaacgtattattttccaatcctcgctgaaagggcctttcccaagggctcttattaactgtccccacccccaccttggggatttttctcgctctgggtttcagaatcttctatcccaagatagataaccacctcttcattgattaatccaactaccatctggatgactttaattacaataaatttaaactcaccatgcactctgatgttgaggggttttgtttgagacttggaacttcagcaggactctctccccaaacatttcctatctgatctccaagctgcttggtgtgcggtaatttaatgactatttgcggttcttctgttgcatagcagagttgtatttcttgtaataactcacaagtattgaaactagggaatcgtacaaatcatcgtttggcccttgggccataaatttaaaggttaaaataacagtaaaatttctatttaatgaccacctccttttaaaaatcaatattggtttaacacctattatgtgcttagcacagaaatctatccctcaagataagcataacataaaggtttaagcaaatcagccgtagtgaaagacctaataaacttgatacgctatctctgatgaccattgaaaaagtttaaactttggtaataatctggtgttggatctgctatgccttgcgagattaattttgttctggaagatcctgttttcctcctggcgcctacatccttttgttcctattcattcctttttgcaagtctttctgcacctgtgatgcttggagcctggtccccgggtggggaagcaaggaagtgagtagtcgttatttacacatgaattcaaacgtgtaggcacagcgactttgccaattttatgttaattacaaaatgcatttactgaggatatctttgaaaagtggtttttctttgaaaaggaatttgcgaactaatctgagttcatgcagagaagtaacgtaaatcttcattacatttatttttcttcctgcaaactggaaatgtgggatctaaattaaaaagttttcacaactagctattatatttataagtacttttgt

SEQ ID NO: 915404 - DNA, 4001 bp, Homo sapiens
tgttttttcgagacagagtctcgctctctcaccaggctggagtgcagtggcacgatctcggctcactgcaacgtccgactccctggttcaagtgattctcctgtctcaccctccagagtggctgggattacaggcatgcgccaccatgactagctaatttttgtatttttagtagagacgggatttcaccatgttggccaggatggtctcgatctcctgacctcgtgatccacccacctcggcctcccaaagtcctgggattacaggcctgagccaccgcacccggctaaccccatctctttggagacaacaacaacaacaacaacaacaacaacaacaacaacaacaacaaaaacctgttatgaagtcaccaggaagaggtggtcaagttgcagtgaaaattgcacttaaggctgggtgcagtgactgacacctgtaatcccaacactttggaagcccgaggcacgagaatcatttaagcccaggagtttgagatcaggctgggaaacatatcgagaccctgtctttacaaaaaattaaaaaatgtgccaggtgtggtggtgtgcctctgtattcccagctactcaggaggacaaggcaggaggactgcttcagcccaagagttggagactgcagtgagccatcgtcacgccactgcactccagcctgggtgacagagagagaccctgtctcaaaataaaaaaaaaaaaaggcaaaaggtaatcacatttaatatacttgagttccaacctgtggacggaccctgtgtgaagtactttaaatgcatcatctcatttaatcttcacaacagttcaatgaagtcagttttgtcattgtcaactaatgaggaaaccagaggccagagaagggaagtgacttgccctaacttacacagtttatcgctttaagactcaaaccaggtttctcagactccaaagtcccttcgagagcctgctggttcccttctctgttcccctcccaatccagctcagagcttcacccttccccaaggaaatctgagacctggatgtggagtagaaaaaggaagtggcagaaaaggaagaagataactgatacttggggaaaactattagtcctgggcatgagatgtgggccacctacccgcagggggagtgaccaagagtgaggagagtttgaggaccagagaatcccacaggaagggggagagcaaattccatattcatctaaacttcacaggcagtgtgacagccaagggaaggggtgtgacggtggcgttgggggcctgagcaaaagcgaggagagggcgggaaaggacggaccggcgggagcgacaggacagcgcgacccaggcaaagggtaggaggcagccccggaagagaggacctgcgggagacgcgacccaagcggcgcttcggggcctcccgcgtagttggctagcttctgggccggccccaggagccgggcttcaggagaaagagaagggtagagggattcactgcccgacctaaagggcccaagcctgaacccgagaccagaaactatcaagacgggctccaaaactccgggacagttgtcaagcagcaggtggggaaactgaggcctgaagtgaccgggactgcggggtcatctgaccgataaggcctggtaggaccgatgtctcgagctccaagagctgcccctgggggtcgccacgtctgggccccgggtgcgagggctcggggttttgagccggggtcctggggcccctggggggaggggcagaacccggatgtgggggggggtcagcggaagagggacccggatgtgggggcgccgcacagtcctgacccgggccagacaaccccggtaagcgtacagccctgtattcgggatcgaggctgcgctggacggcgcgggcggggctcactcactattcggggttcatggcggcggcggcggcccgctcggtcgctcccagtcgactctgctccgcctcccgttccaagatggtggccgctccgccccagaggccccgcccgcgacgcgcaggcgcaaacgtcttcttctcaggcctcgccgcgctgattcccggaacttgtagtctaagacgttctccaactcagccccgctgcgcaggcgtagtcggggagcccgcgcctccgcgcccactcccatcactgctggcgcattgccttctggggcttgtagtttgcactccggacgcactcaggcttgaggacagtgctggaaagcctgaccgcgactcggtgtttagaaagctcaatttagggctgggcttggcacgtttcacatctgtctgacggaggtagtcatccttgccctcccaatacccacgttgtgaacattaaatgagaatgtgggttctagtaagactaataaaagtacatttgtccagggttcttcgtgtactgggcagtcctaactcgcagccgcgcgtcatcacccgcatttcatagatgaaaaaactgagtctcgggaaactcactcaaggtcaaaaactttgtgaggagcagagctcataagagcccgcggtctccagaaccccacaagtgagtgttttagggaaagcctgacttgtgggcccctcacgcaattccggggtggggcacaatatctgggcccagctgcgcggacagcggttgagcgagacacactgtcccccactcacgcacgacccttcccggctccaccccagtctagagacgctgggggcccccgacctccgtctcaaaacaagcccagctcagatttaaaccgtctttatttctacagcaacatctgaaaatatgagagcagccgcctcacccgcaacagggggagcccctcctgccaccaggggaccgtcgccgcccctcgcgagaagctgcaggcgtggggggaggcgaggcaggatggctcggtgggcggtgcccggggcggggtcggccgtgcctgggcggggccgggtgggaggggcagtgcataaggccgggatgcggggcagggcccggcggtgggaggacggactaaggggaggtccccgtcctgggccacggggcgatggcgcgggtaggacgcatccctcagaggccaggaggagcgcgagaaggtcccaggacccccttgggaggcgccgctcccgagaatgtagagcctgggagataccaccgcacggaatgggggtgattaaggcctgggcggtaccactagaagagggacgaggggaggcccgggtagtaccgtggactgaagggaggcgcgcggccaataacttatttctctatatacagaagcaacggccgggttgagtcgggagggagggcgagggtgccgaagggccggcgagtgcttagtgttcttggctctggggtctggggaggccaggccactgagtctatggtggagactccagccggcacctcctgctggcccgaacctagggaagagggccctgctggaaggaataaataagggatggagctggagtgggcaggcccagcctccagggctcaggctgagatgacaagggagaaggttaccctgagattgaacagaaaagacaggggctgtgggagagacaggcgggacaagcagcaggcccatgcgcagggctggggtgaggggggtgtgccaggtgggcgctctggtgactggctgccccttcagcattagcccaccagggagcttcgtcgggagaggtccatggagctggagctgagagtgcggctgtcagagagacctgtgcctccaggctgtgggcagagggggcaggtggctcagccctgtgctgctgccagtctgtgcctccctggcctgaaggggtctgacctggcagaggcagccggaatccctgagctgggcagaggcaatggcagttctgacccaaggccacaccctggtgccctgacactcccgtccatctccacagtgacggtgttagcactggccgtttacacgtccacccccaggagaggctgggttcccctcgtgtctccccgttgtccagcccaaagtaggcctgagacagagccaggaactgt

SEQ ID NO: 915405 - DNA, 4001 bp, Homo sapiens
tcctccaacctcagccacctgagtagctggaattgcaaacatgtgctactgcatctggtcacaatttttatgttcttctttaaactgtaaatatgtatttaaaacattctttcatatgcattgtatgtttcgcattaattatttttatgtaagcagtccaccatagctagaacacagggtttgaagagtagagtaaaaggagaaaagaatggaaaaagagtgtactctaaaggtaaataggaaccttaatcatgctctcttgggagtaacatcagggaacatttatacccaatattaattaaaatgactttctcataatctatctatcaagaatgataggaaaaatccattttttctaagttacctagatatgaaatacccgacatcttaagcatctcactggggaacataataatatggttttgatgtatttttccagggagaggagtttcagcttgccctagggaacatgtttgcctcaaattctttttttttttttttttttttttttttgagacagagtcttgctctgtcactcaggctggaatgcaacggcatgacctcagctcactacaacctctgctttccgggttcaagtgattctcctgcctcagcctccggagtagctaggattacaggcacatgctaccacacccagctaatttttgtatttttagtagagacgggggtttcaccatgttggtcaggctggtctcgaactcctgacctcaggtgatctgctcaccttggcttcccaaagtgctgggattacaggtgtcagccactgagcccggcctgcctcaagttcttaaatgacacaaagctgggagggatgtggaacaaatgttttatattacagaattaaaatatatcttggcaagctagagtgacaggtcaaatttaggccaatttctaataacatctcccatttgttgagaacactcgatatgccaagagctttacataatttatctcacttaatccctacaaccacactgtgaagctgaaatccaggaaagtaacttgcccaaggtcataaggcaagttaataacagagttatgatttgaacctaggtttgcaggctcaagtttcagtctcaagtgagattccttcagccaccagaaattaacattcaaaactgaatcctctgctaccacactgggaattaagaaaacaataataaataaataaaaatctcaatcctctttaattcagcatgtcaccctcagaaaactgcatcacccaacctcaagccccttgggcatatgagggtatcaagtacctccaaagaatgatcagatcaaatgaaaaaaaaaccaaacaaacaaaaacaaaaaagaataatcagatcaggccattttcattaatgtaacacttggggacctcgacagctgccaggaaacctccatctgtcctcaagagcaagtccatcctcaaaagcaagctgtaacaggattctctctgcaacccattcccagctcagccatgtctgcctccccatctgtatttaagactgcaaaactcaagctctgcagttataaacggaggccacttaccacaaagattgctgagcaagagccctcagccaggctattgcctaccttcaattttctctcgtcctcaggggcactgtgatttgatgggtgtgtacagctgagagaacagcacaaccggctccagtgcacagtcatatccaatggagctatcccaaaagacagccagagaattttaatgaaaaccagaaaacccctggctgctaagtccaactgcggttcaggcctgccagcccctccccctgcagctaagaatctctgagccagctttgccccaaagagcagggaagaaaatccattttgcactcagtaaatccttccatagcagccacttcgcagagtcatttaggttaaaggtgaggcatatgataactgcaacaggacccagggaccctgagaggcacagggtgtggcagcagcagatttgagccaacagattatgaaacagtcatttaaaaaaaaacaaaaagtctttccttctgccaaagctctctgcccacagctgcatacaaggctagtgaggaatcttaacaagcttaaaggggccgtatttcagatactccagaaccaaggtgggaggaaataagtattttgagcacttactatgtatcaggtgctctgatctcatttcatcctcactgtgagatgggaactgtaaactgcaggtaacagataagaacattgactcagagaggttccataacttgtccaaggaacacagttagcaagaggggaagcaagactgaaagttcagtgtgggtgaggctcatcagaagtatcaaactttttgttcacagagagcagaaaaaaataaaaagaaaagaaaggaaaagaaatactaaactcaaaatcctgactaataaaaagaatgatcatttattgaccactggctatgtgccaggcactaagctaatatttttacatgcaccgtatcatctaatcctcacagcaactagataagatacaggtcattattacctccatttaataatgagcaaactatggctcagacattcaataatttgatcaaggtcactgcatcaccaggattggaacccaggtctacctaattctagagtgctcaccttaaaacactcatcctaacagcattcagaagggagccacctagatcatcatgccaagcacgcaagttgcagcaagatttctgctcccctccccagcaggtaatgcatattccagacttgcctttcaattcctcccagcaatcttcagtggaggcacagtatcactggctctggggaaggtgatagctatgtctctaccttcccatgcaccatggactcagttgtcccgacatgagtgaaggagaaggccaccaccatgatccagagactcacatgagtatagaagcagacagcttctttccccaggccctgctccataggcccatgcaacctcaagcagcaacctcttcctcaacagctcacaggcctgttttgtattcttaacaggagaccacgtgcctcctttttaagcaactgtgatttcccaagggagatgactgtctagacacagcatctatcttgacaaccagactgggccacacgatgttaggtttgataatttaattttagggtctgtgttcagctctccagtgaaggctctgtgcttggcacccctgggtaatcagatcgagtatcactcagtgcaacagctgacaccctgggttagaactgtctttccagccaggcaagtgttacttgcgggaagtcacaggcatcttatggatcacacacacacaggcacaacacacaaacagttccattaatgaggctgaaacttgatagaactcttctatgcatgttcagaattaagtgccaggctttgactggtggtggactgaatacttaatatgtatcaggtactgtggtgggtacattcacagccaatatcttaactgacccgcacaacattctgtaaggtagatagaactgctattatacagatgaggcaactaaagcccagaaagatagcataatttgcccaaagtcacacaggaagtggcaaagctcaggttcaaattcttttttttttttttttgagatggagtctcactccacctcccaggctggagtgcagtggcacgatcttggctcactgcaacctccacctcccaggttcacacaattctcctgcttcagcctccacagtagttgggaatacaggcaggcaccaccatgcccagctaatttttgtatttttaatggagacaaggttttattatgttggccagagctggtctcgaactcctgacctcaagtgatcttcctgcctcggcctcccaaagtgctgggattacaggcatgagccaccaggcctggcctcaaattcatttttaatacaacttcaacaccctttcagtcaattatgagtccattcatttattcctcagatagttattgagcactttctatgagccagctact

SEQ ID NO: 915406 - DNA, 4001 bp, Homo sapiens
aggattctgcaaaaatattcacatagtctacatccacccaggagttcctagttgaagtggaggaccagggagtgtgttctaagattgaagagaaagagatgtgatatgctggtgataaaggaggggttttgaaacagaaaggaaaaatgtaaactgcaaatggagagatagagaaataaacagaatttcaagagatgtgggtgggatggggtggggtggggggaagaaatgaaagtacaggagagaagggtagggtgtccagaagagcagagcgtcatcaacagagagacgcagaggcaaaggctaactgttgatcttttcccaaatccaaaagctgctcattggcatcccaataaatcactctactacaaagcccatacaatggactgtcctttgcattcagcatcaagcagcatttaatgaaatatcacacagctacaactttggagacctaaggatctgaatttaaaatgaacaaaattggcttagcagcagaagacagccagtaaagaatttcgcccatgtctgactcagctaggaaaaggtttagcattctagagttaagcaaatactctggcatttctccttcttttgacattccaagagggggtgtggttgaccccaggcccattcatttccaagggtgtagatctctcagccaagactggccccatctgttgtggagccagccagctgtttatctcaaagtaacatatctattgccctaattatccctataactcttacaagagcatcatgtaagtcagaatgctttctctcctgttaaatgtcagttcgtttaaaaaaacaacaataacaaaacaaccaaaatcactcttccatgggcacctttcagtaatggcaaatgaaggttaacagcgcttctaactttccctttctctaatgtgttaaaatgaacccctcttccctaatcgatctcttcaaaccgttatttgtgagtagtgactatgcctcaggaaacagcagctcattatggtaccattgtcagtggcaaagagcctatgcaatgtaatttaaaacacacaagcacaaatctgtcggctccacttccaaacaatcttgaatccagcagtcggagaacggaaaacatttaacaaaaacgctgcttccagcagcctgaaagaaccttcgccagacacgtgaaatgtttctgactggcacggagtgcaccattaaaggacactgtcacctcaaatcagcagaaaaggcgagacaaaccacatagacatacacacataaaataaagccctacaaaacttaagcacgttcatcttaaaaattaataactagtgctcgtccaagcgacattcaaatgttctaaagtagtgcgaccacattaattcactgtctccatttctccccacgcatcaccccttcccactcaaacctcagctctcgggccgtgtgtgacaggactgcagtcccccacctctgccttcctcagattttccaagagcactccccaacatccttcccagcccagccccctctctccgcctcaaaaaggttgagaggagttgcgactagggaattggcaggcacccgtcctctggcgggggaaggttgctggagttgttctttgcagtgacccaaatggcacagagcttttccccttagctgtgcctgcaagcctctccccaatcccccccacctccccaccgctcacagcttcccaaaagaaagccttgagaactaagcgggaggaataacttggtagaagcatttgaataaatcacttcaactcacctggtttgggatttttctccccaccccaggcataaacagaaatggatgtgcgaatgagtcacgcacgcaagggaaggtctgcgatgtcctgagtccaagggctggagtcagtccctgccctggtgctgctgctacacttagctcagctggagcgagcggcaatcgcaagcccagcagcagcagggggtggagagaccgtagcacaatgaatgcagtggggcttttgcaatgacatcatccctctgtccaaacgtccccaatagccatgctcgggagcggtgctttctgggaactgtagtcttcttacgtcctgaagggatacccaggcaatccccgaaactacaatgcccaaaatgctccaagtgggacgcgcccagagtgaaggagcaaaggggactcggccgccatgttaggagtactgggacgattccgcggagccgggcagaggttttaggggtgcgcaggagtcaagtggtggttcagtggggacggtgaggtggaggacgatctggtcggatagccgcgggcacgaacctgggaaccagagggtggaggccatgctggggactgatgtagggcgggaccgactggaagcggcatccagaggcccagtgagcctcggtctcagctcctgaaggggttgcatggggccctacgcttccttctccattttttagctaagagattgagagagtcggtttacttttgggcttggagtatcatttagatctgttaacagtacagttgagagagttggtgtcttttgttgaggtgcgaggacccgaggcggcgaccctcgcctttattcggagaagcccacttccacccacagagttggggtagtcctccgaaatgcatttttgttttgccgtttgttttccaaccccctttcactctccccaaagcttcagattcactgatttttcatacaggaatgattaacaaaggcgtccgaagaaatcgttgttggaaggtgaccaaggtggaaagagacgttgctttggccctgcaagtaagaagagagagggaatagcctgaaggagtaacactaaatttaaaatgacacttttttaccaaccagcgaaagcagatgttcaaaggggatattggccaggtgcggtcgctcacgcctttaatcccagcactttgggggcagacgcggggagatagcgtgattctaggagttcaaccccagcctgggcaacatgcggagaccccgtaccgtctctacaaaaacattaaacaaaaaaattagctgggcatggtggtgtacccctgtagttgcagctacactagaggctgaggtgggaggatcgcttgagcccgggatgttgaggctgcagtgagcctcgatcctaccactgtgctccagcctgggcgacagcaagcccgtgtctcagaaaaggcgggaggggtgggatattattgatgataggccttctgacgtctggcaatagattccagagtaacatcggtcatggataaattttttttttaactaagtgactgaaaccaaagttaattgtcttttgagtgattttgcacagtatctcaaaatgaactgtactttttttcttgtgtcactgaaacagtgctgtgtgttctttttcagagtctgtcacactaagatgagaaatgtcctttcttcctgaaggtgtctgatgtgtaaaaatatgatatactttgtgctgtttcctcccttcccttttgcatattattctgaaacaacattaactagttactttgcgtcattgaaggtatgcacttcccctctatgttaggagtgaataaaattaaaaatagatccttataacaaagaaaggcagatagaatgattaaaaatgaccaaaacatgttagaaacagtctctcaggtgtatgcagatggtaattacaaaaatactttttcaaaaaatgatcttctgtgtcatgtttctgggaacaagtcaagatgaatgagtttgatttttaagcagaagtagtatgtgttggtgtcatccatgaatacaacaatgaaaaaggctcaaagttgttgttattcagaaacttctctaagtaatggtggtaagtacaggaaaaggagcaatgtctaccattttctttctaaccttcgatttaactattgtaatgttgtaagcttaacagagacttacacttaggcttaatttcaagctcttcaatcatttttcccggttggtgattcaggtgtattctcatgtcttatgtaaacttatc

SEQ ID NO: 915407 - DNA, 4001 bp, Homo sapiens
aggagaagaaacaaccagggtgggtggggaactgttgtcctccaagtatcttcaaaaaaccaaatgggcagtttggccacctggattgctactcagcaatccacagggaacaggaagaaagaggggggaaagatcagccttcccaccaccagctgcagcaaggataaggaaaaaaaaaatgtattgtataaggcaagccacttgaagactacttattccttgggaattatgagaacatttcatgtagagcatttaaaaaccttgctaatccataggcaggtgccagtgaaaggaaaagtggcatgagcccaactgcagcatttcattgttcacatgctgctggggctaaattatgtctgtcacaggaactacaaaccagaccaggggtcaggctcattgctgctcatcctgccaagcacagactgcaagaaaaagaaaaggcaaagaaattctcttcaaagaggattctgcaaaaatattcacatagtctacatccacccaggagttcctagttgaagtggaggaccagggagtgtgttctaagattgaagagaaagagatgtgatatgctggtgataaaggaggggttttgaaacagaaaggaaaaatgtaaactgcaaatggagagatagagaaataaacagaatttcaagagatgtgggtgggatggggtggggtggggggaagaaatgaaagtacaggagagaagggtagggtgtccagaagagcagagcgtcatcaacagagagacgcagaggcaaaggctaactgttgatcttttcccaaatccaaaagctgctcattggcatcccaataaatcactctactacaaagcccatacaatggactgtcctttgcattcagcatcaagcagcatttaatgaaatatcacacagctacaactttggagacctaaggatctgaatttaaaatgaacaaaattggcttagcagcagaagacagccagtaaagaatttcgcccatgtctgactcagctaggaaaaggtttagcattctagagttaagcaaatactctggcatttctccttcttttgacattccaagagggggtgtggttgaccccaggcccattcatttccaagggtgtagatctctcagccaagactggccccatctgttgtggagccagccagctgtttatctcaaagtaacatatctattgccctaattatccctataactcttacaagagcatcatgtaagtcagaatgctttctctcctgttaaatgtcagttcgtttaaaaaaacaacaataacaaaacaaccaaaatcactcttccatgggcacctttcagtaatggcaaatgaaggttaacagcgcttctaactttccctttctctaatgtgttaaaatgaacccctcttccctaatcgatctcttcaaaccgttatttgtgagtagtgactatgcctcaggaaacagcagctcattatggtaccattgtcagtggcaaagagcctatgcaatgtaatttaaaacacacaagcacaaatctgtcggctccacttccaaacaatcttgaatccagcagtcggagaacggaaaacatttaacaaaaacgctgcttccagcagcctgaaagaaccttcgccagacacgtgaaatgtttctgactggcacggagtgcaccattaaaggacactgtcacctcaaatcagcagaaaaggcgagacaaaccacatagacatacacacataaaataaagccctacaaaacttaagcacgttcatcttaaaaattaataactagtgctcgtccaagcgacattcaaatgttctaaagtagtgcgaccacattaattcactgtctccatttctccccacgcatcaccccttcccactcaaacctcagctctcgggccgtgtgtgacaggactgcagtcccccacctctgccttcctcagattttccaagagcactccccaacatccttcccagcccagccccctctctccgcctcaaaaaggttgagaggagttgcgactagggaattggcaggcacccgtcctctggcgggggaaggttgctggagttgttctttgcagtgacccaaatggcacagagcttttccccttagctgtgcctgcaagcctctccccaatcccccccacctccccaccgctcacagcttcccaaaagaaagccttgagaactaagcgggaggaataacttggtagaagcatttgaataaatcacttcaactcacctggtttgggatttttctccccaccccaggcataaacagaaatggatgtgcgaatgagtcacgcacgcaagggaaggtctgcgatgtcctgagtccaagggctggagtcagtccctgccctggtgctgctgctacacttagctcagctggagcgagcggcaatcgcaagcccagcagcagcagggggtggagagaccgtagcacaatgaatgcagtggggcttttgcaatgacatcatccctctgtccaaacgtccccaatagccatgctcgggagcggtgctttctgggaactgtagtcttcttacgtcctgaagggatacccaggcaatccccgaaactacaatgcccaaaatgctccaagtgggacgcgcccagagtgaaggagcaaaggggactcggccgccatgttaggagtactgggacgattccgcggagccgggcagaggttttaggggtgcgcaggagtcaagtggtggttcagtggggacggtgaggtggaggacgatctggtcggatagccgcgggcacgaacctgggaaccagagggtggaggccatgctggggactgatgtagggcgggaccgactggaagcggcatccagaggcccagtgagcctcggtctcagctcctgaaggggttgcatggggccctacgcttccttctccattttttagctaagagattgagagagtcggtttacttttgggcttggagtatcatttagatctgttaacagtacagttgagagagttggtgtcttttgttgaggtgcgaggacccgaggcggcgaccctcgcctttattcggagaagcccacttccacccacagagttggggtagtcctccgaaatgcatttttgttttgccgtttgttttccaaccccctttcactctccccaaagcttcagattcactgatttttcatacaggaatgattaacaaaggcgtccgaagaaatcgttgttggaaggtgaccaaggtggaaagagacgttgctttggccctgcaagtaagaagagagagggaatagcctgaaggagtaacactaaatttaaaatgacacttttttaccaaccagcgaaagcagatgttcaaaggggatattggccaggtgcggtcgctcacgcctttaatcccagcactttgggggcagacgcggggagatagcgtgattctaggagttcaaccccagcctgggcaacatgcggagaccccgtaccgtctctacaaaaacattaaacaaaaaaattagctgggcatggtggtgtacccctgtagttgcagctacactagaggctgaggtgggaggatcgcttgagcccgggatgttgaggctgcagtgagcctcgatcctaccactgtgctccagcctgggcgacagcaagcccgtgtctcagaaaaggcgggaggggtgggatattattgatgataggccttctgacgtctggcaatagattccagagtaacatcggtcatggataaattttttttttaactaagtgactgaaaccaaagttaattgtcttttgagtgattttgcacagtatctcaaaatgaactgtactttttttcttgtgtcactgaaacagtgctgtgtgttctttttcagagtctgtcacactaagatgagaaatgtcctttcttcctgaaggtgtctgatgtgtaaaaatatgatatactttgtgctgtttcctcccttcccttttgcatattattctgaaacaacattaactagttactttgcgtcattgaaggtatgcacttcccctc

SEQ ID NO: 915408 - DNA, 4001 bp, Homo sapiens
ctctggaatttgggctattaatcactgtacccttccatctcttctgtttatgtgaggagactgaaatctacagacatagaacttctctgctgtcatgctgttacctggattgtacacagaagtccaaattacagctacatccccgtttaaacagtaagccgtttctaaatctgaatcctgaggactttcgagcagccagaagggttttcagacattatgacatgcagcaagaaagtacacagagagaatttttttagatgaaaagccccatccaacagtggctgataacattttctgttctctgataacccccttgctactagagcagctgaagatgactccaaatgcatgaatctgttcatctgttcacatgctaaaagaaaaaggcctggcagttcatgattaaagaggcacgaaagtccccagatcacaaatgccctttcaaaaattttccacatttgttctagtttcaagccatgataaagagtttccaatcaaatgcatcagctaaaatgaatccattttctgaaacagaagtggctagtttgggtccagcacttataacgaaaggttcctggtgtcacagaccatgaaataagactgtttgaagttgttcccatggagaatcccagaggactttaaaacttctgagcaggaagatccttgacccttgcccaactcctttccacttaacagcgatgcaactgagctgaagagacttgtccaaagccactgagcaggttagttagtggcagggctaaaatctgtaatgaggggttggtcatgcgcaggttgcaaacagccttgtccaaggattcacacttggagtagatacattgcaccctcacttttgactaggcctaacttctggtacaaacctgtggagtcaaaatctgattttaaatattgtaaaaaacaaaaacaaacaacctctcatttttcagatctctcaatgaaaactttagggccaaatcaagaaatcataaggctatcataggcccttacataaaaatggccttaaaatatacacacaacctccttttcatagaagacagagagccagagagatagaaatacagaaagagagggagaaagaatactttgcccctgacatatacacacaaaagtacttggcttactgtaagcaaaaagcaaaaaaaaaaaaaaaaaaaaacaaaacaaaaaccctcaaactcctttgtcttaagggcagagagaaaggtgacaaaatttgaaataaagtgagccactgaagacaggaatgggcaaactccagctagcctggaactatcccggtttcctctgtgaaccagcctaggggcttcccctcggtccgcccctgcacggaaggacgtgcgtgacactgggctgcgtcattggcagaactgcccgcgcccagaaaacgagctggagtggagaacagaatgcaattgcagacaatcttcctctggttccctggggaggcctgctctgggcagagagatcccaggggactgtgcgggaaggagctaaagcaatagcccaaaagcgccagggaatgcacttgaagtttcagacgtttttcttttctttgaaactaagtttccagcccaccaggaaaaactgcctcgcgacctagtgattttaatctcacgcttggccgcaagccgctgcctcgagactggaaaccggccgcgaggcgctctatccccctgaccccctccccccgcgctcacctgcgatatcccagagctgcaggcgcaccacagtctccgggtcccagtggagcaccttgagcgcgaagtccacgccgattgtggcccggtagtgcgaagagaagttctggtgcacgtagcgcttgatgatactggtcttccccacgcccaggtcgccaatcaccagcaacttgtacaggtgctccttgtgcggggcctgcatcctggcggccggccagacgtgccgtgcctgaccagggaagcgcagcctgggctctgcgcacgagagagacttggggagcgcaagtgtaggtgcagagagaggcgtgggcggcggggcgggggctggggggcggaactcctcccctaggggttaatcctccttcctactccgcggtcttggagaggggaggagacaggagcgagtcccgggactggcagctgaaaggggttcgcgtgtggttgcctgttgcagcgcttatttatccggcgctttagagtttccgaagagctgttttcacctgtgaccctggccacaaacttgtgaggtgtggatcttattttccacgttttgcttgcgagaaaactgattgtgaaaaagtactctgcgggagatggccggtgaaaggccccgttgaccacaggtctgaagtcacaggctcttaactaccccacactgtagagagaaattacagtattaggaagcccaagactggctgggcttggttcctgcgtgccctggtttttaagttgagggaccataagtaagtcatttgagctctcacagcctgttatttctcaatgaatggcaatgctgacctctgagcagcttggaggtgggaacactgagcactttcacacccattcaactggtaatcagttaacaaggaggacaactgggccgaaaatgccaagggcactggtgacttttagcctcttcccatatcctaaaaactcagagctgcacagaaagacagttttaacaatcggtcagattattacaaataataataatggcaaacatttattgagcactcgctatatgccagagggtttataaattatgtcatttagtcatcccagctgtcttaataatagataccatttttcttcctattttacaaatgaggaagctaaggaccagacattttaagtaatggacccagagtcaaatagtaaggaaaaaaaccaaattcaaacataggtctttaggttcccaacttctttttgttgtttttgttgtttgttttcattcatttgaccaatatacattttattaccaattaatatatgacaaattgtacttattttgtcttgtctgtctccacctacaagaaggtaaatttttttgaggccagtaggcattgtctgcgttaggatttctgtatcatcctcctaacgcagacaatgcctactggcctaagaaaaatttaccttcttgtgggtggagacaggacaagacaaaataaatacaatttgtcatatattaattggtaataaaataaggcagaaaggggatgtgaagagattatatggggtttgccttttagatagggtggccagggaaggtttcagtaagatggagacaatttagtaaagacataaagaaaatgagaaattgggcattcagggctagggggtgagcagtttataccaaaatgagctattttgtacctgaatgtgctgtgaaggagctctgctcacattctatcatttcatcttctcaattgctttatgaagtgggttattttcttcaatttataaataaggaaaccaagattaacagcagctttctcaagggcacacataactagtatgtgttagaactaggacttaaacacaggcctgtgtgaaagggagaaaggaggtttggcaaggccattgtctttctgccttcctcttctggcctgacactccctaaactttagcctccacatgccccaaacaagcagagggatgctgaagatgtgtacccgggacaagtcacataacctctgagccttggtttccacatcaacgaaaggagaatgataatacctatggcagggcatggttgctcatgattgtaatccaagcactttgggaggctgaggtgggtgaatcacttgaggtcaggagttcaagaccagcctggccaacatggtgaaacccgtctctactaaaaatacaaaaattagccgggcgtggtggcaggtgactataatcccagctacttgagaggctgagacaggagactatcttgaaccagggatgcagaggttgcagtgagccaagatcacaccattgctctccagcctgggtaacctg

SEQ ID NO: 915409 - DNA, 4001 bp, Homo sapiens
aattaaacacaataagattttattacccatgtgtcttgtagttgcaactcaaagtagctgttagaagtttaagacataaaggtttttattgtattcacttcagagggggggtcaagagctaacagcaaatgctttttttctgagcctgatatatcgcaaagtttacctctgattgagatcacatgtgaaggaattggcaatcaacttagaatggtaaaactggaaggaatgttagagatcacgacgactttcattttacagatgaggaatcaaacatttgaaaaattattttaataaaaggaggcttcttgaaaaggaaaaacatttttcatggaattctacgtgttgtacaaatccaatcaataatcttttaacacctctctgaagcgctggccttaccatctttccacttcacacacacgaaaactaaggtataagcaagctaagcagttcactcattatctctatgaatcagcatcattgctaggaacggaagccaaaactttgaatgttggaccattctcacagatgtaggctgatctcattcgcagtgatgctggctgggggcgaggggaagccatgtttgggaagtcccctcatggaacactgcatttcacaagcagagtacttgctgactaacgcaaaatgcttccttaaatgagttccaatggataatgcagtctttaagaaacagaacagtacaatacatcagtttcaccatcttcctctaaaacgaagtgcctttgaatcctagacatttaaaatttgctttaaacctgcttccatctcaaatattcaggaaatgcatataatttcatttactttttatttacacaagtcgcctttgtgaaacccttcatgtccccagcggatatttaggaggagactattcatttggatccctccttctgtctttagaaatattatcaccctggaacgttaagtactgatcataagcaaaattaaagttcctggcgaatctcaatatatgtctttttcccaccaaacatgacaaacttctaaagacaactcaacccttcacatacacacacacacacacacacaccctcagctgtgccagtgtccctgatgttgcatctagttaacctacaagacccattcccacgggtcatgacccagtatttctgatgaccacattcagtgctgtgaggtgcccaaaccattaccgcatccacctctctgtgaaccatgcccagtgagctcatgcaggaacctgggttggagcgctccttgctgtgaagctaaaggatccatcacgaatctgggaaccctccctcgcggttctccccggccacacagcgtgggagccgctgggttagggtaggaaaaggggcgcctgcttggaggagggtggtcgggtcatgctgtgcgcagccagggaagccgagtttgggaagaaggcagccggggagccggaggggataaaaatacccacaggggctgaaagagttggggaagagggggcggcgaggacgaccccggttcaggcgggaaaggaaagatggaaagggggcgcaggaaatgggcgccaaagaaagaagtgagaaattgcggaggaggaagtcgtccctggaagaggaggggcaaaggggaagcgagaatggagtgtttgcactttcgagagggaagggccagagcctctcccgaccagggccggcggggcggacgcctggggaaggggcgtccgggcgggctgagggggcggcgcggtgcccaaggtccccggggtccctacctgaaccgctcctgtcccgccgtgtcccagagctgtagcttgatcctcttgcccggctcgatctccagcaggcgggagaagaagtccacgccgacggtggggtcgcaggcgggggagcgcagcccggggaagcggccctgggtgaagcggtgcaggaggcaggacttgcccacggtggagtccccgatcacgatgaggcggaactggtagatccagatggtctccatcgctcacgtgccccgctggctcccgggccgccccacccgcgggctaagttcggcggcgggaactgtcctttcagcacctcgcgggcgcccgcccgccgccttccagcatattcctgcggctgcggccgccgcctggtgcccgccctctcgggagagagaggcggggccaggcccggctaggggcggggcctctggacgggggcggggcgggggcggtggcgcgtgggagggggaagcaggtttgctgccgcgaactcccgcccctgaccggctgcaaatcactctccctcaacgctcactgggcgccggcaggaaagtgggcgtggcgggaagacgtgacagcagcaacaaccaaggaaaatgaagcaaggtctcaactccgggagggtcagccaatgaaaagtgagagtcgttttcttacaggcgtcagggcgggttggtcagattagggctctgattttggaagtccctgaggccataacttgggtcattgctttgattcctcttttttttttgtcccccaggctggattgatgtggtgagatctcggctcattgcagcctcaagcgatctgcccacctcagcctcccaagcagcggggaccacgggtgtgagccatcacacctggctaattttcttctgggttaaaaaaaaattttttttttagagatgtggtctcgctatgttgcttaggctggtctcaaactcctaggttcaagcgatccatccacctcagcctcctgagtagctgggactacaggcgggggccaccacatcccgctaattttctaactttttgtagagatggggtcttgctgtgttgcccaggctggtctcgaactcctgacctcaagtgatcctccaggctcagcctcccagtgctgggattacaggtgtgagccaccacaccctgctttcttgtcttgatgagagccacctccaaggcattttaaggtgaaggagttttgggcaggattgaaataaatttgcacagccagttctgggtgcttctagcaagggctctggctgttgctgcgtgctgccactgtctgttcttcactgctatgagtaccacagaagagtgagaaacgccaagtatcatccccataccctctggggccctccaaccctggggacagtggcaaaaaaaaaaaaaaaaaaaaaagccggggaaatgttgagaagctcatgaaattttcagctctccttggtctccattgtttaagtcagaaaaaagcgaacaggtggtctcttagctcatgtctgattaatgatgtaagtaaacaaagcagaacttaaattctggtgagatcttactactttcttgtgcctttcctcaaattgagtaatagtgacgtcaaggtttatctttaaaaagtgaaacagtttaaaagtgtgtgttaggccgggcgcggtggctcacgcctgtaatcccagcactttgggaggctgaggcgggtggatcacctgagtcaggagttcgagaccagcctcaacatggagaaaccccgtctctactaaaaatacaaaattagccgggcgtagtggtgcatgcctgtaatctcagccactcgggaggctgaggcaggagaattgcttgaacccgggaggcagaggttgtgatgagctgagatcgtgccattgcactccagcctgggcaacaagagcgaaactccatctcaaagaaaataaataaataaataaaagtgtgtgtttaggccggtcgcagtggctcacgcctgtaatcccagcactttgggaggacgaggcgggcagatcgcctgaggtcaggagttcgagaccagcctggccaacatggcgaaacttcgtctttattaaaactacaaaaatggccgggtgcagtagttcatgcctgtaatcccagcactttgggaggccgaggtgtgtggatcacaaggtcaggagttcaagaccagcctggccaagatgatgaaacctcctctctactaaaaatacaaaaattagccacgcacggtggcaggcgcctgtaatcccag

SEQ ID NO: 915410 - DNA, 4001 bp, Homo sapiens
atcattcgtctcaacttcagcctgggactggaccagtaagagcagaacccgtcttctctcccgccaggtaccatggctcccaccttccctgtctaggggaggactgggagcgtggtgggaggtacttccccttctaggtgctaccagaggtcccagtgctacccctccaggcccactgactcaggccgcaggctcaagttagtcagatcttcgtttgaggatacattttattcattcattctactcattcatacattcagccactccatctgagcatagactatggggcatgcaaggggctggggacccagcaggaaactgtacagacataggttctgccctcctggggctccacgttggtggaggatggaggatgggggacgtattctctaagacctccacgtccagggcacaaatagacaatgctctttccccgctgggcacagcgcacagcaaggtatggaatctggagagtggaggcgaggctggattctatgccttgcttgctcccttggccagcactttgtgcagtgaacaacctaggcagttctccatagcatcccttccaactttctagaatcattcagcccaggcgtcccatagccatcactcagcagggcagttgtttccatggccacggcttccagagggcagggattctctctttcttggagctatgttcccctaccccacccccagcccagctcagggtctggcccacccaaagcagatgtccacatgtgtttgctggcttgaatccctcatcagttggtcttgagcaactgttgtcttcctggcccttattttgttcactatttagagaaggaggagaaaatgacacaaaaggaacccagcacagggcccttgccctccaagtcttcacaagccccggcaggagataagtcatggcaacccagaccagtgggagataaagggtggaggaggcgtcagctcagggctatgtccctggaggaagagtcctcagcctgggaggtctggtggaccggggaggcccttgagcgaggtcttgaaggacaagtctgtggtcaccactctggaagcatccacactcaatttctaaccaaaaatagcctgtcatccatgcttcctgctaccatggactcctagggctcactgcctcccccagtagggaggaccctcctgctcagctgaacttgctcctcagttgaaaaggatgggctcggagaagttaaggaacctgcctgatatcacaccagccaggggcagtggggctgagtcctcttacacccgttttccaaaaagaccacccagaaactagaggctcactggcagctgcagctgtgtgcagccaggcagcaagaggttcctgagcacatgctaggtgtctggccagtggcagggaagggataaataaaagttgtgtcctctgcctacaagccactgccctcctcagcctccctccctctatctccctctgcctgctccatcccaagcctggcagccttgaccacagacccttggctgaaggcagctgaggagcaggagacagtcagcctggacaacccaggccctgattctggacttacaggtgtgtcctcagctcactgtgtgacccaggatgagtgtcttgccctctctgagcttcagtctccacctctgtacagccaccaaattggacaagacaatcagagccattgcctaggactctctgagcccagcttctcacactggctgccctgaagcttgccaagactccccctcccctccatgccccaggtcctgagctcacctgtctgtgccccagggctcttctctcaagttcccctcaagtacagggcacaggcctgatggggcgtagcggacagtccctgcactcatggccaggaacacgggacatgtccctcgggcggggcacccagcgtgctcctcagaagagtccatgcttgcaaggccagactgagggtccctctggagggtgccgggaagggaggtagcaggagccttcttccccccaccaggctgagcctcacactaacctttgctatctccccagagcagcagcctgggagggaggcaccacctcccaggacagccgctatctccttcaaccccgtaattattaactcctgtggctcctcaggcagcagaagacactgggccctccttcctgggctctgggccaggggaggtgagacacctctaggggaggccccgtgtttcagccaggctcccagatggtccgcttgtcccctcaccacgcaggctggggtgttggaaagagcccgtccagccttgatcctgtcatagctgtcatagctggctgtgtagccctagacaggccctcctgcctgtgaccacaaacctgaatatccccttaaaactttgttattggtggggcgcggaggctcacgcctgtaatcccagcactttgggaggctgaggcgggcggatgacctgaagtcagcagttcaagaccagcctgaccaacatggtgaaaccctgtctctactaaaaatacaaaattagccgggcatggtggcgcatgcctgtaatctcagctactcgggagcctgaggcaggagaattgcttgaacccgggaggcggaggttgcggtgagctgagactgggccattgcactccagcctgggcaacaagagcaaaactccgtctcaaaaaacaaaacaaacaaacaaaaaactgttattttttattttttttctttatttttaaattctttttcttagatttgagattcccagttttgttttttgtttgtttttaatttttcaaggcagggtctcgctccgtcacccaggctggagggcagcctcaaactgcccagctcaagccatcctcccacctcagcctcctgagcagctgggactccaggcatgtgtcaccatgcttggctaatttttaaattttttttattttttggagagatggggtctcactacccttaaaacttctcaccaccaccgcccaggaacaactcagcggtagcagctgggaacacaggcccggggtcagacgggctggattcaaccccactttcagacggtgtgcctttgagcacgttagcctctccgtgcctcagtttctccaactatgaaatggattctcaccctccaaagcacaccaggccagttgccattgcccagatgtgcccattcctcttctttccacatactatcccccctgactgctatctccactgcatcctgcctctgctagtaagtttctcttttgttcataccccctcctctaggaagccctcccctgtgggttacttttttcctctgcaggcaccagagcccttagacacatggttagccctgcgtcatgacaaacaccccctggaactgttggacactcccacaagaactgagtggccctctgggcagaggctgggccatcctcgtcacccttctcagtgtcaccttgcctggtacacagactccatccacctgtgggatggtgtgaatgtgccaccctgtcttcatttggcccaaattctcatcctagttctgccactcgctgactgtgtggccttaggcaagtcacttaacctctctgggactcagtttcctcatctatataaaatgggaagttctcccctgtgaaatagtgagtattaaagcagataacatttgtggccaggtgcggtggctcatgcctgtaatcccagcactttgggaggccgaggtgggaggatcgcttgagcccaggagaccaccctaggcaacaaaccgagacctcatctctattatttaaaaaaaaacccgtctctactaaaaatacaaaaaattagccaggcgtggtggcgggcgcctgtagtcccagctactcgggaggctgaggcaggagaatggcgtgaatctgggaggcagagcttgcagtgagccgagatcacgccactgcattccagcctgggtggcaaagcgagactccgtctcaaaaaaaaaaaaagtttaaaaaaagaagacagctgggggcgttggctcacgcctgtaatccc

SEQ ID NO: 915411 - DNA, 4001 bp, Homo sapiens
accccgggcaggactgccctaacctctccaggtaccacaaacccacctcaagcactttctcctaagccagcctccttcctccaagcacaatgccaacaaatacactagtggccttcaactctctccctttaagagtctcaagcccaggccgggtgcagtggctcacacctgtaatcccagcactttgggaggctgaggcgggcggatcacaaggtcaggagatcgagaccatccttgctaacatggtgaaaccctgtctctactaaaaacacaaaaaaattagctgggcgtggtggcgggcgcctgtagtcccagctactcgggaagctaaggcaggagactggtgtgaacctgggaggtggagcttgcactgagccgcgccactgcactccagcctgggcgacagagtgacactctgtctcaaaaaaaaaaaaaaaagagtctcaagtcttagggcagggcgtggtggtaaaagcctgtaatcctagcactttgggaggctgaggctggtggatcacctgaggtcaggagttcgagaccagcctgatcaatattgtgaaaccccgtctctactaaaaatacaaaaattagccgggtgtggtggtgtgtgcctgtagtcgcagctactcaggaggctgagtcaggcgaattgcttgtactcaggcagcggaggttgcagtgagctgagatctcgccactgcactccagcctgggtgacagagcaagactccgtctcaaaaaaaaaaaaagtcccaagcctctccacacctcacccctaacaggagcccactctctccacaccccctgctggggatgaaaggccatccctcccctagcatcgcagctcaacctttgctaggtgccatggagtgaagtggatcctgcctgcctttccggggggcttccctcactccccagctgtagctgggcagtagccctctcctgggaccactcatctggcccagggggcacaggagtacaacctgtcccccattctggccacatttcctccacgacctggtctttcccggccacggggaagaggaagtgtttgcccaactccacaaaaacaccacaacctttctgcacatacagggcaggggtcccacatcagatgggccaggaactgcaactgcccctgagaaccagtggcctgaacagacacagccactggggccactaatccaggacccagagtctctgctaccccactccaggctgcggggccggggcggggggggttcccactccacacctctgagagcctccgtacttccagagccccacaaggaggttctgccctcaacttgggagccaccctggcaaagacccagcccctctttcccagctacactgctttccaagagttcatccagcgaaggggttgagggacaggttgggagggtgggctgggggtccttcctctaggtgcatgccccagagtcgtgcacactcttccccacaccccaactcttctcacttgcgctcctgatgagctaagaggagttgacgctgtcaccccgggacggtcggctgcccacccttcgcaccctgcaccccgagagacacccccgacccctcccccggagtctcctggctgcaagtcggctcgcctgcaggcagggcgggggcgcacagcacctccgggtggcggcgcagacccggcggggacccccgaaatcctcccgtcccgggaggcgaccgcggcccagacccagcgcgggaccgcgagcgcgcgcggacctacccgctccacatcccggcgcctcggggcgcccaggcgtccgttcccagcgccgccgcgtcctcccagcgccgcgtccccgcccgccgccgactccgccaggggccgagccgccccaccgcctgtcagccctgcccgcggccggtcagtaggtctcagacgcctgggctcgcggcccccagcccagccccgaccctgccctgggcgggtcacgtggcggaggggggagcggcccgaggacacgtgcccggccccgcccctccgccggcccggcgctgggatccggcgcgcgctcccaaggcctggccccacccggcccgccgcgccgggacagggagaccacggcgctcggagggaacccggcccccaacatcccgcgggccgcgccgcgctcagactccccagctgactcctcctctccagtcgccctccgcaccacccactttgggccacccctgctcaagaacctacaatggctcccgagctctcagctcttcgattctcacacagattgtcacttaaggccagcagacaccctcccccctcctcacccggccctccttccctaggctgtctgcttagtgcctgtccctgtgcaacatcctgcctgctgggaaggggaggggacaaacccgaaacaagttttctgagtcctactctctgagttttatcccgaaggagtttccacttctggtccaactctcctcactcagcctcctgccacttaacacgctctgcccatccctgcctttactcaccatctgccctctggatagtattccccaccccacccccaccgacacacacacatacacacacctgtctggtcccacatcctccgtgaaaccttccctgaatcccagacgactggtctacctgtccctcagttcctctgtcccacccattctgagtcctgatcattcgtctcaacttcagcctgggactggaccagtaagagcagaacccgtcttctctcccgccaggtaccatggctcccaccttccctgtctaggggaggactgggagcgtggtgggaggtacttccccttctaggtgctaccagaggtcccagtgctacccctccaggcccactgactcaggccgcaggctcaagttagtcagatcttcgtttgaggatacattttattcattcattctactcattcatacattcagccactccatctgagcatagactatggggcatgcaaggggctggggacccagcaggaaactgtacagacataggttctgccctcctggggctccacgttggtggaggatggaggatgggggacgtattctctaagacctccacgtccagggcacaaatagacaatgctctttccccgctgggcacagcgcacagcaaggtatggaatctggagagtggaggcgaggctggattctatgccttgcttgctcccttggccagcactttgtgcagtgaacaacctaggcagttctccatagcatcccttccaactttctagaatcattcagcccaggcgtcccatagccatcactcagcagggcagttgtttccatggccacggcttccagagggcagggattctctctttcttggagctatgttcccctaccccacccccagcccagctcagggtctggcccacccaaagcagatgtccacatgtgtttgctggcttgaatccctcatcagttggtcttgagcaactgttgtcttcctggcccttattttgttcactatttagagaaggaggagaaaatgacacaaaaggaacccagcacagggcccttgccctccaagtcttcacaagccccggcaggagataagtcatggcaacccagaccagtgggagataaagggtggaggaggcgtcagctcagggctatgtccctggaggaagagtcctcagcctgggaggtctggtggaccggggaggcccttgagcgaggtcttgaaggacaagtctgtggtcaccactctggaagcatccacactcaatttctaaccaaaaatagcctgtcatccatgcttcctgctaccatggactcctagggctcactgcctcccccagtagggaggaccctcctgctcagctgaacttgctcctcagttgaaaaggatgggctcggagaagttaaggaacctgcctgatatcacaccagccaggggcagtggggctgagtcctcttacacccgttttccaaaaagaccacccagaaactagaggctcactggcagctgcagctgtgtgcagccaggcagcaa

SEQ ID NO: 915412 - DNA, 4001 bp, Homo sapiens
aactaatgttttctataacctcacctaaaacacctagtaggtactcaatgtttgatgactcagaactaatctctcaatgtctgaattttaaagatgggcatgcaaagtatgagaaaaacaaaggagggtaatcatctctgaattgtcgagtgtcaagtttgtataatacagcataaaactggaattactacaagaagtaatcgtagatacaaccatcacaaaattaggatctagtatctaatacaaaagtacagtgacagcagaacctgaccaggtaaatgacataacaatttcactcatcagacagtacagaatattaagcataaaagaattatttagcccaaatggtatttaaatctaatttaggtaactagatgatgagtctgttcctactctactccattttccaaaggaaatccgacaaaacaaagatgtttgttattccaagccttctctcacatgaatcctcaatatatcattggaaaatactcaagaaggaatgaataattaacatttccccagtaattcccttttgtaccaccatgagactcagacgctgcttcatgttgaaaagagaaaaaggggaggtgagatgagaaaaattccaagtaaaatgatcatgacatagcatctggcagagattgaaaaatcatcaacattgccaaaagaattgtcagtgatgaaagtcaagagaacaaaatgaggttttccgacaagccacagccccatctaacctaaggggcaaaaatctccactgccgacgctacccctttcacccccaaccaccccatgctcaagtcgtctccaattcagatgtttcctctatggcccagactaatttcccacccaggtgaaaatcatttaattttttctactaccaccccttcccaccttccacgacatcagcacttcgcagggccaagcctctggggaaaacaacgcccagatcccaccctccttggccaaggttgaagagggcccgctctcgggagtggggcttccctgagtgggcctcacagagctgaggaactgggaaaagagcaaggaataagggtggggctcaagaaagggggccggggtacgggcaatgaccgagaccggaggaagaaagggatggacaagaggctgggcggggtgaggtctggggagggagggcagatcgaccggagatggccggactgcggggaacggagccggggagtcgaggattgaagaacccggggaacagggtaaaaactcggccactggcgaagagccagtggcaccggggggcacatcgggaagggctgcggtggcaacgagcgcggacgcgaggcgggcagggagcctccgcggacggaagggccgcaccgggggcggtgcggggacgctgcggccagctgccaggagtaggggagccacgcactcaccgctttgctcccccaggaacaccagcttgaatttcctcagcggattcccgaagtctccgcccgtggacattgtggaactagaggagcggccgccgcctcagcctagagacctcccggaccgatgctgctccagccagctgacgaaaaaggcgagcggaagggcgggcaccgagctctctcggcccctgcaaggcccggtggaggagcccggctggagggcagcaggactctccacagactggcagccgccgccgcctcccggcagagtagcctagcaccgagcgaggcccgcggctgggaagggaaggagggcggtgtcggcaggagccaggggtgtcctctggcttcccaaagctagggccgttccctccttccgcactcggctcccagacctggggaagagaagctgagggtggcggagccggaaccgcagacgtatctgggacctctcacgcgcagcgcctgagcttccacagctgccgccgccgccgcagcccaacctgctgagtgcgcgagcctctggagcggcgcggggcgagcccgggcgcgagcctgcggccccgccggccgctggcgtgcgtgcgtgcgtgcatgcgtgcgcgccaccgccatcgccatcgccttcctggtttggacagctctaccggctcctcccgcacggcggcgacggggcaggttaggtttccactggcgtcaaaagaagccaggaggaggcggggcaagccagggataagttagtgggaggctggagcccttacgtcacttacataatgagccaatcggaaggggctgagggcgagcccacacgcgagtgaggtggcagcgtgagagcgcgcgcagccctcgagctgtggaaagcggagcactgtggcggccataagaagtgtggcgcctctcagcctgaggggaggggaaggaaagaaaggggagggggagaagggtggggcggaggcggggccgggacaaaggtggaatatgatcccccaaaaagtgtgggtggggtcctatagccttaaaatttgtaatgggagcctctttcctgagccctcagccgtgcctcacagtcctcagatcccttcttcaccattgcacacaccccaccttctccatcctctcatcataattcctcacaggcatcttactaaataacattctcctccattgctcccaggaatgttataactgccagaatcatggcctcccaattttgcagatgaggaaactgaagcttagagggagtaaatgacttgcaaaatccataaagcgggctgggcgcggtggcccacggctgtaatcccagcactttgggaggcggaggcgagtggatcacgaggtcaagagatcgagaccatcctggccaacatggtgaaaccctgtctctactaaaaatgcaaaaattagctgggggtggtggcgcgcgcctgtagtcccagctactcgggaagctgaggcaggagaatcgcttgaacccgggaggcggaggttgcagtgagccgagatcacaccactgcactccagcctggcgacagagcgagactccatctcaacagaaaaaaaaaaaaaaaaaaaaaaaaaaagccgggcgtggtggctcatccctgtaatcccagcactttggaaggctgagttgggtggatcacctgacgtcaggagttccagaccagccttggccaacatgatgaaaccccatctctactaaaaatacaaaaaattaacgtggtgtggtggcgggtgcctgtaatcccagctacttgggaggctgaggcaggagaatcgcttgaacacgggaggcggaggttgcagtgagccaaggtcacaccattgcactccagtctgggcaacaagagcgagactctgtctccaaaaaaaaaaatccataaagcagctgggcgcggtggctcacgtctgtaatcccagcactttgggaggccgaggcggtagaatcgcttgagcccaggagttcgagaccaggctgggcaacaaagcaagacactatctctacaaaaaataaaatagccgaatatcgtggtgtgctcctgtagttccggctactcaggagcctgaagcagaaggattgcttgagtccaggagttggaggctgaggtatggcaccactacactgaaatctgggtgacagaacaagtccctgtcttaaaaaaaaaaaaaaaaaacaaaaaaactttctaagtgaataataaaaaatatgtccttacatttgtgtctatacacaaatgtatatcatttgtgtatatcattcacaaaacatttatgtactttttctcattattggggagttatttgcttagctgtagaaatgacaggattgaaaaagtgccttctcaggcccagggatgaattgctgacctagaataaattacagggaagaaccaaagttcttaaaatatcatctattctggcctatcaagacaacagctatatcctcaaaccatctctatcaaaatttactcccttctggttcctctcccagccatgtgcaggtagaacatgcatctaaaataaaatggtaaaaacctggcttgtagcatggacatttgattttacaagtagtttgtcagatctaatagggtcctc

SEQ ID NO: 915413 - DNA, 4001 bp, Homo sapiens
taattcatgaagagttacatcaaaaggacatggagtctacagacttctaacgcataagaaaactatagacactgaccatgaaaacagagatcaatctttcattgtcaaagctaatgaatggcattacttgacaatatagtaacctcaaaagataattaacttcacatcctgaattgaatgctgaaacagaaaaaggacattaggttaaaactaaaaatctaaataaactatggacttaagttaataataacatatcaatattagttcattaattgttaacaaatgtgccatactaatgcaagatgttgataacaggggaaactagatgtgtgggtatatgggaactctacactatcttttcaatttttctgtaagtctaaaactgttctaaaaaatgaagtctattaaaaaaaatctaaccaggcttcagtaatggaggggggagggtagtagaggcttaaacaaggtacgaaattagaagccataaaactctccattatgcattagaacatacacaaatactcaagaaattcaaaggaaacctgaagatacttaggaagttaagcactccattcatgctaaaacctttttaggcaggaagatgaataggttttttcatgcaaactaaatagctgtgcatcacaacataaggaaggcaataatatccttagaatgcacaataagcactttggatcctttttatcaataataaccaataaactatattttatgtttgggaactatcctgatattgacacagaaaagctggactagaagcaactccataggttctaccaagttactcacctaaagacacaagtttatacttacttcaggaaaatatataagcaaaaaggagggagattgtatttttccccccaaaagggaggaggggaagataatctacacatgaaaggagaaaaatgatttcccagttctaactggaggcaattttgcaagagtattaacctctgtgatggcatacaaattagtataaatagttcaaagtagtaataaaagctacgaatttatatcacttacatgccttccagtcaaaacaaataactaatgttttctataacctcacctaaaacacctagtaggtactcaatgtttgatgactcagaactaatctctcaatgtctgaattttaaagatgggcatgcaaagtatgagaaaaacaaaggagggtaatcatctctgaattgtcgagtgtcaagtttgtataatacagcataaaactggaattactacaagaagtaatcgtagatacaaccatcacaaaattaggatctagtatctaatacaaaagtacagtgacagcagaacctgaccaggtaaatgacataacaatttcactcatcagacagtacagaatattaagcataaaagaattatttagcccaaatggtatttaaatctaatttaggtaactagatgatgagtctgttcctactctactccattttccaaaggaaatccgacaaaacaaagatgtttgttattccaagccttctctcacatgaatcctcaatatatcattggaaaatactcaagaaggaatgaataattaacatttccccagtaattcccttttgtaccaccatgagactcagacgctgcttcatgttgaaaagagaaaaaggggaggtgagatgagaaaaattccaagtaaaatgatcatgacatagcatctggcagagattgaaaaatcatcaacattgccaaaagaattgtcagtgatgaaagtcaagagaacaaaatgaggttttccgacaagccacagccccatctaacctaaggggcaaaaatctccactgccgacgctacccctttcacccccaaccaccccatgctcaagtcgtctccaattcagatgtttcctctatggcccagactaatttcccacccaggtgaaaatcatttaattttttctactaccaccccttcccaccttccacgacatcagcacttcgcagggccaagcctctggggaaaacaacgcccagatcccaccctccttggccaaggttgaagagggcccgctctcgggagtggggcttccctgagtgggcctcacagagctgaggaactgggaaaagagcaaggaataagggtggggctcaagaaagggggccggggtacgggcaatgaccgagaccggaggaagaaagggatggacaagaggctgggcggggtgaggtctggggagggagggcagatcgaccggagatggccggactgcggggaacggagccggggagtcgaggattgaagaacccggggaacagggtaaaaactcggccactggcgaagagccagtggcaccggggggcacatcgggaagggctgcggtggcaacgagcgcggacgcgaggcgggcagggagcctccgcggacggaagggccgcaccgggggcggtgcggggacgctgcggccagctgccaggagtaggggagccacgcactcaccgctttgctcccccaggaacaccagcttgaatttcctcagcggattcccgaagtctccgcccgtggacattgtggaactagaggagcggccgccgcctcagcctagagacctcccggaccgatgctgctccagccagctgacgaaaaaggcgagcggaagggcgggcaccgagctctctcggcccctgcaaggcccggtggaggagcccggctggagggcagcaggactctccacagactggcagccgccgccgcctcccggcagagtagcctagcaccgagcgaggcccgcggctgggaagggaaggagggcggtgtcggcaggagccaggggtgtcctctggcttcccaaagctagggccgttccctccttccgcactcggctcccagacctggggaagagaagctgagggtggcggagccggaaccgcagacgtatctgggacctctcacgcgcagcgcctgagcttccacagctgccgccgccgccgcagcccaacctgctgagtgcgcgagcctctggagcggcgcggggcgagcccgggcgcgagcctgcggccccgccggccgctggcgtgcgtgcgtgcgtgcatgcgtgcgcgccaccgccatcgccatcgccttcctggtttggacagctctaccggctcctcccgcacggcggcgacggggcaggttaggtttccactggcgtcaaaagaagccaggaggaggcggggcaagccagggataagttagtgggaggctggagcccttacgtcacttacataatgagccaatcggaaggggctgagggcgagcccacacgcgagtgaggtggcagcgtgagagcgcgcgcagccctcgagctgtggaaagcggagcactgtggcggccataagaagtgtggcgcctctcagcctgaggggaggggaaggaaagaaaggggagggggagaagggtggggcggaggcggggccgggacaaaggtggaatatgatcccccaaaaagtgtgggtggggtcctatagccttaaaatttgtaatgggagcctctttcctgagccctcagccgtgcctcacagtcctcagatcccttcttcaccattgcacacaccccaccttctccatcctctcatcataattcctcacaggcatcttactaaataacattctcctccattgctcccaggaatgttataactgccagaatcatggcctcccaattttgcagatgaggaaactgaagcttagagggagtaaatgacttgcaaaatccataaagcgggctgggcgcggtggcccacggctgtaatcccagcactttgggaggcggaggcgagtggatcacgaggtcaagagatcgagaccatcctggccaacatggtgaaaccctgtctctactaaaaatgcaaaaattagctgggggtggtggcgcgcgcctgtagtcccagctactcgggaagctgaggcaggagaatcgcttgaacccgggaggcggaggttgcagtgagccgagatcacaccactgcactccagcctggcgacag

SEQ ID NO: 915414 - DNA, 4001 bp, Homo sapiens
gcttcggcagcacatacactaaaactgaagcatgcaaaagatgagcaaggcccctgcgcaaggatttaaaaaaaaacagtggctcatgcctgtaatcccagcactttgggaggccgaagcagtggatcacttgagttcaggagttcgagaccagcttggccaacatggtgaaacctcgtctctactaaacatatataaattagccgggcgtggtggtgcatgcctgtaatcccagctactcgggaggctgaggcaggagaatcgcttgaacccgggaggcagagattgcagtgagccaagattgcaccactgcactccagcctgggtgacagagcgagactctatctcaaaacaaaacgagagaaacaattgctcatttttaaaaaaagagactgagtgtggtggctgacgcctgtaatcccagtactttgggaggctgagacgggcagatcacctgaggtcgggagttcaagaccagcctgaccaacatggagaaaccctgtctctactaaaaatacaaaaaattagccgggcatggtggcgcatgcctgtaatcccagctactcgggaggctgaggcaggagaatcacttttatcgggaggcggaggttgtggtgagccgagatcgtgccattgcctgggcaacaagagcgaaactctgtctcaaaaaaaaaaaaaaaagacaccaccctaaatgcagaccaaggaattggcccccgtctctcactacccaaaagagctctgagcagtgctggctcaaaagaacctggggaaacagatgtcaggacccaaagggatcttcagtcaccctgagaaatgagcaggaccttgggccacttgaatgcaagcagtgaccagcatggagcagggggagagcccactcctctctgagctggtcctcgccagggacgtttgcttcaactggagtccccatttccctggccccagacagcccccagtgctcggactgcccagaacagctccaccccatagctgattattcagcctccctccagcctcctgccctggccttggggactcctcgatcctgggcagtcaggaaaagaggctgccgttgaatggggaacacctctggaaggatgcccaggccggagaaggggtctgagcctctgagccacaggttatgggcagaccttcaaggttactcaagccagacaagagatttggtggcaggccagaaatgtgctccctagaggaggagttggaatgggtttgagcagccagaaagtcaagtcagacctttgggatggagaatgcaggctcctaacagtaaggagaatggagcaaggaggcgcctgcccctcctccatgccaccgtctgcctttaaagagccaggtaaggacctgagcacatagcgggccatgggatgtctttgaggttcacagaaactctgtagggaaaatgaaagaggtaccttctaaaatcaaccccttggggccccaaagaaggaagagagagacccggggctgagctgagggcaggggtgtgctcaccgtgctggggcgcggagcatgtgggggcacgaggctgggtcgaagacggcctgcagggactcacagtcctggaaggacaggttgtgagtcttccgcacccctggatgggcgatagggtctcagtgggcctcgccgacctccctgctgaggcaccccttggctggccggctgcccactcaccgaacttgcaatgcagctggaccaccaggcggctgctccggccattcagggagatgcagcatttttccaccgtcttctccagcatcgccagtgagcggaagacagacaggaaagactgcatgggataagacacctcagcctagcatcacatctctgcaacaagctctcctgtcccatgcaggcccacacccatcatgggcccagcatgtaactctgggaaaagggctcccacgtcacctcgggcactggcatccttctaggcctcattcatgctcttccttatgcttggaatgccttgaaagacctgcttaccttttttttttttttttttgagatggagtctcgctctgtcacccaggctggagtgcagtggtgcgatctcagctcactgcaacctccacctcccggattcaagcaattctcctgcctcagcctcccgagtagctgggattacaggcgcgtgccaccacgcccagctaatttttgtatttttagtagagacggggtttcgccatgttggccaggctggtctcgaactcctgacctcgtgatccgcctgcctcggcctcccaaagtgctgggattacaggcgtgagccaccgcgcccggccaaaagacgtgcttacctttcttgacgaacttgagcgtcaccaccctctcaggtccccgctgtgatgcttttaccatggccctccctgtgttttgcatggattgggcttgcacgtgtctctctccccacttagcatctactgagtaccccagggcagaggcacagctggtggagattcctggggtggagtagtgccactgctgagggaagggcctcaccttcatcaggatcttacagcgcagcaggtcctgaccaggggtggctgcctggtattgctggaagaagagcggggcaaagagaaagcaggcataggcagagcgggaggagttcaccgtccggagggagagctgggccacgaagagcagggagagggacgtggtcagggggcagccacagacccagccctctggctgcttctgctcacacacttgccctatcgtcctcccgctccgccaccacctgctgaaaaaccctcctttccccatggaagccttcagagtcggccccggcgctgctgccgcagaggaggggtcgcacacccaggccttccccgagtttctctaagtgcacgtcaccccctgggagctcgcaggacagctttcctcaattcacacaccggcctgggaagatgacagccgccagactaagaaactgaaactttgccgacaaatctgccagcggtcatcccgcctagtgggggcgagactctagtccgggttacccgctcccggctggagtcccacccgccccccacaccctagcccctcaccccgtcctccaagggttccaggtagagctcgtccccgatgcgggacagggagtggacggccttgccgagcactgcggggagaagagcggaagggggttaggctggcggctccgcggctgctgcaccgccgctgccaggccgacctgcactcacccttcacgttgccgcccgtgaccaggcacttcatgctgccccagcgctccgccagcggccaacactgcccagctctccgcgacctccgggtccggggtcccttcccgcgcaccgcccctgccggccccgcccccgcctccccattggtccacgtgcaggcgcctccgtcacgtgagaaaaacgctcacaggctctgccgtcacgtgacggcgcacgttgtccggggtgtcacgtgaccggggaggcccgcggcgcccgccagccagctgctcctggctcccccggcacgcctcggccttccgtgcccctggagatcggggcgttccgcgggccgcgcaccggattgcgaaggtcagagaggacgcagctgtggggcgcgaggtccctgtgcagtggaccgagtgctggactcggagtcggagtgtgggggcgagctctctggggtcacccacttagtagagttcccgggcgtctgccgggggatacagggtgcaagcaagaccatcgcacccactctgggcctgagactcggactccagcagcaatccccaactctagaaagaagtcaaagcagcttgcttgcagcagccgggagtgggaggtggctgctccttccggcttcgaggatcctttaaggaaaaacggcagtttctccaggcagaaaggggtagaacggtgcccctggcagagggaagaacaagagtaaatgctcagcggtgtgggctccgccccctggagaggggagtaggtctgtgagtctcagagaggcgtagg

SEQ ID NO: 915415 - DNA, 4001 bp, Homo sapiens
ccaggtaaggacctgagcacatagcgggccatgggatgtctttgaggttcacagaaactctgtagggaaaatgaaagaggtaccttctaaaatcaaccccttggggccccaaagaaggaagagagagacccggggctgagctgagggcaggggtgtgctcaccgtgctggggcgcggagcatgtgggggcacgaggctgggtcgaagacggcctgcagggactcacagtcctggaaggacaggttgtgagtcttccgcacccctggatgggcgatagggtctcagtgggcctcgccgacctccctgctgaggcaccccttggctggccggctgcccactcaccgaacttgcaatgcagctggaccaccaggcggctgctccggccattcagggagatgcagcatttttccaccgtcttctccagcatcgccagtgagcggaagacagacaggaaagactgcatgggataagacacctcagcctagcatcacatctctgcaacaagctctcctgtcccatgcaggcccacacccatcatgggcccagcatgtaactctgggaaaagggctcccacgtcacctcgggcactggcatccttctaggcctcattcatgctcttccttatgcttggaatgccttgaaagacctgcttaccttttttttttttttttttgagatggagtctcgctctgtcacccaggctggagtgcagtggtgcgatctcagctcactgcaacctccacctcccggattcaagcaattctcctgcctcagcctcccgagtagctgggattacaggcgcgtgccaccacgcccagctaatttttgtatttttagtagagacggggtttcgccatgttggccaggctggtctcgaactcctgacctcgtgatccgcctgcctcggcctcccaaagtgctgggattacaggcgtgagccaccgcgcccggccaaaagacgtgcttacctttcttgacgaacttgagcgtcaccaccctctcaggtccccgctgtgatgcttttaccatggccctccctgtgttttgcatggattgggcttgcacgtgtctctctccccacttagcatctactgagtaccccagggcagaggcacagctggtggagattcctggggtggagtagtgccactgctgagggaagggcctcaccttcatcaggatcttacagcgcagcaggtcctgaccaggggtggctgcctggtattgctggaagaagagcggggcaaagagaaagcaggcataggcagagcgggaggagttcaccgtccggagggagagctgggccacgaagagcagggagagggacgtggtcagggggcagccacagacccagccctctggctgcttctgctcacacacttgccctatcgtcctcccgctccgccaccacctgctgaaaaaccctcctttccccatggaagccttcagagtcggccccggcgctgctgccgcagaggaggggtcgcacacccaggccttccccgagtttctctaagtgcacgtcaccccctgggagctcgcaggacagctttcctcaattcacacaccggcctgggaagatgacagccgccagactaagaaactgaaactttgccgacaaatctgccagcggtcatcccgcctagtgggggcgagactctagtccgggttacccgctcccggctggagtcccacccgccccccacaccctagcccctcaccccgtcctccaagggttccaggtagagctcgtccccgatgcgggacagggagtggacggccttgccgagcactgcggggagaagagcggaagggggttaggctggcggctccgcggctgctgcaccgccgctgccaggccgacctgcactcacccttcacgttgccgcccgtgaccaggcacttcatgctgccccagcgctccgccagcggccaacactgcccagctctccgcgacctccgggtccggggtcccttcccgcgcaccgcccctgccggccccgcccccgcctccccattggtccacgtgcaggcgcctccgtcacgtgagaaaaacgctcacaggctctgccgtcacgtgacggcgcacgttgtccggggtgtcacgtgaccggggaggcccgcggcgcccgccagccagctgctcctggctcccccggcacgcctcggccttccgtgcccctggagatcggggcgttccgcgggccgcgcaccggattgcgaaggtcagagaggacgcagctgtggggcgcgaggtccctgtgcagtggaccgagtgctggactcggagtcggagtgtgggggcgagctctctggggtcacccacttagtagagttcccgggcgtctgccgggggatacagggtgcaagcaagaccatcgcacccactctgggcctgagactcggactccagcagcaatccccaactctagaaagaagtcaaagcagcttgcttgcagcagccgggagtgggaggtggctgctccttccggcttcgaggatcctttaaggaaaaacggcagtttctccaggcagaaaggggtagaacggtgcccctggcagagggaagaacaagagtaaatgctcagcggtgtgggctccgccccctggagaggggagtaggtctgtgagtctcagagaggcgtaggggccgccagatgatgaggggcaccgctgggacgctctggaaacgttttacgagggtagatcgtggttatgtgcctttttttgtttgtttgttttttgagacatattcttgctctgtcacccaggctggagtgcagtggcgcgaacacggctcactgccgcctggaactcctgggctcaagggatcctcccatctcagtctcctgagtatctgggaccacaggcacacccaccacgcccggccctttttttttttttttttttttgggtagagacggagtcttgccatgttgcccaggccggtctcaactgtggggttcaagctgtctttccgccttggcctctcaaagtggagtgagctactgcaccggcctgttttttgttttttgtgtgtgtgtgtggggtttttttgtttgtttgttttgagatagagcctcgctctgtcgcccaggctggagtacagtggcacgatcacgcctcccaggttcaagcgattctcctgcttcagcctcccaagtagctgggattacaggcgcctgccacaacgcctggctaatttttgtacttttagtagagacgggtttcaccatgttggccaggctggtctcgaactcctgacctcaagtgatccgcccgcctcggtctcccaaagtgctgggattacaggcatgggccaccgcgcccagccccgggtctgtatttttaaaagaccccagactggccgggtacggtggcttacgcctgtaatcctaccactttgggaggccgaggcgggcggatcacgaggtcaagagatccagaccattctggccaacatggtgaaaccccgtctctactaaaagtacaaaaagtagccgggcatgttgtcacgcgcctgtagtcccagctactctggaggctgaggcaggagaattgcttgaacccggaggcggaggttgcagtgagccgagatcgcgccactgcactctagcctggcaacagagtgagactccatctcaaaaaaaaaaaccagactgtgtgccaggtggggatgcatcagctggaaggtattccccttcccctgggcttccgggtccacgtgtgtaaaatgtaagggagtcctggagaaactcactgacccctactctccccacagtaccaaggctctggtagttcttggaagggcccagggcatccctgtattcctgcagggcctgcccgtgccttgcccctcaggtcctgtggtagtgcagaagatatatttatctctgccacccttgctctccagacccactttcaaatgagttgaattgatacataataattgtacacatttggatacatgcatacactttgtttctccctctccttccctt

SEQ ID NO: 915416 - DNA, 4001 bp, Homo sapiens
tggaaaaccatgcagaaaatttaattttctgtatgcactgatgcatatgtgcaatttctgtatgcatcagtgacatggaaagatgctcacatgaaaaagcagagaatagaatgacaatagcaagtatagtaggattccctttatgtagatacgtttgtatttgtacatatatgaaatcacaggaattctgaaaggatacacactaaaatcttaacagtgtttaatttctgaaaaaaatagaattggcattgataagagggccttttgcactttttattttattaatttttgtatcatttgaattattcaaaacaagcaagtaactatttttattaattttgtgatacatttattttggataaaactgttttaaagactagctgtatatgtgctcatagtcacttttccatattttcttctaaatttcccccagaaaaacttaagatctggctaatttcaaatatgaccaccacccttagcttttctttcttttcggatgaacatggagaaagcaggctaaaatatggacctgtagacagcatgaagttaggattgtgaaagagttatcttggattcatattttgacactcagaaaccttgcaaatgcttgatctcctctcttctaacaaaaggtctcagcagtagaccagcctcgggatctcaaaggctgagtggttggtgctggctcagccctgtccccaccggccactgccatctcgacattgccatctgacatcagagctacaggcgtgcctccctccacacagcacagattcattttgacaaactagtttggggtggcttggacagtgcaggaacagtagtttctggtgagtgatatcattagttcaggaggccagggtgcagcagcagcagcagccccccatttccatcccagctgcccaccctatacccacacacatacaccccgttacttggcccacaatcttccctcctaacatcttcaacttagtctgtacacaatttccaagtaataactgtgtgctcaagtgtgacctctcattatcacacctgttccacttattcattcactctgcaaatactatcgtctgttttttgccaaacatcatgtatcaaaaatgtgacaaaataaaaagcctttttataagtctcaagtatccacaaaataacactacaattcttgctcttccttcagacaacctcttgcatgaaccacttcagaaagagaaatatatcatcacaatccctggccaggaatcctgactcaagaacataacctcaaagcagggtctctaccatggcaattctcaaaattaatacaaatcagaatcatgagcgagtttgtttttaaaaagaaatgcagatcatcaggtcccaaagagtctggctgtttgggaaggaatccagaaattgcatttttaaacattcagtgattctaaaatgagtgaatattttgagaaacattggtctcctacttaggccaatctagttcaggaaatgcctggcaatacttgttaatacctgggaaaccatacatttcctcccaccctattatgttcctgattatttttctcacctgaactaccagtattcatttccaagagtctcacaccttaccttctgctgatttgtacacattcattcaagaagcactccttaaacctttcctctgacaatagcattcatttatagtaattcagatattttgcatctttctatgaaccttcagtggccctaaacttggcctcttgtaccttttttattttcatacattaaaaaaaaattgatgtagctttgctcattccatcccctcatcacctggaaggaaaaaaagctcaagcacttctagttagaaacataaaaatgtaataaatattttggctcaaggcatgaaaagtatgagtgttaccttgctcagcaggctgcctggccaaagtgttgagatgtctgcaatttggttgatattactcaataccaaagagaaggcaaagtgtgttctctgctctctccttgccctcttgtttctcagaacatgctgctgagctgtttatcagcttccactgtccttcccagcctcccccaccatggagggctaaccacaaatgatggcagccaatcatgggccaggagaccccagctccagctgccacctggctctttaggaagcttagctcaggggggcctgagtgtagaaccatgtgcgagagtttgctggggcactggctgccagttccctccctgagaatgtttgggttggaaatggtcttgtcagtcagtataagccccagcttttgccagggttctatatctctgtgcctcagttccacatctgtaaaaaggaaaggctagtagtatatacctcaaagagtcaataatgttatacaatgacagttattataggaaaatacttgaaacgatgtctgcctctttgtagatgttcatcagatattaacaacactatggaatttttttattattatcttgaaatgttatccaaacaatctcagaacctttcaacctggtcaaatcttgctgaggaaggttgatgctccttgtaactactgtaagtttaaacattactcgagtatggacatcaacagacctggatttaaatcttgactcaggcctttgattcattacttaaactttaggaacttcaatctcatcacctgcaacctaagattaataatattagtccccattattgagagcaatgggctaggcttgtaagtgttttatgtgtcatttaattttcacaacagtcatacgcatttgataatattatgtctaaaaagaagcaacagaagttcagagcaatggagtgacttgcccatggtcacacagccactacttagtgaaggtggggtggaattccaaagctcatgttcctaatcactccattataccatgaaaggagaataatgaaagccactttgtagtaatagtctaaggataattcaagaatgaataggtgtatacacacctctgtctctgtttcaaaacccctttataattctcagaccagctttatccccaaagtctttctgtgttcagctaataagtgagagattccttgcttgtctgattctcagcaaaaactgtcaaggaggcaggtgcaaggatttcactgttctgtgctgccctcattcgacgctcctcttacatctcccactctttcgcatttggacctacttaaccacacaacagccctggggccacagctgctcactaaagacaaggcagaagccactgcagtaacactgggagagaggagaaactggtctgtggcttctaggagcttcagtgtgtttttccccaaggagatgcagcctttacctgagggtcatatttgaggcaacatggcgagaaaggcaggtgagagctaagaatttcctgaagacagtgttcatgttcaacaggtggccctgagccctccttacacaatgaggtcaagtagagaggagtcataacatgacttacatgcaagagggtgtccttccccccccatcctcctgctccttaaaatcttgcatctccaatggacttacaggaagaaaaagaaaaggccagatgttcatgcttccccttgaaggaaagagcaaaataataatatcccacagtattagaacaaagcagcaagttcaaggatcaggcttcagttctgtaggttcacttggaagttatgtaaaactaaagtgacaaaatgcactggtttgttttggactttccttggtttagcaccgagagtctacggtgaacagagttggttggttgcccataacctccaaagcagagttagaaaatttctctgaggtcaataatttataaatggaatccttttcaatttttcttggaaaagtaagctggtcaaatggactcatcaaagaatggtgaaggtgtgaggttcagaccagataagggaggagctttctctctctctctctctctcttcaaatcatatttaacatagatttctgtattgctcaatttttcatcagtcatgtatacttttataatta

SEQ ID NO: 915417 - DNA, 4001 bp, Homo sapiens
ataatctcttgtagttattattttcagtctacttgggagactcgtaagggggtgatctttcaacaattatctggtgggttattaaagcaggtgaggaaatggtgtctcagaaggattattatcaaagttatgaaaacaagcctgtctccctcagttgtatattcagcaaactgccctgcttataaaataatctaggcagtgttttatttatatcatggcctacccaagcctacatgagggaaggcatctgagcaactatgaaaaatgctattcatagaaactaaaaggagacattattgaccctcacttcagaaaactgtaggtgattacactcagcctgagtgattatgatcagagagttgtcccattttgggtggggggaacaccaaagccaaggcctgcttgtttcaaacacctgtgatgactgttattgagatacaaggcaagccatacagtggtaatggattccagatccaaagggatttttcaagaacagttgttttaaagcaatgtttttattgtcgcctcttggtttcattttaaggttgctgtaggaattgtggcttctcgtaagtgaaaacatgattattgtagattacacagaaacattttcttgggcaagacataaggaggattgtccatttttgtagcttagtctaggcccctaaagatttttgaaacagggcttttgacctgttttccctttgatgctctgcttttggctcatttcataatttcaaggccctaaaaacagtggtaaagtttcttattgctaagatgaattacctcctcttgtaacatggttcaagtgtgagtaattaatttttagattactcactttaaccagatgatgtatgcatttaaagaataaacaggaacattgaaagtgttttcacatgattttgccacatttggtttttgaaattttgctttatcaacttgaatatatttttcactggagtagaccattgtatctcttccatagtttcaatatgactgtattagtcacaccttggtttttaaaaagagtttttaaatgattatactatatctaaaataacctactgaagtcttttccttttaataggctacataaaaacaggcagatttaaaagaataagatcctgttcttcagctgagggaggcttcaaggtcaacacattaaagattctttgtaaaggacagaaatataggaccaataaatatatacaattttcccaaccccatgctaacattcttcagcagggagattttcatttattctctctgatgctagggcatagttgagtataatgaaaggactcatagtatgaggtctgggtttatagttcctaatatctgaactgactttttcttttccaaagaaagatactgtactgtgaaacattaaatcttgctgatccgtgctggccatgttttcttgattgctccagagtagcaagtaacctcatgtaagtaacttcaggcatttaatgtgtgaataacagtatcttgcactgttaatcaggtttgaggcatatattattttatttctgctggcagtaaaaccaggattaggtcttccttcctgtcttaggccagagaacgatttatgtacgaagattaataatagtgctctaaaggcctaataattaaatccctgaagcagccagagaacagaaagccccacattttccaaattctactcatcccttccctatctagacaccaaatccacttgtgactaacacactgccaaaatgtggcatcttcattcccttaaagtttactaacataggctcccattttttagctttggtagaaatgaaggtatcagacctacctgaaggccagaggggctgctcacgcctctctgaatctttgccgctaaaccaggtattaattgtcagcacttggggaagattcactgactgcccactatgactgtggcaagcagaaggctgactgtaaagagagtgtgtatgtgtgcctacagatgttcttatgaacactgatctaatgggagtaactgactgtgacctttttttttctttctttagatggttgagggagatacccaacagggtgtaccctcaggatttaactctttcactactagcaacaatggcaacacaattcactatttgtacagataaaaagaaatctgggcaaaacttgatttttaaaaattaagaacattttagaaaaacacagaagaaatacatatagtttctatggtttaaataaacactattttgaatcaaatgagaaagtatttgtcctgaagcagagaccactaataccagtgctattcattttaactttgaggtactcttttgtggtctcattttctttaatgcaaggctcagaaggaaggagttgtaattattcgaggccctctaccaactttatatcaggcagctactgagtaataatacagtgtaatgattaagaaaatgggcttttggggtcaagctcacctggttttctttgccagctctgctatttttcaggtagtagagtcatcttaatccttaagcctctgtttttcaggtagagtcatcttaatccttaagcctctgtttctctgtctctgaaatgaggataatagaaatatttacttcaaaaagttgtcgggaaaagattaaatgagataatgtatgcaaagtgttcagccaaggaagagtttaatattccatagtgatcttgatagcaaaaactacctttataatttcttttattttcttttttttgagatggagtcccgctctgtctcccaggctggagtgcagtggtacgatcttggctcactgcaacctctgctacccaggttcaagcgattctcctacctcagcctcccgaatagctgggattacaggcacacgccaccacacccagctaatttttgtatttttagtggagatggggttttgccatgttggccaggctggtctcaaactcctgaccttgggtgacccacctgccttggcctcccaaagtgctgggattacaggagtgagccacctcgcccagcctataatttctaatagtagcataatttctaaatgcaacctaatttacctaaccttccactattgttggtcatttgatcagtttccatatggcttagatgataaaatgtaatgatcagagctaggcaaatctgggtttgagtttcagttctgtgacctttttgagtgtcagttttcttatctctaaaatggcaataataactaccttattgtaaggattaatggattaaaatgtctatagaatgtacatagtaaatcttacctaatgatgaagatgtacatatattacctaaatatatttgcataagtgactaattttttgcaaaattttagtgtatattttcagggttgatttttttttaaacagatgtatgtagctcagttgattggttgattctcatcatttgaaatgtcgatccatccttaaaaaagcatcgtcatctcttctagttccttctgtgatgatttttttaatctgcaaaaggatattgggttatttccctaacctatttatgtgttatataaagtgttgtataatgattaagatacttgaaattacagcaaccataaggacaactgtcataaaattgatatattggatgtcttcactgtaaatacaaaataagaaatgcaaaaatagaaaccatggatagatttagatgtgttttagcctttggattttactaacatcaaaaaacaggcaatttttagcataacaattagttgctgaatgggttagttgtctcttgacaagactagaaattagtagcacatttgaaaatgggttttaagactccaagtccttgctataccattaggagagcattagacttacagtgatctcatacaaggttcctgatctccaaaagtcctcagcattgaaactaaatataaaatagtaaactatatttattgagcatctactatgtacaaagccatgtggagaattagaaaaaaaatcagacacaggtcttgcccttaaagcagggg

SEQ ID NO: 915418 - DNA, 4001 bp, Homo sapiens
tcaaacatcacctctgcgaggccctccgaccactatatttgaaattatgacacccccacgcccagtgctgccagccctttgccccgcttcgctttctcctaaccacttgacttcctgactgtgttgatcgtctttcttctccaactagaatgcaaccctcgtgaggacggggacttggctgtttttctcactgctacaccctgggtcaacagtcttgggatacagtagctggtcaataaatatttgatgactgactccatacaaccccactgtaaggtgagtcctattctccttcattttacagatctctcccaaggttcagagaggataggtgacttgcccaagaccacacagcaaacatggcagtgcaggccgctggcctgtcctcacagaggagcctcccattattcctccaggaagtcacacagatcaaggtttgaatcctggctctgcccttgctggcttcctggccaagttgttaccttcctggataagcctttttgctctctgattctcactctcctcagccctccctaaaaggagggctgaatgaggtagtgccacagggtgtgtgcctcatgagaggggagccccaaaaccctccactgctgtccccctggggtgcaggcccaccttgacctgggcatagaagctgcccaggctgcagcacacgcggcactcgagcatggcgtcatcattgttgtgggcatagcgcagggccttctcgaagctctccagggccttctggaagacgctgaggcccaggaaggcattgcccatgctcaggctgacctggcctccgagctgggcacctgccctggtaccaggcagcccaaggcaggtcttgcagtaggagatggtcttgtgaaactcgcacagcttctcgttgctgcgtgccaggttcaggtagctctccaggaggaagtcggcatcctccagctcccgggccgtgtcgatctggaccacagcgaactgcacacagcgacggtgggcaggtggtgctcagcctggactctgagccttggaccccagcctgcactgcaggctcagacctggaggccccacacccaccccccagcctcacacccaaagcagcagatcccaaagcttcttttcagacccagagcttctacccgccagcctcagctaccttccctacaccccagcctcacctcccaagctcaggcttgcagccttcaccttctatcccaagcctcagatctggagtctccaccacccacccacccccagccgcaaccctggagcccacaccccgccaggctcagacacagaacaccagacaggaaggctgaaacctacaatgggcttgagacccacaaaccctcgaccctgaggctggagaacctcagtctcagagactcgggcaccacagttcaaggccacaggcctgaatctgatgccaagactcagtatctaagacccagggccttagatataaattcagagcctcgggccctggctgccagcctgtgggacacaggggagcccgaggaggccgagaggggactggggagcctgggagacatccggccccagcctgaccctcgaacgcccccaggccgggtacacccaccttcagcatctccttgtagcggcccatctccgagtgggctgtgaccaggcagcccagcacgcggaagcgccccatgaggtccgagctcttctccagcacctttgtccacacctgcaatgccttctctgtctggttggactggtacagctggagccccttctcgatctgctgcttggtctggtcctgccccatcctccccaagccctgtgtcccacgtggggtgatccctggtggctccgtgcctctaggcactcatggggcaggaatcacagtgccagctgccccccgaaacgtgggaacaaaagcagcgtcgggtgggagccggaatggggcctggatggagagcaggcgccaccctgggaacaaagctggttcagcccgtctgcagctgtcgctgccagttggggccacatggcctctgaggaatgtcagcagcaaggtcacgtgggcctctgctgcacccacccgcgagctgggacgtggcttccctgagcatacaggcaccttgccacctgggcacccccttgggcgtcccttaggcacctctgacactgaccctgaccgccctggcagcacgggccctcccagcagccttgccaaggggccagctccagcaagtgggcaggccttgggctagaggtgctcgggggaaggagagcgaggctggacctgcaggtccggggaagccaggtgagcgcccagccctgcttcttccccatcaagacacccctgaccgcagcatcccctggctctgttcctgaaattcactgagcaccgtgggtcactcatccaggcccaggctgacaccattcaccaactctcaccttagagagtctgggaaagacctccagctggtgagaggcctgagctctagcctggcttccttcgaactctcagtgggaccctagccaagtgacctggcaccgtggactgaagagaggaatggtacctggctcactggactgctatgagaactcaatgacgaaagagttgagaaggacttaggacagtgcccggcacaggaaaccccgcatgtgctgcaagaggctattttgctccatggcaaatccccacccgggccagaacccagcccttgaagtttcaatgtctcacttccaatcccaaccccgggctgaaagggtcctcataatgagatttaacaccagatactgtggagaagggcaaggtcttatgtagtattggggcccccgctagcaggccagctcatccagcccccctttctcctctctctgcatgccagccttcttcctgccccagggcaaaagtttatcctttctggctgggcaattcagtggtttttagtatattcacagagatgcacattaattgccactaattccagaacattttaaccaccccaaaaaggagacgcacacccatcagcagttacaccactccattccccaccttgatatgactgaatcatgtccccccgcaaccaaacgcatatgtttaagtcctaacactcagtatctcataaggtgactgtctttggagacagggtctttaaagggtgattaaggtaaaatgaagtcacattgtacctcatccagttaagactggtatccccccccccttttttttgagacagggtctcactctgtcacctaggctggagtgcagtggtgcagtcacagctcactgcaacctctacctcctaggctcaagtgaccctcccacctcagtctcctgggtagctgagaccacagctgtctagtttttgtagagatgggtttcaccatgttgcccaggctggtcttgaactcctggaggtggaggtttcagtgagccgtgattgtgccactgcactccagcctgagcaccagagcaagaccttgtctcaaaaaataaataaacaataaatttttatttttaaaaattatttttgagacggagttttgctcttgttgcataggctggagtgcagtggcacaatctcagctcactgagacttctacctcccgggttcaagcaattctcctgcctcagcctcccaagtagctgggatgacaggtgtatgccaccacgcctggctaagtttttgtatttagtagagacggggtttcaccatgttggtcaggctggtcttgaacttctgacctcagttgatccacctgcctcagagcctcccgaagtattggggttataggcgtgagccaccatgcctgaccacaatacttttttttttttttgagacactttccctctgtcacccaggctggagtgtggtggtgccatcttggctcactgcaaccttcacctcccaggttcaagtgattctcctgcctcagcctcctgagtagctgggattacagctgcgcaccaccacacctggctaatttttgtatttttagtagagacggggtttcaccatgttggtcaggct

SEQ ID NO: 915419 - DNA, 4001 bp, Homo sapiens
aaactgaggatcagagaggtggcagggctttcctgagaacactcagctggaaggaggccgagctggttcttccctgcacacccctcaccctggttcctgtcttggccaccttcttccccttcctcacctccttcccacttctccatgtcctgccccagggcatagcagcctcatgactggaggatttttccattttcaccctctctgtccctgtcctcagtgggtgacagcctcctcctccctcatcccaggatgtcccatcatagacctggggtctgctctcctttgccctcttcctcatgccaatatccagtcactaaaaccaatcaatgtggactccggaagcttctccttgttggtgtgcttgtcaatatcccatccactgacttggttcaggcagccccatgcctgcctctgtgacccccacaaccccctgaccagcccctgcctcctgtccctgccactccatatccaactcctcagaacccatggtggccttcccaagggcacatctggccatgaccgtcctctgacctcagggcccaggacacaccctgtgggcagctcccaggcccttcctgactggcccttcctcaccctcctctccctccctgggctctgcacccacaggcccactgagtgacatcccagcccctcactactgccctggctctggtctctgctgctctgcacatctggttctccctgcctccatcacttccctgcagccactcttcctcttcccctccctcaaaccccctcacctgagaagctgccctgatggccccagcctggctcagctgacccgccaccccactcctaggacctgggtccccgggggcctctgctgctctctgcaggggtcaagttgagctgcaattccctgtgcctccctgtgcccctctgggctgtgagctccaggcaggcaggatcctgtgtgctcctccctccctgcacctccaggacccagtgaagggcctggcgtagaatggggcaaggaaatagacaaggaagagggaggagaaaggagcagggccaggactccctcccagctcctcctctgtatgtcagggcaccacaggagatggtttccatgtggggagagagaggggcttttaactgcaatgctgaatgtctaaaaccacagtcaaggtactggcaacctcagctggtggccagtgagatatgagctttggcctgggctccctgttaaaagccctgatttgttttggcagcagtaaagcccttccccaggatcaggtggtgctgttggagtgggctgccctccagaatttgcaggactccttcccggaatggttttgtttctagtaatagcctgagccccgctgttcctttttagtcacacaccaccgagctcagcctgctctccctagagcttctgccaatcggtacatctgggctgataggaggagaaatttcagttttcagaaagctgctgagattagaatgcaccttagaaggctggatgatgccacagaggaacgaggagagagaaagcatcgtttggggccgagaagggactgagccccagtcacagcagaagcagacgatgttgggatttgcttgcttcccacaacccagagtcccccacctgcccacactctggcttctcctcaggctgaggtagatttgacacccggcaccccacagctctctactacatgggagtcccgggctccccgcactgtgccagttacgcagaggaggtggactctgcccagaggactccctgtccagctgggcagatgcacttttaaaagacaaatacagttttccatgacagccttctaaagacgagctctggagctgtgtgcccaaggccaggagcctggactgaggcctttcctagggggagctgcccaactgctgtagagtcagtaatgcaaagccctgggaaacttaccgaagccatctcgaagccaagaggaggtctggtgctcctcttgtttgtggatcagcttttatgctgaaggagagaatttcactttcactttccttttgacactgtttcaacctcacttaaatactaaacactgtttaaaagagacaactgtttaaaaaggagctatttctctagatggaaggactaatcatttcttacacaagccatggactcattggtgctttaaagccaccttgggagcagccagagtcgaaggggagccctgaatttctgcccttgcttgagaaataaaggtcttttctttttttttcttttttgtttgtttgtttgtttgtttgtttgtttttttgagacagagtttcgctcttgtcacccagactggagtgcaatggtgcgatctcggctcattgcaacctctgcctcccgggttcaagtgattctcctgcctcagcctcccaggtagctgggattacaggcacctgctgccatgcctggctcatttttccatatttagtagagacggggtttcaccatgttggccaggatggtctcgatctcttgaccttgtgatctgcctccccgtcggtctcccaaaatgctgggattacaggtgtgagccaccgcacctggccaaaataaaggtctcttctaaaaagaaccctgggcagctcttcctactccaggaaggggaggcattcggaggcagggagatgtcaatccccagtgcaccccataggacattgtcttgtaaagacacccagaaaatattgggccagaagtcttgggagaaggccagagggggtgtttcattccatggggatgccctggaggtgaggggtaccttagaccatgtggagcctgggagctcatggccccattaaaatgcatttgggtgcaagaagcagaactaaactcaaaagggcttcaacagcctggacacccattgtctcggtaacagaaaggcaggaagagggtgactcaggttgggtttagtggctcaccaaggtcaccaaggactcagcaggctgtctccattgcactggtcctgggtctgcactgttgccctgcagggactcccatggctgtagcagccttgagtggcccatttttacctggctatgcccaaaagatggagggaaagataattctcatttgtctttttttcagggagttaagtctttcccacagttccccagatgacctgttcccttctccattggccagaactgggccatattttcacacccaaccagaggcctagacaggtggatcacttgagcccacgagttcaagaccagcctggccaacatggcgagaccccgtctctgctaaaaatacagaaaaaaaaattagccgggcatggtggcatgtgcctgtactctcagctacttgggaggcggagatgggaggatcgcctgaacccagaagtcaggctgcagtcagctgagattgctccactgcagtctagcctgggcaactggagtgaaaccatgtctcaaagcaaaacaaaacaaaaaacccccatttctgttgtttaggttagcatgcctctgggtttcactcaaaacactgttgaacgatgttgctgtgtttgggcagagcttccagggaccgctgtggatatcatgaggaagcctcagagctttctcgggcagagcttctacaggtgtcttgccgtggtcagtttctttgctgtttttatggccctctgcaggagtgtccatggtcattatctcagccaccttttggtttcagtttctcatcaggtcttgggggtgtctggccacagcagatgttatcttattacctcagtcctttatacctatgtttatcattttgagggttcagcagtttcactgtgggctgagtcacttgtcgtaagtgactccattttgaaatatttaggatcacaaaactctttaagggggcccccacaagagtctgcattcaacaatcccagagtctgggtttttgccttgtggcataataaaaatttttatttttaaataaatttatgccttgtagcataataaaagtttatttatgccttatgtggcatgataaaaaaatatatttt

SEQ ID NO: 915420 - DNA, 4001 bp, Homo sapiens
gcctgccatggccgccggcgcggggtgggctgggcccaggctgcgctccgggagcctcccaccgggctcggaccgaacccctgtcccgggagaggcagagcgggagtctgcggagtcgcgggcgggggagcggccccgcgggcagaaacggggcggggcgggcacgccccctgctggacaggggcggagttgtcccccgcggccactcccggggttaaacggtctggcccgggatggtgcaacccgccagttgggaaacggacccgcagagaggcttccggcccaccctcggagtcgcgggaaggccgaggggcttcacgaggatggggacgaaccaagatcccaggactggctggcgcccagccccccgcagggcgccttctcctcgcgccctctccccagaggcacctgcagcaccccgcagctcggctctgcgcccctcccgcttccctccctccacagcctcccttcccccgcagggttattttgggaacccagagcctgaggggacctcggaggaatttctccctggtatgggaggtggggggagagaacccaggcgtcctgcccgcctcgccccctcccgggagcccaggaaggcgaggcggggctgcggcagcccccagggggcctgccctaggggaggcggactggatgggagaggaacattcctggggcggggggagcccgctgcggccaggaggcgtcagcgggaagcctgagcctgggaactgagcgctcccaggccacctccgcaaaggtcccaggggtcccggctcagcttgtccacaggccctcttcctccctatccccggctcctgaccctggccccggccccgcacaggcgaactgtgagcgcgcacggagcagggtgtccagaggggggcgctcgcgccaagggtggccggtgggtgcatgacaccattagcaactccggtcactggcggggtcatacgcaccctggcaggggcaaacactccacacccaagttattcgtcggaggccggggacctaagtggaggtgcaggcgtccgcacttacacgcaccgggccacaggcaccggcctcccatcctccgtctctcacacacaatggcacccacaccctgtgcacacctgcacgaagaaaccctcaggcacacatacccagctcgtccaccccagaatgcaaacccgcggacgaggtcgcctcctggacgtgctgttcacttgagccaggccagccttgagtcccgcggccacacaggcgctgacatcctcacacgtgtgcacacacgcaaggcagtgcctctccacgcatgtacactcccacacacatgcacacacccccatgggtgcgcacgcccattccgtcgcccccctcccatttgcggtgcagggcccgccctgcggccccagctccctgactcccctcactcccagattttggcagagccttgccccacggaaaggtaccccggccctacacatactcactcccccaggctggaggacaggggagctcctgtacggagttctcaggcggacttttcctaagagccacccagagccgtccccgcctggctctaccgcttcctcgtgtgaccttgagaatcacttggcctctgggagcctcaattttctcatctgccaaatgggggtacgcgggggagggccccgctggaaggtggctgggaaaagctgggtgcaccgtggaggtcctccgccctccggggatccagcgcgccttagctctcgtggccgctgccccctctcccagacccgggccgcagactccccacccgctcgccgcccccagcccgcccgcgccgccctgggcggggggggagtcgctgggggccgcgccctccttcgcctggcgccccgcccgcgctcgcccactcactcttgggacctgccgcaaggagcccgcaccggcctggccgaccccacctccgtgcgctcccgcccgccggcctcgctgcggctgcggctcccgcccgctctccacgccgcggccccgctccccgccgccccgcccccgcccccgcgccaggctgccccctcccccctccgcccctgcgcggagctccgcaccgccggctgcgccacccccaccgggggctccctctcgccccgcacgcggcggtccctgcggcagcttaacccctcccctgccgcgccgcccgggaggccagggccgcgggcggggggctgcgccactagctgccccgagggcgggcgaccggaggccccgccgcccgggacgcggaggggggaccgaaacgaagagcccctcccccaaccgcggacgccccagtgccccccgccctgcctgggtgtcgggcggaggaagccgggaggggcaggaagcggactgcggtggggaaggggcgccccgcccagcccccagctcgggttcctgttttcgagacaaaccgttcccatggggctaacccggcccgggaccgggcgtcttcctgcaggcagcgggtggcacaggcctagtggaggtcgggggcgtggggacagctggtccttgagatagtctgggggatgggctaggacaagatgggaatattttggggagagggacctgtggggagcgaggaatgaaatcgtggctatctggagacgcggccttgatgtctgggaatgggggcggggggcccagttcacacaggaggaacggggccccggaagcctggctccccacagggtcgaatggaaaggggcagccgcatgtggcggtgggttctccgcagctcggagactggagacctggatgcctggccaacagggaggaacttgggaggggcagccgcaggcggttggggtccccactagccgggcctaggagagcgggtaacggtttccgaccatttggcttcagacacactcactgtgaaaccaccgaccccaaacctcccttccgaggcgtgcccctcccagccttggggcgggggatccaggaccgcccccgcacctcagtcttggtaatgtaagacttagaaacaggacctttctgttcctcagtttccccataatgagggcctagactaggcggtctgcgagtgttccctgccgtaacactcccccgactttggatccagtgtagccacctgctaagagacccttaaacgccgcagtagggcggggctaagggcggagccaagaaggcgccgagcatcctctgcttcctccccctcctgggtcctgccctcgacagcgcggatcctccgtggtccgggaagcctcagcccaagtcccggctcccagccccggtgggccccacccaggcagacgccccgcccccggccagcgaggctggccgctgacctagtatggacacggcactgggaagagaggcgtggagggtgacgccaggaaaggggctggagaggcctaggccccgcccccacgggtcgccccctccacctcccatcaccgtcccgccgtgggacgcacctgccgagggtggaggataagggggtgactgcgcggctgctgttgagcccgccaagagctaaaaatatttcccaacaaagaggagtaaggaggctcccaaggagaatgaatttattagggagtgggtgcagttggtcagaccccataaataggaggggaccgggagcccgaggacggaagggggcccgtgtccttagtcacgctggacactgggacattgagagtggggaaaatgagggttccaggaggggcttagagatctaactccagtaccccaccctctgcatgaggtgctggggctggcccaagagagtgtgacagactcaagggctggtttggggtctggtctggaggctcagatggcctcatccggggctggcaggcgctggcgggaaggctccacaccccagatctcccgggcatactgggcaatggtgcggtcactggagaacttgccagaggtggctatgttccggatcaccatccgcgtccactctcttgggttctgcaggtcaaagggaagctctggttcactctgctggcaggatctccacc

SEQ ID NO: 915421 - DNA, 4001 bp, Homo sapiens
taccatgcctcatcctcaccccgcaacccgccaggtatcggtccttcgggtgcacgctcgaccccgcccacctcctgcttgcccaggactccgagagcaggaggcaaattagagaggaaaggtgtggtgggcgagagataggcacgccctgaggactggaggaggggagcgcccgagccgcccatcgtccggaggggaaccagctggggcggaaggagcctgggttccccggggtcaagaatccagaggtcatttcctgagcgcttggggggaaggggcaccccttcaccagataagccgccccccattagccggaaacagctcccaggccggagatagcgagttcctccggattccccgggagacagataatgcccctcaagtgtcagagtccgggacccggccctcccttcgccgccgctggggaaggctagagaagggaaacctcatctgtctgaagggcgtgcatctctctgccctgcgttgcggaggaggctttcgttaaagagactgcacgctgcggagcagggtgggtccgggtcagggctgtgccctggactgtgcctgggaggcagggacccgggctcagactcggggctaggctcaggctccgtgtgccctcccgagccactcaccgaaggcttcgatgcacccgcggagcagctcctccaccgtgcagcccttgtccaggtccagggtgcctgccatggccgccggcgcggggtgggctgggcccaggctgcgctccgggagcctcccaccgggctcggaccgaacccctgtcccgggagaggcagagcgggagtctgcggagtcgcgggcgggggagcggccccgcgggcagaaacggggcggggcgggcacgccccctgctggacaggggcggagttgtcccccgcggccactcccggggttaaacggtctggcccgggatggtgcaacccgccagttgggaaacggacccgcagagaggcttccggcccaccctcggagtcgcgggaaggccgaggggcttcacgaggatggggacgaaccaagatcccaggactggctggcgcccagccccccgcagggcgccttctcctcgcgccctctccccagaggcacctgcagcaccccgcagctcggctctgcgcccctcccgcttccctccctccacagcctcccttcccccgcagggttattttgggaacccagagcctgaggggacctcggaggaatttctccctggtatgggaggtggggggagagaacccaggcgtcctgcccgcctcgccccctcccgggagcccaggaaggcgaggcggggctgcggcagcccccagggggcctgccctaggggaggcggactggatgggagaggaacattcctggggcggggggagcccgctgcggccaggaggcgtcagcgggaagcctgagcctgggaactgagcgctcccaggccacctccgcaaaggtcccaggggtcccggctcagcttgtccacaggccctcttcctccctatccccggctcctgaccctggccccggccccgcacaggcgaactgtgagcgcgcacggagcagggtgtccagaggggggcgctcgcgccaagggtggccggtgggtgcatgacaccattagcaactccggtcactggcggggtcatacgcaccctggcaggggcaaacactccacacccaagttattcgtcggaggccggggacctaagtggaggtgcaggcgtccgcacttacacgcaccgggccacaggcaccggcctcccatcctccgtctctcacacacaatggcacccacaccctgtgcacacctgcacgaagaaaccctcaggcacacatacccagctcgtccaccccagaatgcaaacccgcggacgaggtcgcctcctggacgtgctgttcacttgagccaggccagccttgagtcccgcggccacacaggcgctgacatcctcacacgtgtgcacacacgcaaggcagtgcctctccacgcatgtacactcccacacacatgcacacacccccatgggtgcgcacgcccattccgtcgcccccctcccatttgcggtgcagggcccgccctgcggccccagctccctgactcccctcactcccagattttggcagagccttgccccacggaaaggtaccccggccctacacatactcactcccccaggctggaggacaggggagctcctgtacggagttctcaggcggacttttcctaagagccacccagagccgtccccgcctggctctaccgcttcctcgtgtgaccttgagaatcacttggcctctgggagcctcaattttctcatctgccaaatgggggtacgcgggggagggccccgctggaaggtggctgggaaaagctgggtgcaccgtggaggtcctccgccctccggggatccagcgcgccttagctctcgtggccgctgccccctctcccagacccgggccgcagactccccacccgctcgccgcccccagcccgcccgcgccgccctgggcggggggggagtcgctgggggccgcgccctccttcgcctggcgccccgcccgcgctcgcccactcactcttgggacctgccgcaaggagcccgcaccggcctggccgaccccacctccgtgcgctcccgcccgccggcctcgctgcggctgcggctcccgcccgctctccacgccgcggccccgctccccgccgccccgcccccgcccccgcgccaggctgccccctcccccctccgcccctgcgcggagctccgcaccgccggctgcgccacccccaccgggggctccctctcgccccgcacgcggcggtccctgcggcagcttaacccctcccctgccgcgccgcccgggaggccagggccgcgggcggggggctgcgccactagctgccccgagggcgggcgaccggaggccccgccgcccgggacgcggaggggggaccgaaacgaagagcccctcccccaaccgcggacgccccagtgccccccgccctgcctgggtgtcgggcggaggaagccgggaggggcaggaagcggactgcggtggggaaggggcgccccgcccagcccccagctcgggttcctgttttcgagacaaaccgttcccatggggctaacccggcccgggaccgggcgtcttcctgcaggcagcgggtggcacaggcctagtggaggtcgggggcgtggggacagctggtccttgagatagtctgggggatgggctaggacaagatgggaatattttggggagagggacctgtggggagcgaggaatgaaatcgtggctatctggagacgcggccttgatgtctgggaatgggggcggggggcccagttcacacaggaggaacggggccccggaagcctggctccccacagggtcgaatggaaaggggcagccgcatgtggcggtgggttctccgcagctcggagactggagacctggatgcctggccaacagggaggaacttgggaggggcagccgcaggcggttggggtccccactagccgggcctaggagagcgggtaacggtttccgaccatttggcttcagacacactcactgtgaaaccaccgaccccaaacctcccttccgaggcgtgcccctcccagccttggggcgggggatccaggaccgcccccgcacctcagtcttggtaatgtaagacttagaaacaggacctttctgttcctcagtttccccataatgagggcctagactaggcggtctgcgagtgttccctgccgtaacactcccccgactttggatccagtgtagccacctgctaagagacccttaaacgccgcagtagggcggggctaagggcggagccaagaaggcgccgagcatcctctgcttcctccccctcctgggtcctgccctcgacagcgcggatcctccgtggtccgggaagcctcagcccaagtcccggctcccagccccggtgggccccacccaggcagacgccccgcccccggccagcg

SEQ ID NO: 915422 - DNA, 4001 bp, Homo sapiens
gcgaggcggggctgcggcagcccccagggggcctgccctaggggaggcggactggatgggagaggaacattcctggggcggggggagcccgctgcggccaggaggcgtcagcgggaagcctgagcctgggaactgagcgctcccaggccacctccgcaaaggtcccaggggtcccggctcagcttgtccacaggccctcttcctccctatccccggctcctgaccctggccccggccccgcacaggcgaactgtgagcgcgcacggagcagggtgtccagaggggggcgctcgcgccaagggtggccggtgggtgcatgacaccattagcaactccggtcactggcggggtcatacgcaccctggcaggggcaaacactccacacccaagttattcgtcggaggccggggacctaagtggaggtgcaggcgtccgcacttacacgcaccgggccacaggcaccggcctcccatcctccgtctctcacacacaatggcacccacaccctgtgcacacctgcacgaagaaaccctcaggcacacatacccagctcgtccaccccagaatgcaaacccgcggacgaggtcgcctcctggacgtgctgttcacttgagccaggccagccttgagtcccgcggccacacaggcgctgacatcctcacacgtgtgcacacacgcaaggcagtgcctctccacgcatgtacactcccacacacatgcacacacccccatgggtgcgcacgcccattccgtcgcccccctcccatttgcggtgcagggcccgccctgcggccccagctccctgactcccctcactcccagattttggcagagccttgccccacggaaaggtaccccggccctacacatactcactcccccaggctggaggacaggggagctcctgtacggagttctcaggcggacttttcctaagagccacccagagccgtccccgcctggctctaccgcttcctcgtgtgaccttgagaatcacttggcctctgggagcctcaattttctcatctgccaaatgggggtacgcgggggagggccccgctggaaggtggctgggaaaagctgggtgcaccgtggaggtcctccgccctccggggatccagcgcgccttagctctcgtggccgctgccccctctcccagacccgggccgcagactccccacccgctcgccgcccccagcccgcccgcgccgccctgggcggggggggagtcgctgggggccgcgccctccttcgcctggcgccccgcccgcgctcgcccactcactcttgggacctgccgcaaggagcccgcaccggcctggccgaccccacctccgtgcgctcccgcccgccggcctcgctgcggctgcggctcccgcccgctctccacgccgcggccccgctccccgccgccccgcccccgcccccgcgccaggctgccccctcccccctccgcccctgcgcggagctccgcaccgccggctgcgccacccccaccgggggctccctctcgccccgcacgcggcggtccctgcggcagcttaacccctcccctgccgcgccgcccgggaggccagggccgcgggcggggggctgcgccactagctgccccgagggcgggcgaccggaggccccgccgcccgggacgcggaggggggaccgaaacgaagagcccctcccccaaccgcggacgccccagtgccccccgccctgcctgggtgtcgggcggaggaagccgggaggggcaggaagcggactgcggtggggaaggggcgccccgcccagcccccagctcgggttcctgttttcgagacaaaccgttcccatggggctaacccggcccgggaccgggcgtcttcctgcaggcagcgggtggcacaggcctagtggaggtcgggggcgtggggacagctggtccttgagatagtctgggggatgggctaggacaagatgggaatattttggggagagggacctgtggggagcgaggaatgaaatcgtggctatctggagacgcggccttgatgtctgggaatgggggcggggggcccagttcacacaggaggaacggggccccggaagcctggctccccacagggtcgaatggaaaggggcagccgcatgtggcggtgggttctccgcagctcggagactggagacctggatgcctggccaacagggaggaacttgggaggggcagccgcaggcggttggggtccccactagccgggcctaggagagcgggtaacggtttccgaccatttggcttcagacacactcactgtgaaaccaccgaccccaaacctcccttccgaggcgtgcccctcccagccttggggcgggggatccaggaccgcccccgcacctcagtcttggtaatgtaagacttagaaacaggacctttctgttcctcagtttccccataatgagggcctagactaggcggtctgcgagtgttccctgccgtaacactcccccgactttggatccagtgtagccacctgctaagagacccttaaacgccgcagtagggcggggctaagggcggagccaagaaggcgccgagcatcctctgcttcctccccctcctgggtcctgccctcgacagcgcggatcctccgtggtccgggaagcctcagcccaagtcccggctcccagccccggtgggccccacccaggcagacgccccgcccccggccagcgaggctggccgctgacctagtatggacacggcactgggaagagaggcgtggagggtgacgccaggaaaggggctggagaggcctaggccccgcccccacgggtcgccccctccacctcccatcaccgtcccgccgtgggacgcacctgccgagggtggaggataagggggtgactgcgcggctgctgttgagcccgccaagagctaaaaatatttcccaacaaagaggagtaaggaggctcccaaggagaatgaatttattagggagtgggtgcagttggtcagaccccataaataggaggggaccgggagcccgaggacggaagggggcccgtgtccttagtcacgctggacactgggacattgagagtggggaaaatgagggttccaggaggggcttagagatctaactccagtaccccaccctctgcatgaggtgctggggctggcccaagagagtgtgacagactcaagggctggtttggggtctggtctggaggctcagatggcctcatccggggctggcaggcgctggcgggaaggctccacaccccagatctcccgggcatactgggcaatggtgcggtcactggagaacttgccagaggtggctatgttccggatcaccatccgcgtccactctcttgggttctgcaggtcaaagggaagctctggttcactctgctggcaggatctccaccttctgcctcatcccaaccagggccaccaaagccctgccaacccctggcccaggacccctcaccttgtacaaggcgctgactttctcctggcatttaatgtagtcttcataatctgcgaagactttaaacctggaggggaaaggataggcatgtgctattcctttagggggctaggataagttctatgaggtcaagggccaagcctgccctgtcccagtggacagccggggacctagagggtcatgctgcttccaaaggcgcctggctccaactaccaggacccgcgtccggcttccccaccacacacctgagcctcgatctgccctgcggccccacctgagtgattcccgggccaaccagctcaccggtcatggtgcatgagcatattgacaatgtccttgaacaggtcgggctgtttgggggagaagaagccactgctcagctgctcaatgacctgccgaagctcaggaatgcgatcgtagtactcctgggcattgtacctgccaggacagagctgtggtcagctccccggaaaggggttcctggctcctcttccagagaaaagctgagaagtcccatgccccagggtcaaaacccag

SEQ ID NO: 915423 - DNA, 4001 bp, Homo sapiens
ttatacttccttactttgaaaatgggctcggaccacgtcaatttccttgggttgtttgttttccagtatagggggttcttgcctcctccctccttccctctctttaatgagcttgtattgaggatcctacttcttctaccctcaccctgctctgcactcaccccggagccagatgagcgcgaggctgcgcagagcgctgctgcccagccggagctctgggctcgcaacagcctggtttcaagtccgcgagccggctggcccactgcattctgcaagaaaaaagaatccccctgttcccgccccccgccccccgccccccacccctacacaagggattcgcacatgggcaaggagtccgagtcttggctatgcatagagctcagtcccgtatccgagtcttcgtcgttgccaggaccgctcttggccagtccacgggcctggtccacccacatgtcggcgcaggcttgaggcccaggttcccgcgagggactgccagagccaggagccccatccggtgccaccgtcagctccaaagtgtgcaaagtttgcagaaggccctgtagctcgcgcttcttgctgtcccattgctgctggctgtaatccaagtccgacttgacggcctctaggtccgtgttgagccgcagcccaatgtaaaggctggtactgagctgcgtcctgacccgttcctgctccagcagcagctcgccgtcggggccaccgtcgggctccaggggctcctcccgcgccgccagctcctcctggcgccgtcgcatccacctctggttgagttcctcctgaatctcggctgaaaggcgctccagcaactcctcctgctgaacccgttgctcctgaagccgcagcaagtcgtcgcagcgccgggccagctcctccagcgccgccgcctgcgcctcgccggctagagggggcgccgccgccgcctcctccgcctccgccgccacctcttctggctcctctcccggtctggacccgtcgagctcgatgcctgccccaaccaagtaagtgtcctgcacgtagttgaccccgtgacgccgcatgcggtccaggtgcaccttggcctcgtagtgatcgatctcgcggtccagctcgtggagccgctgcacctgctggcgaattgtgtggtcctgggaaagcaccagatgcaccagcgtctccatgcgctccaccgacgcgctctcgtgggtccgcggcgacgaagagcaggacgaggcagtggacgacgaagtggacgaacaggacgacggtgtctgctgctggcgccgccggttgagcttggccagtttgcgaaaggccttgcgcaccactcgccgctgtttctcctgggtcatggccaggctgggccgcgccggggccccgcgggccggacaggggcgctctcggctcagcactacgcgcgcctcggcgctgcgggggccggcgttaggcagcgatgcctcgctgcgcactagcacgaagcgcacattctcttgctcttcgccccaggcagcccagaggcgcaagatgcgcgtcttgttggggaggatgcgctcaaagccgcgccacttctccacgatgcaatagcactgcgggggcccgcacagcatgccctgcggcagcgcctcgtcgtcgtcctcgtcgtcctcgttcgggggttcgggcagctctcccgggccatgcgggtcgccggccgaccccagccgccggctccgccgctgtctccgtcgccgccggcagccgtcctccaaaagcactcgcacaacgtcggagcaagtggtgcggcgggagaggccggacaccagcttctcttcctggcagatccacaccgatatcttcttttccgaaggatccatggcgcaaccagggcgcaggtggcaggtccggccggggtctgctggggcggcgaggacagcaagggcagcccagtagctctgggatgggagaggagcccgtgcccccctccggcggctgcactagccctgttcccccgctgcgcaccgaaggcaggctggaaagcgactgcggctgtggtcgcggttgcggctgcgctctgcccggacgacgggcgctcccggggcaacgcgcccaggaccggctcccgccgctctggctctgcccaaggtgcccgggacctccgggttttgctcctccccacgtggctccaccccttcccgcccccaaggcccagagctgtggctggaagtgcaggaggctcagggcccaggcccgcccctcgcagccttgccgcgccccgtgcgccctgtccgcccctcgctcgcattgcaggcatcctgagtctcggcccttttcgccaaatcgctgctctgccgcgcgcctacgcaaggaaagattcaagggtccctccacttcagggagtggagcccgcgcctcggcacggatcagctgtgcgtctcctttggcctactggctcctctgcttgtgtctatagctagctggacgcatcgtgactttatcttctcatctttcctggcgcccccagacgcatttcctggtccctcgaggcagcggcgtctggggagtgcactttgcacagacagggaaaccgaggcactcagcggtctccaatggagacgctgtaatcgcattccacgaccagctagcgctataagcgctgcctctaaagcggaaggcctcccagtccttctcgacaggaagcaatatttgcatatctaaggagaacaagattcggcaatgtgctccgggagcaagtgcaggcatggaacggtatgggctggagggggacagaccttcagaggcggctgcccgttccctgtagtgtcacgtaagtgggtctccacgtcaccttcacctcagcttcccacagcctttttgggagaggggctcctcattctagtgggagttcagggcccagacccaagtcacaagctatttttatgctttccacctccataaggggaaactgtgaaggcttctggcattttctaatattcagatgtggtccagaagagataacagccaagctttacagtgcaagaaacccaaggccacaatgcaaatgaacttgtttcatccttaactgctgatgaggatggtccactgagtgcaaggtttgccctgaacttgtccttgtgagcacaggtgtaataataagctcactccctttcttcaagaccttagatggctccccattgcctcttggctaaagcacttttgttcattcaatgattcactcagcaaatatttattgagtacctctctgctccaggtcctacgctagggatttgacaatgaactaatcgccagttctggcttgcaaagagttcacagtctagtgggagggcacagccaagtaaacattcccaacacaatgtcctgtgtcctctgataagggagagcatgaggttctgggggaccctggagtggcatccaacccatcttggaggggcaaggaaggctttccctagaagaggtgtgttagacaagacccaaaggaccattagagtctgccaaaaggaaagcagatggaggggagggacaagcagcattctagaagggattgtagtgcagtcaggaatcaagagcatgttagttatgggggctgtcaggaatttgagaggagtgcctaaaactgaagttggataattgaacaggaatgggatcaggaagggcctttaattccatgcttatgtatttggatttatcttaaagacaatgagaacccatagagtgcaaatctggagtcagaacagccaagtaaaaatttcagcaccacgtactagctctataaccttaggaaaagtattaatctctctgagcttcagtttcctggtctgtgaaatggtgataataaaaatacctccctaatggaactggtgtagcgattaactgcctgggcctggtaaatccccagtagttttattggggggttggaaaggtcggaggtatattagttttctattgttatgtaacaaattatcacaaacttagtgacttaaaacaacacccatctattacttcactgttct

SEQ ID NO: 915424 - DNA, 4001 bp, Homo sapiens
ggggatcaggtccgcgggctcacctgcctcccgagtcagaccctgtgacccccatatctgcccacgtcaggggtgggggagtgacaggggatcaggtccccgggctcacctgcctcccgagtgggaccctgtgatccccgtatctgcccatatcaggggtgggggagtgacaggggatcaggtccccgggctcacctgcaaggctcgctctgctgcctccagggcccggctcaccagagccaggctgccctgcacctccgcactctgccgctcctgaacagccaggtcctggtgcaggcgctcagtggcagatgccataggtgaggggggcccaggggcctccgctgccagctgcagctcagcctccagggcacgggcctgagcgtccagggcctgcagccgggcggcatgctcagcagtggccgcacttagtgcctgcaggcgtgcctgtccctctcgctcccgggcctgctcccggcgcagctcttgctcccagaaggcctcatggcccagctcctcagcattcctctgcaccctgagctccaggccccgcaggtctgtgcagcagcctggtgtgggtgtcacaggggccgcaggcccagggcgtgagaggctgggggctggctcgggggtcagtgttttgcggggctcacagcccagcgcagcccgtggctttacagggaggctggcacgaattaggcagcgttccgggggtggacagctgtctgaggagggcctcccagctaggctgggccctgtgcgcctcaggacaaactggacatcgctggcaaactgtccgcaggtggcctgggcgcccactggacactcttgtggcagcaactgccgctccttctcccgaagccgctgcacaagcacaaagcggccagtctggcctgggaagaagaggagaaggtcagcctatgtccccccgactctctgtccacctggcttgaagagttgggaagaacaaaaaggatcagcaaccagccccactctccttgggggagaccatggagctggaccaccaggtcccacttcagctctacctgcccggcctgcctgaccccgagaggactcacctattgcttgggctagtgcgatgaccacttcctggcaggtggtctgctctgagaccccacagaccacacgctggatgccatccacccacaccttcagctccatggccgccagtcccaacaacatgcctgtcctgtggggagggcgcaggcaccgggtcaggacctgcctactcctatcgcaggctggtcctcctctcctcatcctcttggcctgccctagaaacggctgggctgccgcccctccgcacgggccccaccctcctgtgccagccccacccgccagccacacattcctggggtggcggccctccggagcacgcatcctcccccacttcaccagcttcctcttgccacgctcgcactcccggaacaaggcgaatcattaaccagatccagcatttcctactcgcctcacctggctcggaggacactgccccctccccgggcggcgcggaggcgcccgcacgccaggccccgcggccgccggcatgggaacgccccaccccgacctgctcaggccgcagaggcgctcggggtcgcaacccagacctcgaccctgcagatggagcagactccgggtctgagcagcccccgccagcccggggagccccgccgctgccgcctaatcgctgcgctcgccccgaaagtcccggtccccgccgcgggcaccgaagcccgcgccgcgaccccagcctggcgggagccagggcgtccccgttccgcagggcgggcgcaggtgcggcgccgcccccgctctccgtccgggcatcgcggaaaactctccccagttggagtcggcgtccggccggctcgaggcgcgccccgcgctcccaagtaccggggacccggcgcggctcacctgggcgctcgccagcctggagacccgctccggcgccgccgcaacctgccgcccccagcgccgcggcgcacccgggccccgcgcccccattggcccgcggtccgcacgccccgcccctagcacccctattggctgctcagcgcgggcgttccgccccctccccgcgcccattggctgcctctgtcacgcccctccccgacccattggctcgtcgccgcgccccgccccccccgagactacaggtgtgggcgggtcggaggggggcgccgagccgcagtccccgcccccacctcccgcctaccgcgaaaaacgcggaaatgcggtggctgcggcccgcgggcaggcgtcggggtaggtgtctggccccgctcctgggccgacttcctcagcagccttctagtgtggcgggttcccgcccaggaagggtctctggcttgagatcccgcaacccccgcctgcgtccaggggcagcggggccagcccctcccctcgcttcccgggccagcctttggggcctaccgcagctgcagtagtctggacgcgcaggggtcgcggggtcgcagggtcaccagtcccggcgagggaggtggagccctgcggagctggcgggcgcagagtcctggtgcgggaggtgcccgctcagaaggcccggactctagctgaggctcttctccgacaccttcctgccccttttggacccagtgccaggccatgcacacagtgaagctggctggaagccgctccttcaccccctaccctactgtcccgcccagggccccgcagcctcgcggtcagctgtgtgggccattgattgttctgcccagctcagaaagagttgtgggcgtgggcctcctgcccgcctgtctcctgtgctcccccagggagcccttacatagccgaaagttgcagagatgaagggtgaaagctggaatgattgggttttaatgggtcaggtctgggacctggcttttctcctggagcagagggaatacttgtcatggtaatggggtagcccagagggtgtggacacggctgggaaaagtgaggcttcagtttgggggtcaggtaggtgagtgcctgtcactgaggtcaaaggagctgtgggctgggcctggcggtggaggcgggtgcctgtagtttcagcaagtcaggaggcggaagtgggaggatcacctgagcccaggaattcgaggttaacgtgcgctgtcatcacaccgaagcattccagcctggacagcggagcaagaccctgtctctaaagaattaattattaatttaaaaacaggctgtgggcaggagtgtactattgccagttagcgttcagcacagtccccagcttgtcactgttacctgtctgcttcccccacacacccatggctatgctgggctggctcacaggcagcagtgcccccctatttatcccgctgctgctgccaggctaggtaggggatgctggggcctccctcagggtgttggtcactaagtggtccccccgctaagctgagcagtggctcagcctctcacacctcctccaggctgggctggcccagaactcacctaggggcctggtctggggtctccctggaggctcctggtaacaaacagccccaccccttctgggtgctggtatccatggcaacggtatacagcccttccctcccaggcctgcttggaggtcgggcctcaggtgagtgctgggggtagggccctgagctggggggacaagagagagaaagagggacaccacatcacaggcaaagggccagcacctgggtggcaggggtacacgccagggacatgtcgggtggtgacctgctgcgccagcctggtcagaaacacacgggtgtggacacccacatgtgggtcccttcagagagcaacgctctgtgagtaagtggtgacgcctgggctgctccaacctgtgtggccacacgaggcgcacacggcagacgggccccccacccctcccagctcccgaagaacattgagaatggcccccaagtctggccaggaggttgaagaaaccgaggaagaggctctcctgtcccccacagagcaagagt

SEQ ID NO: 915425 - DNA, 4001 bp, Homo sapiens
gggactcagagggagcgcccaggagggactcctctctggctggaggcagagggccctgtgggttgggaagtcagcttggagtggggctgggccaggtcctcacctcccagcctccccccagaaccactccgacctgagtgccaggagggcccctgtcaggccgtgggggcggtggcagcgcagccccggtctgctggatgaactgctgcaggttgcactgacggagctctcggttcagctcctccagctcctgagcctgagcctggggacacatgagatccttaggaggcacagccactgggctccacagcccttgtgctccggagggagcactttccctggtcgggccctgtgacccccatatctgcccacgtcaggggttggggagtgacaggggatcaggtccccgggctcacctgcctcccgagtgggaccctgtgacccccgtatctgcccacgtcaggggtgggggagtgacaggggatcaggtccgcgggctcacctgcctcccgagtcagaccctgtgacccccatatctgcccacgtcaggggtgggggagtgacaggggatcaggtccccgggctcacctgcctcccgagtgggaccctgtgatccccgtatctgcccatatcaggggtgggggagtgacaggggatcaggtccccgggctcacctgcaaggctcgctctgctgcctccagggcccggctcaccagagccaggctgccctgcacctccgcactctgccgctcctgaacagccaggtcctggtgcaggcgctcagtggcagatgccataggtgaggggggcccaggggcctccgctgccagctgcagctcagcctccagggcacgggcctgagcgtccagggcctgcagccgggcggcatgctcagcagtggccgcacttagtgcctgcaggcgtgcctgtccctctcgctcccgggcctgctcccggcgcagctcttgctcccagaaggcctcatggcccagctcctcagcattcctctgcaccctgagctccaggccccgcaggtctgtgcagcagcctggtgtgggtgtcacaggggccgcaggcccagggcgtgagaggctgggggctggctcgggggtcagtgttttgcggggctcacagcccagcgcagcccgtggctttacagggaggctggcacgaattaggcagcgttccgggggtggacagctgtctgaggagggcctcccagctaggctgggccctgtgcgcctcaggacaaactggacatcgctggcaaactgtccgcaggtggcctgggcgcccactggacactcttgtggcagcaactgccgctccttctcccgaagccgctgcacaagcacaaagcggccagtctggcctgggaagaagaggagaaggtcagcctatgtccccccgactctctgtccacctggcttgaagagttgggaagaacaaaaaggatcagcaaccagccccactctccttgggggagaccatggagctggaccaccaggtcccacttcagctctacctgcccggcctgcctgaccccgagaggactcacctattgcttgggctagtgcgatgaccacttcctggcaggtggtctgctctgagaccccacagaccacacgctggatgccatccacccacaccttcagctccatggccgccagtcccaacaacatgcctgtcctgtggggagggcgcaggcaccgggtcaggacctgcctactcctatcgcaggctggtcctcctctcctcatcctcttggcctgccctagaaacggctgggctgccgcccctccgcacgggccccaccctcctgtgccagccccacccgccagccacacattcctggggtggcggccctccggagcacgcatcctcccccacttcaccagcttcctcttgccacgctcgcactcccggaacaaggcgaatcattaaccagatccagcatttcctactcgcctcacctggctcggaggacactgccccctccccgggcggcgcggaggcgcccgcacgccaggccccgcggccgccggcatgggaacgccccaccccgacctgctcaggccgcagaggcgctcggggtcgcaacccagacctcgaccctgcagatggagcagactccgggtctgagcagcccccgccagcccggggagccccgccgctgccgcctaatcgctgcgctcgccccgaaagtcccggtccccgccgcgggcaccgaagcccgcgccgcgaccccagcctggcgggagccagggcgtccccgttccgcagggcgggcgcaggtgcggcgccgcccccgctctccgtccgggcatcgcggaaaactctccccagttggagtcggcgtccggccggctcgaggcgcgccccgcgctcccaagtaccggggacccggcgcggctcacctgggcgctcgccagcctggagacccgctccggcgccgccgcaacctgccgcccccagcgccgcggcgcacccgggccccgcgcccccattggcccgcggtccgcacgccccgcccctagcacccctattggctgctcagcgcgggcgttccgccccctccccgcgcccattggctgcctctgtcacgcccctccccgacccattggctcgtcgccgcgccccgccccccccgagactacaggtgtgggcgggtcggaggggggcgccgagccgcagtccccgcccccacctcccgcctaccgcgaaaaacgcggaaatgcggtggctgcggcccgcgggcaggcgtcggggtaggtgtctggccccgctcctgggccgacttcctcagcagccttctagtgtggcgggttcccgcccaggaagggtctctggcttgagatcccgcaacccccgcctgcgtccaggggcagcggggccagcccctcccctcgcttcccgggccagcctttggggcctaccgcagctgcagtagtctggacgcgcaggggtcgcggggtcgcagggtcaccagtcccggcgagggaggtggagccctgcggagctggcgggcgcagagtcctggtgcgggaggtgcccgctcagaaggcccggactctagctgaggctcttctccgacaccttcctgccccttttggacccagtgccaggccatgcacacagtgaagctggctggaagccgctccttcaccccctaccctactgtcccgcccagggccccgcagcctcgcggtcagctgtgtgggccattgattgttctgcccagctcagaaagagttgtgggcgtgggcctcctgcccgcctgtctcctgtgctcccccagggagcccttacatagccgaaagttgcagagatgaagggtgaaagctggaatgattgggttttaatgggtcaggtctgggacctggcttttctcctggagcagagggaatacttgtcatggtaatggggtagcccagagggtgtggacacggctgggaaaagtgaggcttcagtttgggggtcaggtaggtgagtgcctgtcactgaggtcaaaggagctgtgggctgggcctggcggtggaggcgggtgcctgtagtttcagcaagtcaggaggcggaagtgggaggatcacctgagcccaggaattcgaggttaacgtgcgctgtcatcacaccgaagcattccagcctggacagcggagcaagaccctgtctctaaagaattaattattaatttaaaaacaggctgtgggcaggagtgtactattgccagttagcgttcagcacagtccccagcttgtcactgttacctgtctgcttcccccacacacccatggctatgctgggctggctcacaggcagcagtgcccccctatttatcccgctgctgctgccaggctaggtaggggatgctggggcctccctcagggtgttggtcactaagtggtccccccgctaagctgagcagtggctcagcctctcacacctcctccaggctgggctggcccagaactcacctaggggcctggtctggggtctccctg

SEQ ID NO: 915426 - DNA, 4001 bp, Homo sapiens
caaaagcaaaaatccatgcaccatacagcctgcctcagagcacccagcaggaaagcccgattccggatagtcgtggacttgtataacctgagttgaggaaaatagaatgcagtattaatgcagaacaaggacttgttcctagtagtggacactatgaccctttatatttcccccacttaaaggactaggaatggccccaaacatgtgcctttccaggacagcaaatgaaatatcttggtgggataaataagcacttgcacccacatttatttcctatccctgaaacttctcacacagggtatgagcaggtatgaacccaccaggagtagggcatcagatactcccaggctgcatcttccaaaatgacagggcaaagttaactctgatctgttcccaagtggagcagagactggccacatacacaacggctgtcccaccaaatcttgccaatgtaaaagataaagagcttaagggataaaaactcaagctatgaaaaagtcaactgggtccctagtcaggcttaaattatggtgacacatttttctcgaagaaaaggcaccgggatctgccctgagaatcagactactcaagcaatgactactactgattcagtaaaccgtgtttagccactgtttaatgaagagctctcacagacccctccccaggaccccctcagccagagtatgcccccctgcaaagtcaccaagcttataaaagaatgacactgccctagggcactggcttggcatgtaaagactacgcagaaggggacttcataaaacaagctttcttgcacatgcaaaaggctggggtttccagttgacagatgtaaaatcgagcccaaagaaaaaccccaagtttgagggaggagaaaagcacagagctgccacgcctaacctacctaatattgaaaggccaaagtgattcggaaggggcccctctcgtacccacgtgtaactgtgcccatgagtagacccatgccagacaagactaaaagaccccagcccgagaaacgtccaagggccccgttaccttccgcttgagcacattcatcgggagggaacaggagggcggccttggggcgtcagcccccaccttttccctcttcccttgctctgaccgacgtctggagaggaagtggggaagtggagaaatcttccccgcttcatgatccggcttgtgcccgtcacttcccaatttccgctgggtgccaggcccaggagaccaggagaaggcgcgcccccggaacactcgcaaggctctcaggcgcgtccccggccccgtagcttggctcgcagtggccgccgcacccacccagagccgcttcctcctacttggtggacggttcctggaccgcaggggaggagggtggctctacccaacgcgcccccaacacctccgacctgctcccgcgcacttccccacccctcccaaccgcgcagtgaccgacccccgggtaaggggcgtggctaacaggcagagtgccccgagcgcgcccccgcccccgagcgcgcctccgcgttacctttcaccacgtcacactcgatgacgcgtccgcggcgctcgaagaggctgcgcagttcctggctcgtgcatgcagccgacacattgcccacgaaaatcttccaagtattaagaggccttgggcgcgacatctccaccacgagcgcgcgccccggccgcagctcgtggccgtgcagggcttcgatggcgcgcagcgcgcccgcgttctcgcgcatgtgcacgaaggcgaactgtttcatgacggcgcagctcatgaccgtgccgtagggcgcaaagagggctgccagctcctccggagtcgtatccgccccgtcgacgttgcccacgaatatcttcattttgtcgccgcagccaccttcctggagagcccggacctctcctccagcgacaggcaagacgtccgaacgaccggcagtcctcctcaggaatggctggcgaccgagaaccccgccgcgcaggcgccctggcctagccaatggggactcgcatcccgcgcgtccagcgaccaatcagaaacgctgagggaagatgtgctcaggcacagccaatcccagagggcctagagcccgctcgttagctgagggggtgggaaagggacgaccaaccgccacagcccgtggcgggagagggggttgggaagaagagggagggctgaagagaggagaacgcgcgcgagcggcgccggcggcagagaggcctagtctgtaaggcggtctctggcccgggtggggctgggaccggcgggctcccaggaaaactttgtacaattggaagtcagggctcctcccattctggaagccctgtccaaacccgcgcctgggggttgccgcgtgagtgtacgggggaaggccgggcctggcgggagaaaccaggacaggcgccttgagtcggcaaacggctcccaggactgtgctgagcaccgcgaggggacctgaggcaggccccggagaagccctcgtgccattaattgattctttggaaacattccctggggttgctgaggtcctggcagccggtgaaaaatcaaaggcctctgccctgatggaattcccagtcaagaaataatggaatgacgttattgtatgttgaaggttttcataataaacagtttaataaacgagaaaattaattctgcaggaagcaaaagttgagccttaaaaaaaattttagtccgggagcggtggctcacgcctgtaattccagcactttgggagaccaaggcaagcagatcaccggaggtcaggagttcaggaccagcctggccaaaatggtgaaaccccgtctctactaaaaatacaaaattagccgggtgtggtggtgcgcgcctgtaatcccagctacttgggaggctgaggcaggagaatcacttgaacccggaaggcggaggttgcagtgagccaagatcacgccactgcactccagcatgggcgacagtgagattccgtctcaaaaatttttttaaacagatttgagtatgtaaataagattgttgcatggcagacaacatcaaaaacatagacatgtgacaaactcagggaaatatttgcctacgtgttcagtcaacaaatagcacctaccatgtggacaccaccaagaatatagcagtgaacaaaaaaaaatgacagaaatcccaaccttcttggatcttatggtggggagaaacaggcaagaaataagtaaaacataagcgtgttagatggtgatgaggacttggagtaatcaagggaactaagccatcctctgagggaagatcatgccggccagaaagtacaagtcaaagagtgctggggcagaagcaaatctggttcaaggaagagtcaagagccagtatgggccaggcccggtggctcacgcctgtaatcccagcactttgggaggctgaggcgggcggatcacctgaggtcaagagttcgagaccagtctgaccaacatggtaaaaccctgtctctactaaaactacaaaacattagctttgcgcagtggcagtatcatagccaatgaggtttatccgaggcgcaattattgctaattgaaaacaaaacattagccatgcatgatgactggcacctgtaatcccagctactcaggaggctgaggcattaaaatcacttgaacccaggaggtggaggttgcagtgggctgagatcacgccaccacactccatcctggccaacagagcaggactctgtctccaaaaaaaaaaaaaaaaaagagcccaatatggccagaacctggaacagagagcagaataggagggtgggagttgtgtagcacaaggccattgaaatggcatgtgcttgggccaggcgaggtggctcacgcctgtaatcccagcactttgggaggctgaggcgggcggatcatgaggtcaggagatggagaccatcctggctaacacggtgaaaccccgtctctactaaaatacaaaaaattagccgggcatggtggcgggggcctgtagtcccagctactaggga

SEQ ID NO: 915427 - DNA, 4001 bp, Homo sapiens; identical to SEQ ID NO: 915426

SEQ ID NO: 915428 - DNA, 4001 bp, Homo sapiens
gcaacaagagctgtaaccctttaaagagtttgtgtaaggtaggacagcttaacaaggattctggtcctataagtgtcgcttgacatgtttttgagaggttcttcacgtaaaatgcagaattctgatcctgtgctgagggcaataaattcagagtgaggaactctgaactgtgctctactacaaaaaaataaaaaataaaaaaggcccagtaactcagaaagccttcaaagaaaagggtttctgcactgataagcacaaaagccgtaggggctccaaataaaaggtgagtggcttttctccaggagacatttgcctaaggtaaagcccctaagtcccatgcattctacatcataagaagtccatcacccacacttatttcttcatcaccagccagccaacagctgttatctttaccaaacctctccttttacttatccaaccattttctgcacacagccttgtgttcagccctctacccaaagagggtggttcaccttgaaactctgtgttatcaaggcccctgatggcctccactgcatcctctgcccgctccatgtgtacgaaggcataatctttcacgatgtcacattcgatgaccggaccatactcctcaaacttggctcgaagctccttattggtgcaggtgggactgatgttgcccacatgcaactttgttgaggttttgctcttattcttgctggcttccacgttgatgttcaccccatgaagcttgtaatggtgcaggttgcgtatggcatcctcagctgccgtcttgtcttctatgtgcacaaagccgtaattcttaatgatgtcacattccagcaccttcccatactgctcgaagagtgagcgaatctcctgctctgtagcctcccggggcaggtttccgatgaacagcttcaccatcctgacaagagcctgggagagaaaaacaagacatctgacaaaagacctcaggcccacatccgttcacaaaagacaacgactttcactctaatgtatatttccagttttctctctcacacgcctgcacacacacctccacacaataatcaaatggaagtgggagtgaactaaggcctgctatagtagccgccatgaacctgtaagaataagaagacgtctgcaatagggaggtccttagtagacaaagggtttggtaagaaccgataccttccaacagaaatgggcatgaaagacagcatatgaagaaatgggggtactaggcttttctatccactaggaggacaacagaaaacaaaagtctactaggcttgctgactgcctgcctgaaattatcaacaggcttttcctcacgtaggaaccaaagcagccatcatttccgggaaaatgggccttgtaatagctacatttgagtttcctttggaagtaatgaacgcgcgactcggatcagacagcgaggagtgggagataaaggaaatactggagtggtgaacgcctctctcggggcaccgtcctagctcctgccgaacactgaaatgcgcggccgcggaaaagagcttcagattcattaaccagacgatgtctcacggcccgagaaattcccgaaacgagaatgtaactgtcagatataagggaaagggggttatcccagtggaaatctcgaggctccaagagcagccatgtcgggcgcgggacagggtgggcgaaaaaaagcaaggtattctcagggggcggtgggggaagggctgctcccggcttaccgcgcaatgccgaggaccgaggtcggctctcagtgacgggtgtggagactgcggacctaccaggacacccccgaagcccaagggagtgagagaagatttaacacagtacaagaaaggcagtggaaaggctcggagtctcacccgcacagaaaccagcagggcctcctcctcgcggcgcggacgcttctgacaaaacgctaaaatggcggcggccgcagcagtgctctgagtagaagggggaggtgagcctacaaccggattggccactcaagaaagtaaaaggccggcgttccctcagatcctcttcctgattggttaccacggacgccaattacctaagaggccggcaagaggtggaaacgtctgtaacctcggagcttttatgcgaaagccaatgggcaccaacctcgcgaagccgaactcgctgattgggcaagagatcagcgtgagggcggacctacaaacgtgggcttcgccggcggggtgcggcccgccattaggcggagcgagctagagccccggggtagcagtctttagcttcatggcgccaacttcgttaagcttccacatttcgccacctccacgtgcacagccagacagtattccgcgctccattttgccgttcactctaggtgtctccctctaacctcccaagcaccaccccccctcgcggccaggacgctgtggaaatagcttatgcaggcacatgccagggaagaaaaacaacgaagaccccccccaacccaccacccaccacttcaggaaaccaaccttctccttgggccagcagtccacactgtagccttgagagtcccggagctcccccaaaatcaaacctctcacaggtggtgaaaggacctctgtaatggccttccagaagtaggcccggcaggaggctgcactgtccaggagacgctgaggacaagttccctctgggaaccagcctcccagggtccgcgatgaagaaacctttctgagaccatggagatttaaagtataccccgaccccaccctgagaaaaaactggagcagcaaaggtttttttgttttattttattgggcgccatcagccagagctgttttaatcccctagaaccgactttagaggacagagcttagtcacaaccagctgtaaacaaaatacaaagtaacattctccagagggtccagctgctgcctcgttttctctcatccttaggctgcttcatattcattaagcaagcaactttagtcaagaccctttgcgaagcagcttttgaaaagggttaaaaggtggagtgcagggactggatggaagaacttataacacgaacaaaacaggctaaaagcagtgcagagtttatgaggaaagggatcatcaggagtgaagatgacacaagtaccacacaccaccatccaaagcagcttcttcaccaccacccccgccccaaaaagagaacggtttcataaagagaaaggtgaagtcagagtttgggggggaaaaaaaagagtgggttttaaaacccaacacgagggccaggtgcggtggcccacgcctgtaatcccagcactttgggaggccgaggcgggcggatcacctgaggtcaggagttcaagaccagcctagccaacatggtgaacgccatctccactaaaaatacaaaaattagcccaatgtggtggcaggcccctgtaatcccagctactcaggaggctgaggcaggagaatcgcttgaacccgggaggcagaggttgcagtgaggcaagacaagagtggcctggacgacaagagtgaaactaaaaaaaaaaaaaacccaacatgattcaggaatctgactgcagaaaactggtcaataatttatcctagggtagaaaaagctaaggaactaaaaaaagaaaatataacatttacagatgtgttggtcactaatcttgtccacttcattgtggattctgatgcacctctgagcctgtgtaaaggccacgggatcagtgatgaagaaaatcaatttcgtctcagctgccacgtgcccttcagaggtggccagcattagaaggtaacgcatatggtatagaaatcctctcatctccttcagttagatctcttgtctcaacatgtctggggataaaactttcttccaaaataccaaagtataacaaggatcaactcattgtaagtaataatctctccagattgaaggagactgggaacataaatctcaggatcacagttcaagcccagtgtgcggacatcaaaactactaaccacctctgcatgcagcccaaaacctaattact

SEQ ID NO: 915429 - DNA, 4001 bp, Homo sapiens
acctcttgtggtattaatgacaacatatgtacctttattatcggtataaatagtatgatatgctctacgatgcttgtactgaaatttcttcagaagcgggaccatcattcccattgagtctgatatatttagaaatttccttttctgagggtgaaatgaacaggtggagcagaacactccatggcatgtttttttgactctgcttgaagagactgcacaactttgatcaacaaaaagatactcccgcagatccagacttgccacccagatttataatatagggcttcctctagatgtcttttttcttctttcccaccagtatccacccaaagcagtaaagaatataaatcttaagcacttaaaccctcaaatataaggcttcctgatcatcaccaaagaagcaggtaagccacggacctttatcctcccttctctcatgaggtactcgtttccccaagcagattacacttccaacagcactcgaatcaatgcaagaatcccgcagggtaaagtaacccacagtttgtgattctatgcagtcggtgagcaacatcttagcaaacctgaaaaggggaagtgtttgcttccccaggggtaaattatgcttaagagcggtaaacataatctattatttccagctaaaacagaatggaagagaccacccagcaagttctatagtcttgtgttcttgcctgttttgagctagaccccactcggcgctactacccaggcccagagcagttcaccttgaaactctgtgttgtcaaggcccctgatggcctccactgcatcctctgcccgctccatgtgtacgaaggcataatctttcacgatgtcacattcgatgaccggaccatactcctcaaacttggctcgaagctcttggttggtacaagtggggctgatgttacccacgtgtaacttggttgaagctttgctcttattcttgctggcttccacgttgatgttcaccccatgaagcttgtaatggtgcaggttgcgtatggcatcctcagctgccgtcttgtcttctatgtgcacaaagccgtaattcttaatgatgtcacattccagcaccttcccatactgctcgaagagtgagcgaatctcctgctctgtagcctcccggggaaggtttccgatgaacagcttcaccatcctgacaagagcctgggagagaaacacaagacttcaaaagtcaggggtgtggtgggaaatttcggtgcactgcagcattttcgtctaatcctccaaagttcttgcaccttcaagaccctcgtacagacattcattattcttcctcaatagaagaagggcggtttgttctcgagaagtgcgagctatgcgtgacatgcaaacaggaggtcgagggtcagcatgcatagcccagtctatcatctccgtgaagtggagcgcaatgaaataccagaattagctgcttcatgtcttaaaatgagggaagagaaaagcccaagcaaaggcaaggggcatcaatcgcagtgcgcctggtaacaaggttttggagggaaatctgtgtacctctcctgcgcgcactagcgcctttcaagatactctaaaaagaaaaaagtcccctttcccccaaaccggggaccaaccacctcgcccccagcggcccaccctccagcttcttcgccccaacaaagactcgacccgacccctgccccgcctccttccggagacccggccccgcctcctcccgttgtcttcccagacctcccgctgcaaaatgagaaacccaaatccgggccgtgcagtctgccggaggcccggcccgacccgcccccgagctccccacatcacacacacacgaccccctcgcacctccgggtggcggcagcgacggcggctcccacgtcagagagaaccttacaaaatggcgacggccgctcgagcctggacgcgaccgggccctttctcgcgcgccagctcacgcacgcgcgagtgcgcgctgcttccctccccttcccctcgcgggagccgagtgaccaatcccgaggctgcatacaaatgaccacgcagcacgggggcggggcctgttggtggtggcgcggcgccgcggaggtcagcccacccccagccccagccagccagtcaccaccctggaaagggtcgccactgctgcgtcagaggggctctgaacgcaaccactgcctagaaaagcggaggccttggggagtcgctcaccacaatgggtcctgctcttgggccctttgaggggggcggggagctaatgacagaggaatctccccgagggccctaaaaaggggcttttgtagcgggctggccggcttctgtggcagcttggggcaacatttcaaaaatacaggtgcgccacattttaagcaaaactagtcattgttttgtagcgctttaaacattattttaaagtttgtcattgcagaggtgttatttattgctacggaaactgagaaccaaggggcagaaagataacctggcagaactgggacaggcctaagaggcattgctacccaggctacgcttagtcatgttttgtttgctcgtgagtatccgtggtctgattctctctcactcattgtgtgtccatcacagtcctggtctgtggtgagcacgccagaggaatacttggtggagaggcccagcgaggtccctagttctgggtgggacagggtctcctcgtacacaccaagctggaagtctaggcaactgagtttcccgactgtctagcattcaaaattcagctgtggtccaagggcacctcctggcggtaaaaacaagcttaggcgtgccaggtgcggcggctcacgcctataatcccagcactttgggaggccaaggcgggcggatcacgagttcaggagttcgacaccagcttggccaacatggtgaaaccccgtgtctactaaaaatacaaaaaatagcccggcgtggtggcgggcgcctgtaatcccaactactcgggaggctgaggcaggagaatcgttggaacccgggaggcggaggttgcagtgagccgagatggcgtcactgcactccagcctgggtgacagagcaagactcggtctcaaaaaaaaaaaaaaaagaagtttaggctgattccccactgtcaccttccagcaaagagtagccttttatggagattgatggattgggtttatctcctagtagagcccgccagggaggttgtcagccaccattcctcattttagtggctccataatggcttctctgataccatctgggacacattccccaggctgccctcttccaccccagctacttggatatgttctttacctgagttctttttgtttctcagccatttcagaagaggcactgtccttccaattttattttatttttattttttgtttaattttttaaagacagagtctcactgtgtcgcccaggctggagggcagtggtgcgatctcggcttactgcaacctccacctcctgcgttcaagccattttcctgcctcagcctcccgagtagctgggactacaggcgtgcgctaccccccagctaatttttgtatttttagtagagacagggtttcaccgtgttggccaggctggtgtcgaactcccgacctcaagcgatccgctggccttggcatcccaaagtgttgggattacaggcgtgagccacctcgcccggcccttaactattattactattatttttgagtcagggtgtcactttgttgtccaggctagagtgcagtggcaccattatggctcactgtagcctcgacctcgcaggcgcaagtgatcttcctatcttagcctctggagcagctgggaccacaggtgtgggccaccccatccagctaatttaaattttttttttttgtagagatgggggtctcactgtgttgcccaggctggtctcaaacttctgggctcaagatgtttccaccacagtctcacaaaatgctgggattcaggtgtgagccactgcacccggcttatatgtgctgctaatttaaaatagcact

SEQ ID NO: 915430 - DNA, 4001 bp, Homo sapiens
caggaggctaaggcaggagaatcacttgaacctgggaggcagaggttgcagtgagctgaaattgcaccactgcactccagcctaggcaacagggcaagactccatctcaaaaaaaaaaaaaaaaaaaaaaaaaaaaaaaaaaaaaaagaatctcaagctgctgtagaccgctttacggcttcatcggggtgaaaattataagtgtataatatcagataagcaaaacaaagcactccataaatatccaatctgaccataattttctgatctccaccctaaattgtaacactggatacatggacagtttcatcctcacatgatcaagaaccaaaatatataaaagtaattacaaagcagccaggagaagtattttcagaaaataaacctagctcttttcagagtacccaagcccagctctcttagtgatacagtttatgttttttcactaacccaaaatgaaactttaagctcagttttgaaattctaatttcaaaatccatgtgtcaatgttacccgttttcagggatatataaagtttgctatataaagtttactattcacaatgcttaagaaagaagtttcatctacaaataagaggttctttaaaactgaataataaatttaaaaacagcaggaaacaatgccccccgaacctcattgggcagttacctgatctaaattgaattttgataggccttccataaagtttgattccattaagtagattcattgcataaggaacagacacttcatgtttgaaattcacaaacgcaaactgctttggtttaccatccttatcttttggaattttcacctttattactggcccagcctacaaacaaaaaggtgtttagaatttaaataaagcaactaagggaaaatactcaaattttacaaataagatatgacaaagtttaaaaacaacagaaacgtaatcagaaacttcttttgaaaatgatgcacggatttccattttggctacagtaaacatcctagttatgactgaacattagatttatttggggaagggggcccataaggaactggaaacacaatcacttttgcaattcacagcactgtatggcttaacatagtgaccaatcgccattattttgccactccatgaaaatgaacatttatcaagaacaagagaatgattttctttaactaaaaacggacttttgtattgattaatcaaacaataccagttattaggggatagggatggggggaataggatactcagaatttttcacactttttaatacagcaacactaaaatgctgtttttctacggagtacttaaccattttattttacatattttaataatgctgcaatttgataagcaaactttaggggaaaacagacacaaataaattaaaatattaagttcccagtcagataaaccaaagacaaattatcctaaggggaagatgacaacaggaaggataagaaaaagcactgctcaacgaagaccctacacacacactgtgttcccaaggacccctggatctctaccacgggaaacctgatcgaggatccctccaccacctttagtcgtcactttcggcctaaacgaaccaagatcttccaggaaagcgacacccagcgagcgtttcgcaacccagacccgcctttcacccccaaacagccacccgtcgggtcccctgacggctacgaaaagaaaacggggtggccgctggccaggccctaggcgagacggaaaacgaaaggcaaagggccgaacccagccgcttacctggtggaaaagctcgaaaaggagctcctcggtcactttcgtttcaaggttgcccacaaagagagtgcgatccgcttccgccgccgccgcccccatctcagcgtcgccccctccctaacctggccaaaaggtcgtggccgacgcacccactgcgcattcacggaagccccacgtcctcacgctccctggcgtcacaaacgaaaacgcccgttgcgcttgctctcagcgggcgacgacgtgcgcggacggtctgcgcatgctcgccaggatacccctcgttaaaggcaaggcggcttctggctcttccgcaggctcagttatgggttcctgtgtgcttagtcatcgggtccgacacaggctggactgatctggggagccgcgaagggcctgccttcacaaagggacgtaacgcaagtactgcgggcagtgtttgaatatggccctgaacaatgtgtccctgtcctccggtgatcagaggagcagggtggcctaccgctcttcccatggcgacctcagaccgcgggcgtcagcgttggcgatggtctccggagacggcttcctcgtttccaggcctgaagcgattcatctaggacctcggcaggcggtgcgaccaagcgttcgggccgagagccgtcgagtggatggtggcggccggagcccaagggaaccagatggccggggccggagccgccaagccagattctcaccttacccaatccctgccgttgaacccgatctcctaagaagtgtgctgcaacagcgtttgattgcattaggaggtgttatcgcagctcgaatttcagtttaaacgaacacctttcctctggccctcacttagcttgtgaacaggcctttttaaaatcctttcttggtgtagcagcaatcgtgttgttttatttttagatggatgtattttcatttaatacgtgggagttatatgaatatgtcctagcactaagggaagtgtaacagttgattgatttaggtggttttatgcagccagaacgattggatcaggaaaggtgtggaagggatattcttaggtcgtcacaaagctgagctgatgggagcaccctccccagaggtcaacaatccattcgttaactcagacacttaacctttacctttacttctgttggcgaaaaagaagtgctcctttttattacactgatttatccttccatcttttccttggcatttaccatcttccatctcccccttcacttttttcagatatgtctacaaacagactccaatctcagtcgcactaaaaataagaacaaaacctaaaccttacagttctttcaaattattaaatcaatttattattcctttctttggcaaaggttccaaatttttactttatatttgtaattttactatttgcattcagtcccagcgcattaatctgaatctgctgtcctaaaatacactggtgaaaacattacttgtacaatctcctatcagaaaactgttcatctactcactgtagtgccctccttgaaatgtgtgtttgttcattcaactaacaatatttggggatccctgtagtaaacactgtatgaattttacacagtctggccatcaagaaagatcacggagtatattctagatggggaggctactaagtgaataggaatcaccacgctgggctgtttattaggtacagtaataaacataagtactggttgcagtgactttttttttttttttttcatcataatactgcactatcctggttcttctcttacctggctgatcactccttatttgctgttatttttgttctcttaaccatacatttcccaatgtttaaagggtggtattttgagaaagttaatgggttttgtaagtgccagctctttatataagcaggtagactagctttttcccagcagacgcttgtctgtttagacttccttaaaataattatcttcaaataaagcaaaatctccatacaccacatagtattgaattgttataactacgtgttaagaagaatgttgagtaaacaagatagcttccataagagggtgattaatatagtgagaattctagaaaccagatcataggaagaatgattgaaagaatagtaatagctaccttttattgagtgctatgtgcaagtcagtgtgctaggacttctattgtttatagagatatttattgagaacttactctgtacctgctactgcctgcggtaagcacttagaataaagtggtgaacatgataaaagta

SEQ ID NO: 915431 - DNA, 4001 bp, Homo sapiens
tagattcccaaagaaaaagcaaaaaggcaaaacatggccaacattatccatttacttttcagatttactgagtgaaaataattttctttacataaacatttgatctaaatcacttttgttgttgttgttgctggttgtttgctttttaatactggaaacaaagattcagtttgaaagataccctgaaatcttaagagtagcatacaccaatccctcccactctccacccaaaatctagttggtttaaatgagcagaatgatccgtttttccattttaggtgagcagatgtttatcaaagatcttagaactgtttgcctcatttatcaagaaaatttacaagggaagaagccattaatcgaatttctacttgtaaatgtaagaagactagtactcaggttcatatacttttaacaggagcttgttgaaagaaacgttaacaattccaaaactaaactaaacgaattttaagttttttctcccaaaagcataaaaatggagacgatcttaacaggaaattcttaaaaggtaaaaacaactcttccttgtactagtccttgggtagttaccatacaacaggttcttctttttgttagtttcgttgaaaagggatttttggtcccaagtctgttcctgcttagtatctgctccggcctcctcctctctccaagcggcctcctagacggcctccgcccctgggcaccctgcagcctgaccggctgtaagaatcacgctggggagggcagcccctttccatggacagagagagcccacgatctggtctgcccacccggtgtcggcccctcgagtagcggtcgctccggccataactgctgctgtaactgtcgcggccgccgctgtaggcatcgggtgagtagccccggtactcctcgtagcggcctcctcctccgtaagatggcggtgtcccccgtcctggggcggcgccgcgcagctctccgtagctctcaaagggctctcgatgggagcctctgctcagatgatccccgtagtcacggtcgcgacctccgtagccgtctcggtcgctgtagcctctcaagggacagtcgtcccggacactggagtggccgtaatcgcggtgggtgtactctccgggcgagggggcaaaaccccggggttcgcggtagtctcggctcgagtagccgtctctggacgagtagccctcatcccgcgggcccaggtaggggtcgcggcgcgggggcagcggctcccggcgcggtgggcctgagtagccgtctcgcccccgcacggccagggccctcccgcgcattccaccgccgctgctgcgagccgggcccgacggcgcggccctcttggggggtgggccgaccctgcgcggcggcggcccacgcttcatgggcatcggggccctggagggccgcaggtcgaaatccgccgtgtagccgccgtcatcatcgggcccgccccgggatggggaacgccgcgggccgccgccacccccgcgggttccgcgcaggaacctcgggcgaccgcggctgcggggaggcggcgggccccgccggctgctctcgaacgccggtttggtggcctgggccaccttgatggccttaccatccagggacttgccgttcatgtctctggcggcggccttggcgtctgcggggctttcaaaggtgacgaacgcgaagcccctcgacttgttggtttctcggtctttcatcaggagcacctcgacgatgcggccatacttgccaaactcggcttcgagggctttctcgtcggtttcgaggttgaggcccccaatgaacagcttccccgggcgatccgcttcaaccatgtttgccggtcgaacggtcggtcagtggcggtgggaggcggtgaggcggcgccagtcgcagccttcgagctcgctcgtcgagggcggctcctactggtcaggcggcgcctagtcgccgagtccacggaaccgcagccggagccccgctgcagggcgcgcccctgctgcctgtgattggtcggctgtttccagagggccaattcgccgtcgggaaagtcggcagttttgtgtctccttttcagtctttaacttcctgttcacctgacccggtcttaacggcttcaatggcctcctgaaagctcagggaaaagccgttaggtggaaaaaaatttttttctattagttttaatgagaacaattgtaatgatcccaaacctaagctacccaaaccattttcaaacagaaaaaaatagtatgaattttttaaattactaaaattattaagttaaaaatcatttttcaattattgaaaaatagagtaataacagttaacaagtttaaattttaccttactgatctttttaaactaatcagcttttagcctcgtctatcctctgttttgattttatttggtgctattgtctttattctttctacatttattggatttattgtttatattattttgttctaattttttaaataagacacttagcacattaagagtttaaaaaatgtttcttctaattgttatatttaaggttaaaacttattctctatgcactggttaatatcatgccttgagctgtaatatatgttgttttcattgttgttcagttcctaagattttctcatctttgttatttcctttttggaccatgtattaaagaagtatgtttgtaaattttcaaacatatgtgcctgttggttattttttaatatgctctgtacgatatccattgtttttcgttgagacttgctttgtgacctaatatggtgtaattaatgttccatatatactgagcagaaagtgtattctctaaatgttggacaaagttctttcttattttctgatatttaaatcttcccttttctaacttgttttttatttgatagaattgccaaacactagaactgtcttaaaatttaccataattgtggatttgtaaatttctctttgtctttatgtctggtttttgcttcatgtaatttaaggttatattgtgagatatataaaaattgagaattgctacgtatttctggtgaataccttttttatgtaatgatcctccttattcgtaaaaacctttttaccttagtccattttgtgtgatgcttataactttcggtacttttgcaatttcttcctaaatctttgctatcagccaaacctttccttcttccttttttccatctttcttgccttttcttgtagtaagtgatttgtctttgtttctttttcctccactatggaagaagttatgccttctatttctactttttcgaatgactgcccttaatgtttttattgaatgctaacttaaaaatgctaagtttataaatttacttataaaatcaagtttactgcttaattttacgtgtgtatatccatgtaaccatgacccacattaaaatctataacatttccatcactccagagggttcacttgtgccacttactaatcaaacctaactgagatatgctctcctggcacaataagaccagatagccacactgaggtttgcagcaggaaaaaggagggcatttatttgcagggctccaagcaaggaagaccaggcagctactcttaaattctgacctccatgatggcttacaggtaaaggtttttaaaggaaaatgtaaatttcaggaaagcagaagttacagacaaaatcataagtcaatacatggaggttacacattggtattggcccaaaggagagatatctcttgaagtggggggcttacaggtcataggtagattcaaagattttctgatttgcagttggtgaaggaagagaatttgcagtcagcagaaaagaatgagctttggctcctgagtgtgactccatccaggcccctcaggaagatatttagaacaaagaatggttgtcagagtttagtccccagttccctcttatctgaggtctacctgtctgtggaactgtttggtgggatctgggtttctgaaagacaactcagggacatatgttaagacattatatttagtgtctataggggaacaa

SEQ ID NO: 915432 - DNA, 4001 bp, Homo sapiens
cctccccccggggcagtagctgcctgccccaccacctacagctgtcctgcaccccaacttcccacggtcagtggcctctccaatactgtggccctcagttcccaattccttctccagagtggccattagcgacatcatcatacaccctaacccaggccagctagccaggactcaccagcagacaagaagatgttccccacgctgctctggcggaaacgcagctgctcaataatatggtgaaaatgggctgggaaaaaggtgacaatcacatcacagtcattcctcccagcctcccttctaggactgcccctcacctcaagcccccttctgagctctcatgctgaaaacacaccaggactaatctggccagactcaccaactccaaaaaagagcgggcaggtgaacacagcagggcccaggcccatgcacggtgctaacatgggcagcatacaggcccggaacaccagctcctctgtcagcggggcgatcacttggttccgcagccaacgcatgtctgtgaggcagcgggcccaggagcggggggctgcagagggaattcaggacaagctgtgagtgacgggctgtcagacagtgagaccccagaggctccaagggctcctctcccacaactttaccctggccaaactcaggttaggcatcaatactgctgaggacgggggtgtggacccaacataaacccaatgtcttgagatgacctgaatggaaggcattagctgaggcaagggcatcctggaagtaaactctggagacaccaaaatttaagcaagactagctctggttggggaagcaggggacagtgctctctgatccacaccaaatactgctgggggttcccagggaactccttggacgttggcaatcaacccttagaggccacctagctctatgtttccattttactgatgagaaaacacacccagagagatgacatttcacgtgtccagatcacaccctgagcccgctgactccctgccccaatgtcctggactgcctgtgcctacttttcccttcagcctttaagactcacccaggacaaccttcagcccatctgccaggtcacaagggcaatccatagagagctgcatcagtgggcccaggaaaagaatctgagggcaagaaaacactttcaccataacccaccgcttttgcccagacctttgcccatgctccctgagactccaagcttgaaatcctctccagccacgatttccagaccatgcataccggaggaccctggggccatctcaaaagtcctgtctcccatcaaccaaaaaccaaaaacaagagtccacggcactgcccatcaggctgataacaaagaccagaagaaaaaatacagcaggagcactcaccatggtcagcaacaggggcagcagcgccgctgggaaaatgccctccagcctgaagcccatcagggtgagcagggatgtgcctggctgagccacaggaaagggggcatcagttttgcttcctcccctaaagacccctgagctctcaccgccgttgccctttgccccgcctccttcgcacctggatgcctgtgagttccctccagagcagcacgcacaggggtgagagactggacaccaccaggacgctggtgaagcgtcgcttgatgaccgcgggatggtccctacggaggggacagtaagttcagggggcccgcggctgcccatgagcacggacccgcccccggctcgcccaagctccgcccgcagggcgcggattccggtcgcgcgcagcccccgcacctgggcagttcgctcttccagacgtagaggctgcccacgtaggagcaggcgaggctgaggcaggagaacactgacacccagcagcacagcccggggcccaggccgcccagcgccgccgactcgggcggccgctccggccgcgacaccgacagcagtcgcagcccatccccgcccagcgccgccattgcgccctgacccgcggcgcgcaccagtgacgcagtcccagggaggtgtgggtgacgtcaggccgcggcgcggctccacgccccgccccgccccgcccgggcccgacgcggaagcagacgcggaagaggacttggtgagcgcgcggcagctttattaaaccacgggataacggctgcccgcagcctccggatcggtgggcgcttgcggaaggggacccggctcagggcccagggctgggactcagccactctgacaggttggagacctcctgcagccacagcacgtcctgcgggaacaagggggcccggggtgaggacctctcagcagcggcccgtggcctgcacctcctgctgagcccttccctgcgcggccctcgcccagttacctccaggcggcttccgaggctcgccctgcccggcgccagggccctgccgtgagcctcgcggtgctcccttcctctaggagtgaggggggccgcggtggcttccgggcggcgcggggcggcctctgacgggctcggggccctggcagagcgcagagctcgcatctcctctatgcgggggctgcccctcttgagcctcttgttttctgcttgcccgctggtatctaggagaaaaacaagcctcttcatcttactttcatggccctgtgctaggagcacccttggccaaggggaagcctgggagaacgggcgccgaggggctcttcccaccgcatccctgtcagcaggtcccatccacaccaaaaccctgcagctgtgggcgcttctggagcagcccgaggctgcagagacgtttcagggtctccctattctctcacccaggcgggagattgtcccgagccctcacttgggggactcaggccgctcagtaactttctgtatagattcttcctggagtctgcactgacaagctcccctccctgccagcctctgtcccccctcacctttctggcctcagttctgtctccctttgttgctcacgttgcattgagcagtgcccataggcagctttcctactcttaactgattcatttgtcaaattaaagcgagtttagatggatagattcttccccagcaggtcttggggatgcagatcaatgagcttttccctgagagaagctcacagatgctaggaggggatgcagacctgtgtacaaagcccagggttagaatagagaaggaagccgaccacctctggatgtgaagaagggtttccatgaggagatacctgagctgaccttttgtttttttgagacaaggtcttgctctgttgcccaggctggagtgcagtggctcagtcctggctcactgcagcctcgacctcctgggctcaagcgatcctactgcctcagcttcagcttccagagtaccaggaaccacaggcgcatgccaccacaccggctaattttttttacttgtagagacaggggtctcaccgtgttgcccaggctagtctcaagctgtcctcccgccccagctccccaaagtgacggtattacaggcataagtcaccactcctgccccagagctgggttttgaaggatgaagagtgatatgccagacaagggagagaaagggaatttcttgctgaaagttaacacaaaccttatgcaaaggcataaaacaacttcctatgtaaatttttactttttaaagatgaggtctcgcctgtcacctaggctggagtgcagtggcgtgattgtagctcactgcagctttgaactcccggcctcatcctctcgagtaactgggactaaaggcacacaccaccttgcctggctagaaacagattttcatctgtagaagacaggaagccaataaagagttttaagcactggtgaaatatattggtaattttgtacttcagaaagatcgttctttcaaaggtgtggcttagatcaaactagagacaggaagaccttaagagcccaataacaagtaaagacagtggagatagaggcgtcaccaggaatcagaagtgttcatcaggcctaagtgataggcctttgtgagcgcctggatgtgggagaggcctcttggcc

SEQ ID NO: 915433 - DNA, 4001 bp, Homo sapiens
gtctttttatcagagcaggcaaatggtgcacctacacaataggtataatttatcctcatattccaatgaaacactttggcctttggaggcccccaggagcacagggatggctgtgttctctttcatgtggcagaacatgaagatcctccacccccaggaatcaggttcagggagatctgagacctggtgcccaataggcaggactgctggtttcttccccagccctgcctccatctgggaccaggctgcctgctgggtcctctgtgcaaggaccaccagatacctccgcacagtgcccaagtgtttcctcaggggacccggggagggtgtactaaaatgcgccgaagttttgtttcccgggtttggttcctgactcaactgcctttaacagcccaagtcaaaatcctccaccaccaagagaaccctccagctttttgccccccaaacaaatcagttgccaaagaactgagtgcttctgcagacatctgctgccaacagaaacgtttcaggcgaaccgtttccattcctgctccctcgtgtttccaatcggaaactgcgtgtcccttttcaaccggatttttgtatccctacactagattttattttatttttatttttattatttttgagatggagtctcactctagccccggctggagtgcagtggcgcaatctcggcccactgctacctccgcctcccgggttcaagcgattcccctgcctcagcctcccaagtagctgggattacaggcgtgtgccacgacgcccggctaatttttgtatttttagtagagacgggatttcgccgtttggtcaggctggtctcgaactcctgacctcaggtgatctccccacccctccccccgcctcggcctcccaaagtgctgggattacaggcgtgagtcaccgcgcccagactccttacgatagatttacagggcgattaggcaaaaggcaagaccactgcggccgagaccaggaagcaagcctgtcgctcgcctgccccttcatcttttatccatttatgttcatccctgagattttcttagcgagtgtctcaagcccttctccccgggagtgggggatcagagagaaactgcgagagagtggggaggaactcatggcactaacaggccactgtggacaaactcttcttttgtgcactctcccctcccttctgatgcaacctgggggagggggcgggccctcgccgtcctggctcccgcggccgctgccacgttctcgcctccccgcgagaaaccaccccggccggggcgcggcggcggcgatctccaagctggggtcccggggccctccagcaagttagcctgagccccagcgccgagttgggcagggccccatcctcgaggccgcgcgcgcgatttcgctttcgctttggcggtggtatcccgcgtggctctcgcccaggcggccctcggacacctgcgccgccccccacggggccctggccgcggcctcaccctagcctctccttgctctcgtccggggtgagctggtcgaaggtcttggagtcctccttgcccaggaaggcctcgtggtcgtactggaagctctggttgtcctcagggggccgctcgcccagctccgagtcgggccgcaccacgcgctctttgcgcaccgtgggcttggcccgcagaacccgcggcgccagcaccagcgccagcagcagccccagggctaaccccaggcggcggccgcggccaccgcgcgccatcgtcccgaggagagggcggccgagagggagacgctgagcgagcgacaacagcggcagctcgggaatggggactcggagcgcggcggcagcgacagggttggggccggcgcggaggaggggactggccagtccctccgccagtgcccgccccgagccggagcagaggggcgcgcctgggcctcgggctgggaagctgcgggcggccccgctcgcgcgcccattggtcgctgagctgccgggggaagccggggccgcggagccacgtcgccagctggggtggtgggcgcggggctcgtgtttcgcctcggcccctccccgcgatcttgttgctaggggcgggcccgggcgaactgggctagggactggagggctcggaggaggattgggaagttctttgtcaagcaacagatgtgcaggataaaattccctctgacttcctacagttccgggaaaactgtaaggaaggagacgttgcccttcctcaacttccaactgagaccccgaatctcagccctagaccctgctctaagatgtgctctcaaacccaattcaaccccatttagtaaaatttggagtctggttacaaacgcgagcctggaaggagaccaagacgggcgaagtcccctagaaacgagggtcgtactgtcagtcgtcaaggagggtcaagcggggaacttctatatgaccaagagtccctctaaagggagcggtactgtgcgttccagctgccaggggaacgcaggccccacgctgatagatagtcctgtttcccaaatgaaatcaatcaggattttagatttttatgttttatttctaaatgttggtaactcattttacaaaagcactagttggatccaatcttacctgtattcagttggtaatgctaccaatacagatatctgtcccatcaaactttctgcaatgatggaaatgccctctatctggtctggcctgtaggtagtggctgttgagcacttgatgtgtagcttagtgtaagtgaggcactgaaattttaatttaaatctaaacttaaagagccacacgggactaatggctaccgtattggacggtgaggtctcgagcagtctcagccttttgacactcattgaaagccatgatcctcttccagaaaaatgcacatacagctactgacacgggtgcttgattaaagagtcggaggattcatggatcttttgaagccccacctatgagccccaggttaagaatccctagaaggccgggcacggtggctcatgcctgtaatcccggcactttgggaggcggagccaggtagatcacttgaggtcaggagttcgagaccagcttggccaacatggtgaaacaccgtctctactaaaaatacaaaaattagctgggcgaggtggcgggcgcctgtaatctcagctagtcggaggctggggtaggagaatcgcttgaacctgggaggcgaaggttgcagtgagccgagatcatgccattgcacttcaacctgggaaacgagagaaactccataaaaaaaaaaaaaaaccctagaaaactgaaacgatagttgaagagggaaacccaccatgacagctaaatatctgtactcctagaaatttcctccatcttgccttgcctcccacctccatccctgatgttttcaaaaaggtctgggatgtgcttcttgcccttgcaataaagatgtcgtcgcaacatagacgcaagtccctttcttgggacgccctctttcaatcaattaataaatcattactgtcttactactacagcctaagcactggactgggtgctgagggtacaatggagaacaagataatcatggtgtctgcagagctatagtgtatatgaacagatgttcattcgttcgttcgttccataaactgagcacctgctaagtgtcaggctgtgctggattctggctaactgagatccatggatcacaagtcagcatgacaagtgctcacagagaaaggcatgtagtggtctgggggtactgaaccgatccagacatgggaatcaatcagggaaggcctcccagaggaagacacatttaaattgagactgaaggtgagtaagataagctagatggaaggatgtagttatgtgagagaaggataagatcctgtacgagctagcagaggacagctccacatttgaggcaatgtctttgtgaccccactggctggcagtgagagctgggaagccagtccttggatccccgcttctcttcctagtccccttcttttccttggatcccccccttccc

SEQ ID NO: 915434 - DNA, 4001 bp, Homo sapiens
tgagctgccccggcaccgttccaccccattcccaagtccctgggggccaaggctcacctgctcaatgttgtagccatgcttctccttggccatcgcaatgtacttgtcaactgcaggggcagcaggggcagggtcttggtgaagggggttatagctcctaacccaggcctgtccagaaagggaccaccccacaacggccaggtccctgaacacgagccccagggcaagggttggacccacgaacacctcagcttccagcccccttctgagaagagctagcttggagctgggatgaacccaagcccccacctcccagggctgtgccccactcacgcttggcatctgacacacagtggttgggtgaccacaccagcatccccttcagctccttgttgctgtagcgtgcggggctctctgaaaggccgaggagcaggagggaagacactcagatcagcctggtggcacaagcctagacccatggccagagggcagcagaggagtggagccagggaggttgaggcccagaagggaaggaggggcagagacccagacaggaaggcagggcaggaaagcaaaccatgctggggggccacccacccctgccagcctgcccttccaggggagccaatcaagggcgccccaggtggggctgcaggccaagccccgggcctccacccccaccccacttcacagcctgtcctgcggctcaccaggcttgcactccggaattacggcctggtaattggttccaacgcggatcatgctgtctgtggagccagggggaggcagtcaggactccagggagggcgggcgggagggaggatgtggcgggcgggggaggtggccggcctggagttctccttcctgaccacccagggcccccaccttccaggaggctcacttttccctcattgtaccccagttacctgcagccacagaagggactggaagaggaaaagaccctgtccagccatggccattggggctggagggtggacaaggggacagttttagagcccaggccaagcagggtgctttgttccgggggaggggagcggggttggagggcagcccctagacctggaccacagccctgcaaggaacccaaggctccttcccaccacaggagcctcacagctctgtgtggaggtgtctctccagtccctgctccagccagacctcagtcccctgcaaggtggcaaggtatgagggacccactctatgcaagggagggatgcctcggtccctgagggggtgagggcagggcaggggccggcaggacgcctccacagcagctaggggcccaggttccagattggctgtgccggcagcctgggtttgtgggagaagcaacgcagaggctccaatccaggagaggcaggagccatcagtgtaacaggctcgtggtctgcaactcttccccctcccgccccactccgctccccccaggccggcgcgcctttaaccctaggccaccgggctcaccgtgcgagtgctcctcctcgctgctgtcatcctccgagtggggctgtccgccgttgggcaccgtcttggcccggctacgggacaggatcccagagcccgcgctcggcttctccatcactgagggcattaccccgcccagctgccccggggggcgcaggagccttcggagagcgacagtggttgccgcactcgctccgagtgccgagcccggcccggcctggagaggtcgccactgaggttaggagaggcaggaggtcagcgtggctagggtccggcggggtgggagcccacctggtagccccagcgctctccacgacccccacgagccagggcgtcagaaaagtttgtgcagaagtgggggacgcaagggatgagcgcaaggtccggtgcggctggggcgtgattactatgtacgcccctcagggttggggttcccctgaagtcggggccccctgtcctcggggcgccctggaaccccaccgcccacctgcccacgccgttcagcggctgggcgctggagcgcaatctgcgccccccgggctctgcgcctctcagctgcgccggggatgccccagtccccgggcggggacccgtgtcctaagcagacccctgcccgcgacggcagccggccggggcaccggcggcggcggcggcggcgacggcggcgggacggcgcgcacggcgcgcggcgctgggcagagttgccgggaggcgggcggagcgcagccgcgggtgccgcctcgcaccctccccggcgcgctcgctctccccgccgcgctcgggatgccgcttgctcgcccgctctccgccgccgctcgctcctcgcgcacacaatgaagctgctggcagggaagtagtgccggctgcggcctcagcacccctcccccagccgatgcctccgccagctgaacatctggccctggggtgggagggagggcccggggggcggggccagggggccggggccagacctccagggggtgggatcaggaccctggtggggcgcgcgtcccgctgcgggggctcccctcgcgtccctgggctcccagacttgcccctgggggagaccccactgccccccaggagtagccaggggtcagccccacccacgcgcacaccaacaccacacaccagtgggctcgggttactgccgcctgccccgggggccctggggccgcctgcccgcccgcccgggtggagcccagcttttccttccatttcccttcctgccaaggaactccccgcccccccttccgcaggggggaccccccttatgcgcccttgggggccagaacggatgggaggctggacaggcaaggaatgaattcctccaagagctacccagccagaggctggcttctggtggatctgtgggtccccaagggtcgccccaattccctttaactgctgcagtatgcacccctaaacagtggtagcaagggctgagggatggggagtgggaggtgtaggggaaggtctgggctgcaggggagagaggagctgggtctcctccccactgggttcactgtcaccccagctggaagcagcatccccctccccccggacaagcacgggcagagtgacagacagggaagcgggtagagcggcacagacggagatgggggagggggtgggcagagactttcaaagccagacccagccaccctgccaggcacacaaagagccagcgcacacaccggcggcggctccgagcctgcgagctgcgcccgtgcccgtccccgccgcccggggcacgtgctgcagcgcacacaagctgaagcccccgcccgccgcccctcccacccggagccccagtctcctggacacacctccacccaggcacaccccgctgtgcccagactgagccgagcccgcactcgcgccctcctctcccttcccttcctggtccactctgtaatcagattcctaaatttagaagcagcctagggcccagccagggatccctgcccccacccgctgcctgcggccgagtggccggggtgttgcggtcgggccacgacccggctggggccgcttgttcccggggactcctgcggacagccagggaaagccaggctcgaccccacccggctgctgcgccgtcgagccacatggggccacccagccagcggccacgttgcccgccacacctcgggccagggctacggggcctttatcctcctcttaaatcatggattgggcaccaagccccagggtggggaggtctggacaaaggagaatgaatggaccaggggctggtctgagctaaggaggtctgattcaagactgagagtcttcccaggccgacccctcctaagtggcagggcgccatccctgtccccagcacctccaccctttggagagactctcatttctgtcccctcctgcctggcaggcaaccattgctgcacaccagcctctcctacggtgctgtcttccatcttgcccccgccccctattaggcagggcctcagttgagtcccccatcccccttgcctccttcccagactcaaacc

SEQ ID NO: 915435 - DNA, 4001 bp, Homo sapiens
acaatttcaaaaaaaaaaacaaaaggacagactcaacgtattttccctacacccaaattaattacatctattctacagctacttctgagactctcctacatactcttccatgtgtggggatacaggagtgaacaaaacattgtatgtgattcctaaggtcaagaactcaacgttttttcaatgccacaatcaaattctgtctcatttaaataaaactgtaaagaatgccaatgtctattcattccttgctaataatataccaactgtttattaaattccatcatatataaaaaagcgattaagcaaagaaagtcactgcaatcgtctttacagcatacgattaacttcaaaaggagtgttttacatgttgctgtatttgaaggaaagtattattaatctctggaagataaagcacactggggaaagcaaagaaattctgaaaataaaaaactgcaatcctgaatattagtctcctttctcaaatccagtgatgctgttttggcaaatggatcaagccattatttatccagcaacatgaacggggtaattgttccttcttagctccatcagtcatataaaagagtatttagtgttctaaaaaaaaaaaaaaaaaaagaagtatgctccttaaacaatagattacaatgtctatgtcaaagtactcgtttatcaaataaacccttattatcttagacttttatatttacatcctgccagtcttagtgccacaagaatgccatcgagttcctcagcaacgtgtcttccaccaaaatctcaaatgtattttaaaatatatttttatgaagttgacttttaacacatttccaacctagtaactactctttaaggaaaaaaaaaaaccaccaaatattgggaatgtctgaagaaacatgacatctgtctaggaagtgatgtagtctgtttaaactgaaaaaaaaaaaaaaacaaaaatgcactgccccctttcaaagttagtccgggaattgagtttagaatcctttaaaggaaaagagggatatcatgtactgaacttgtctggtggggtctgagacactaaaactgagcggcctcaagggcccgagaaagttacagggctccgagagctgcaacagcagcaggtagagctgcggccgggaaccgcggccctggcctggcgggtgcgagcggcgggagcgactggcgccccaaagcctgtcatgcaacatcccctttgccactggggcggaacgcacgctctctagtaatttaacacccctcctttcaaactggaggccggggaacaagttctaataaatgtaaaatcgaattctacctacgctgaatatctggattttcaaacaacccttgggaccatgccagcccgggcccggggcccagtccaggcagcgggagcccaccgtccccagggcgctgggggtccgacaccggcgctgaaggcagactccgcgccccgaggaaaggagaatcccgcggcggcgaaggtcgactttggcccggccaggcacgttcgggccgcggctcagccacgactcgggcagggcctcgcggcccctaccagccccgggaggagcctggccggccgggccgttaccacagtggcgcctcggccagctgggcgcgagcggaggcgcgccaagccctggcggcggcgccacggccgggcagcacgggccccgcaacttcgcgccgccaccttagcgtctccggaggaaccgggagcggggagtgggggaagggagggcgccgcgccttacccggagagcgggcggcttctgcccgccggcgtgtggctggggcgctgcgcggcggcgcggctgcgacagggagggagaagcggtggtgcgagcgctggcccgcgggagacgagaggcgccgccgccaccgcagacagctccgcaatatggccgctcggcgcctccgcgggaaaaggcggggctgcccggcgcccccccgcctccccctgccggccggccgtcctcgcgccgcggactgagcgccaacgccgccgctgggggccgcccccgccccgcccctcccgcaggctcgcagccgcaggcctggctccgggcgtggccgggggtcgcggtctggggccggccaacgcgaggtgggtggctgcgggctcgggagcgcccagggaaatagggcgaatgcgccggagggtcgagcccttccagagagcgctgggctccagctaaacctgcggtcgagggaagcggagccgcccagcccaaagctcggagtgtgcccgccgcctccccaacgagtggaaacttgaaactcccgctggtgccagcaaactcactgagggcgttgccgtcgcccccagaggaggaattcttcccagagggagccggggaccaaatgaagcgtgagacttggctgttaggtttgaagatcctggactgggaaggagaaaagggcctacctgagcggaatttagatttgcaacaaagaacgtttacattattttggcaggttttagccaactagaaaaacttaatttttcagcgacaattttcaaacttcaccaaaacctcaatggataagaccccaaatcaggagtgcaaattttaatccaagcaaggatgtgtgataattttttattaccaacgacatgctttggcagttggaaggagttggttagcaagaaaaagttggaagtagggccccaaagagccgccaaacctacataattctagatttagagaaagttaggcattcgatcttaagactaagtctagcccactcactttagttagtggctgggatgagacaggaagctcctgacttctggatcagtcttctgtcatctaatccatgctgagtcccctcagtattgtctgctgggatgattcagggagcaaaacttgctatgagtatacaaacagcaagcgcacaaaatcagattcgcctggcttgccctgtttgcaatactttttttagcttatcttttgtgaacaaactttagattcaaataacaaaacgcctgagtatacttacttttataggacaaataactcctatacttcctgccttagcatttaccttaggtgagacagtagcttttccaggaaatatctgcaaatcactttcactagcctgcctcttcagtgagtttccactattgccctttgagacctctccgaacaattaaaagcccccaagagactcaagggttaaactcaagggcctttagatagcaaattcctcaaggatgggaaccaggtgtgtgacttgcgaccaaataggttcttgtggttcttagggaccaccaaaagatcactccttacctctccctagggtgcaagaattatcctggttattgttcagcctaccacatcaggttgcaggcatagtcaaagtattacgtaatacttcccatgaagtaggtaagaaaaaaaagtattatgtaaattcctacatagtacactaatcaaatgaaattatataacacacttttgcaactgaaagtgaaggattcactgttgttggtcaggtgccagacactggtgtgaaattcttttacatgactgtctcttttaatggttacaaaaaccctctgggataaatactattattgaccctttaaaaaaaatcgatgaataagacagcttaaaaagaggtaagtaatttccccaatgtaacaaaactaggaagtggcagagcagtgaccaaacccaaatatatgtttgactccaaaagccttgattttatcctatcttctgcaacagcaaacagaccaaaaattgcaacattttagttgggtatcctattagtaaatatttaagtgaaagataacagtcaaggctggtgagataaaaagggtactctcagacatggtgagtgggagtgtaaactgaaataatctctttataaagctatttggcactgtgattcaacccctaagaactttcatggcagggcatggtggctcatgcctgtaatccccgcacttcctgggaggctgaggcgggcagagcatgaggtcaggagaccga

SEQ ID NO: 915436 - DNA, 4001 bp, Homo sapiens
aggttgcagtgagctgagatcgcgccactgcactccagtctggggacagagcaagactctttcttaaaaaaaaaaaaaaaaaaaaaaagacaaggtatcgccctgccacccaagtgcagtggtgcaatcatagcttgccgcagcagtgacctcctgggctcaggcgatcctcccacctcagcctccctgggactataggcgcatgccaccatacccagctaatttcttattttttgtagacatggggtctcactatgttgccttggctagtcttgaattcctaggctcaagagatcttcctgccttggcctcccgaagtgctaggattataagcatgagccactatgcccggcctgtatatttttttacagcctgtctctgtcaactgcaatgtcaactccaggggagagtgctggttcaatggttttcttcctcaaacaagagacgtgactctgagggacttgtccttccagctacaggggtcaggaattcagaagtgattagggacccatccgtatcccctggaactcatctgctagagtaaacgtacaaatagataatttcaagacaaaggcagtttacttgcagagctgagtcagggcaaggagtgaggaattctgccctgggtccagaaaggagtaacactgtagcggctacttcatagcccgcctcctgtcccctcatgctgggcctcctagcctgcagggacctcacctgtggatgcagcggtccgggcagagctcagcctcatagaagccatcccggcagtcctttcctacaagctcgtgggggtgaggccggtgaggagggtccttggtgaccagggagatgcgcactgtccctggtcctgtgtagccattgatctgtccaaagtacagaggcccagacatccaaacctgactcccaaacacagagggctggggttccacagtcccttccccgcacaccctggcgcagtgctgaccttgatggtggggtgggtcttggtggtatctgtgctcctctcgcctgggatgctgcccgcggagcgcccctcgcacttgtagcggaagcgcatgccccgctgcttgggctgctcaatgatctccacataggggccagaggcctgggctggctctgccaggggacaccgcagccccattaggcggctgcccccactgccctaccccagggagcacctccccgaccgccgcgggggccacttacctgccgggaagatgagggggaacagttctgaaaggggagggagatcagggtcagcacacacccaatgcccattctcacaaggaggaatctgctctccacggagaggagaagccaggctccctcccaggggaactgagtcaggacctgctccctagaacctgcggtgaaactaaggggtggaggaaaggaaccagaaacacctgcttcttgagggaaaacggggtaaggaatccttcttctccagagggaagctgaatcagggcctgttgtactttcttaaggaaaattgagggagggcacgccccacctccctccagagaggaaactgaatcagatgcgttctcccctaatagggaaacgaagccagagctgcccccatggacggtgtggagggaaactgagtcaaggttccctctgctcccccacccagggaggatgctgagtcaagggccaccccctccacccagaggggaaactgagtcagacccctccccgcctgccccgccccgcgccaccatccggcaggccgaccgctccctgcgcagcgcccgtcggcgcaggaaggggcggaaagcggcgcgggggctcccgccacagccgcggcggccccggcgatgccaccccgcggggtcagagggcgacctcaccgtccatggccggggtcccgggggcggggccggggtcgcagctgggcccgcggcgtgcactacagacgagccattcgccagaggcggaaatgcgccgcgcggcccgccgtcgcgtcactgcccggaatccggccgcgcctgcgcgctgccccgccgccgcccggcgcaggggccgggagcaagtgcacgccgcgcggaggacgaagaggctgcacgcacagccgctgccgggggtcggggccaagtgcgcgcctcgccgaggacgaagaggctggcgtgcccggtggctcggctagctcccgggtcccggccccgcctggagggtgggtccgccgattactcactttgtttttaggggatttcagggccccctcccgccgatcggcggagtttggtgatgtcactctgggccgggtctggagcaaagccagggctactgggctgcggccgcccgccccgcgcagggaaaagcccgaccgggccttctgctccgcagaggccgggtggttgaactccgcgcgggtttcctaaccgctaaaggtgcctttcggtggtggctgtctcagaagcacgttaaaatgtcctacccaccccaatctagatgcggctgtgggggaatgggagcggccggacctcccagcctgacagtgcatcaagagctttgcggagcctacagcccggatgggacgactgaggccctcccgctggcgagctggccgagggctcgtccctctccagctaaagcgccagcttacgatacagccaaactgccggctctcatcggctgtgggagcaggaggcccccaggggtaaatcccggagcctcgtctctgaagcctggcgcttgtgtctcagaaggtgcgggacccacagggacacttgaatcagcaggctcacgaccccccacccccctgcccccgcctgtgtttgccctggacctccagctagggctgaccactaattctgtcatgtgaccccacagtgcaggtagctcccccaagaccaagcccaaggcgcgtccgtgtggaggctggggctgacgcacccccaccccaggcctcatccccaaaggaggatgctccactgcagggggcggagtcttctccagatggagaaagacttttttattttctctgaattcgtcttaaattaggaaatcatgtgggaattggaaaagattggaaattctgacttgtttcccaggctctgaagaaacaggaagagaaaagtgaaaatagagttagcaccccgcccactcatttcagtttctccagtggctggccctgattagaaaagtgtttacttttggcagggggcgggggaggccgacttcaggtgacagaatggattaattaaaatctttggttaatgatatacaattatcattgaaccttgcatggatcctcttcttaaaattcatgtatatttataacttttaaattaatacgataaacacccatgtacccattgcaaaactcaaggggccaccaccatccagaattctgtattgtattgtattgtattgtattgtattgtattgtattgtattgtatttatttatttatttattttttgagacacggtctgtctctgtcgcccaggctggagtgcagtggcacaatctctgctcactgcagcctctacctcctgggctcaagcaatcctcccacttcagcctcttgcatagctgggactacgggagcacaccaccatgcccggctaagtttttgtattttttgtaaagaagtggtttaaccttgttgtccaggctagtcttgaactcctgagctcaactttcctccccgcttggcctcacaaagtgctgggattacaggcgtgagccaccacgctgggccagaattctgtattttttaaattaattaattaattaatttattgtaaatagagatgggtctcactgtgttgcccaggctggtctcaaactcctgggctcaagcgatcctcccacctcagcctcccaaagtgggattacaggcatgagccaccacacctggcccagaattctgtattttaaagaaaaaaaaagttatatctgcatgcctacacaatatatcttttggttttccttagttttgaacttttttttttttttttttgagacaaagtctcactctgtcgcgcaggctg

SEQ ID NO: 915437 - DNA, 4001 bp, Homo sapiens
aactcacaatgtaatgccctggctaggccacgcctactagcccaagtttgagagacagaagtccaggaaagccatgagcagttattaggaaggtgggtgatcctctctcccagcatctcactggtctctggggtcagaagacctgaattccagtcctggcactgtcctgactctgtatgaccttggccaagtcactttgcttctctgatcctcagttcctttctctgaaacacagtcactacatctcagaatcactgcgaagattcaacaagacagaacaccatgaagtgttcagaacagtgcctgacactgtcccccaccctgtcccccacccctagaatgtaatcagcattttcagaggacgacagcagaagacagaacttccagattctacagcaagtgccaccctctcctagactagggagctcagcttccaccccaccctgcatgaaccccacagaccttcatacgggagaaggggcctcagaagggtcttgcccagatggcgaaagggtaccgctccagctctccagcaagaacttagcctcccagaccagagaccactcctggggaacaagtctctccccactctcccccaacccaaggaactgaagaaaggacacccaggcagagaagtgaatgtctatggatttggggatccatattgtctatggatccatttcgtgacagaggaccaggaagcctttgggtgggaggctaacgtttccttgaccagttttggagaaggctgtgcttccaaccctatcagtagcccctgagtgcagcccctgggccgctgtgtccccaggagaagcctgcccccaccccccactgcagtctttctgcctgaagggaagggagaacacaggcagttgacccaaaacaatagaggatcccaaagtgatgattcacagtccattcaaagcccagcacctcagtgtgcagatggggagactgaggcctgcgcgggggaggggggcgggggggtctgagaacaagattgtgtccgggtccgctgagaatacagattacacaggggcagaactttgccaggtgtagggacttcgatgcgtgagtgtgtggatgcaggtgggcggggggaagctgagactaccacagggcccctaccctgctgccatctgggccaccccaccagatgttgcccagcctcggctttctccctcagccagggcctatccctcagggtccatctcctcaccaagctgaactcctgaggggtgccctcgtggggacagtcctggagacccttgtctcctggctccccaacttcctcatcgccccacatctgccggaaggtgtcctaggtccggtccctcctcctcctgcctcttactcatcatcaccctaggcgcagacacacacacacacacacacacactgacaccacttgaccccacacgcacaccatggcgccagcgagctcggctcgttctcagtcacttgggctcctctccctctatttcacactcacagtaacgggtggccctggccctgcgccggtcacgccccaagccacgcacttcgtgaccccagtgaccccgggtctttccctcacacaacacacgcacacacgctgcctgtctcccacacacagagcccctctgtgtcgcccgctcggcccggcgtcaccgcccagtgtcccagccacacgttcgcccggccaggccgcctcacgcgccgtgtcacccacagtcacgggctgacaccatccagacccccccttggccgccccgcgccgcagccgcgccgaggcgccgccgtccagcccgcaccacaacctggtctcggtccaagtttcccgggccggggaccgctccgggccccgccggcccctcacaccgcaagttccgctgcttccccgcgcgccccccgacagccaccacgcagggccggcccggagtcgcggccggaggacctgcaggtcacggggctcggagactggcggtggccggtgcgcggaaggcgccgggacaggacgcgaggcgggaggagtggggtgggggggcgcgcggccgggctgccgcatccgccgagcccgcgaacttcctcagagacacggggaggcagggggcgccactagggtccgtatcccgctggcccggccgcggagagcagactctggatgggcgctccgcgcgccctccttacctggctgcgccgcggcagctccagctcggctccccgttcgactcggcgccgcggcccggctcggcgagcgcccggacagccgcgcagcctgcgcgccttttgaatgaatcgccggctgggccgggaaggtgcgcagacccgcccccgcgcgtcacggccgctccgcccccgacgtcagagcgcggtctgcgccccgcgcccgactcaccccgagccgcggaggggctcgccgctctgccgctgggcggtgctgctctacgtcgccctctctcgcgcccctgggaactgcagggggctgcgcgggactgggcggcggtgcccagagggcctcttgtatccgcctcttcaaggctctgaaccaagcaaggagttgtgcgaagcaagataaagagactggagactgagatactcctctgggtcctctcagcattgccagtgtaactagagccacctctgcccctttctgggcttcatcttcctcctgccagttggtggccaggaagaataacctcactttgctttgttgacgaggcccaggcccaaccctggaaaccctcacctagttggcgaaaaggcctggtgaaggtgagtctataaaggaagcccacacggtgggcttcggcacatccttcaaggcctagtgaaatcctccaggaggcgtctcctgcctccactcccctactccccgcaccacttctctgtgccagggtagttagtttccctccagcaggacaggtgactcagtgcccccctccctactacagccatcccaccctgccagtttccaatgccagtcatcacaaactccaggcagtattcacactgtattccgactccgaatcgtgtcccctggagttgtgctacagggtgtgccaggactggagggagcagctcagtggcccgttccccctctcagtactattcaggggatctcaggcggtcctcctgggacagtagggctgatgggagactgagacaccagggaggacctagtgctgggccagaggcctggctggggtcaggataatcacagcccatgacagagatggagaaaggaaggtaaataagtcagctggggatagatggctgggggtggggttctaaacagtcatagaatctgaacccaggggctaggagacggaaaaggtcaggtccccagggtccaggagattccaggaggcgaactggacaccgcatggggaggggagcaggggatgagttttcatttccctgggtcatgctcaggttgtgggggaagggcataaggagctacaggtcattgatgtcaggatcatgacatcagcaccctcatatgtcaatggagacctccagggctggggcaggggttcttccagggtcccacatcccagcctacggaaggccagagcatccagaatgcctccactcctggaaatgttttctttgtaaggggaccatctacaccccagctctaggttctagagttcaaatggtggcaatttcaggtgtcgtcactcaataaaccaaatggggaaggccaggtgtagtggtcacacctgtaatcctagcaccttgggaggctgagttgggaggatcacttagcccaggagttcgagaccagcctgggcaacatgatgaagcccagtctctacaaaaatatgtgggagaatcacttgagcccaggaagttgagactgcagtgagccgcgatcgtgccactgcactccagcctaggtgagagagtgagaccttgtctcaatcaataaactaaatggggaaatgctttttggagcactggctattaatcagacatcccagagagggtccaggcccctctctaccaccagctctctg

SEQ ID NO: 915438 - DNA, 4001 bp, Homo sapiens
actgtcccccaccctgtcccccacccctagaatgtaatcagcattttcagaggacgacagcagaagacagaacttccagattctacagcaagtgccaccctctcctagactagggagctcagcttccaccccaccctgcatgaaccccacagaccttcatacgggagaaggggcctcagaagggtcttgcccagatggcgaaagggtaccgctccagctctccagcaagaacttagcctcccagaccagagaccactcctggggaacaagtctctccccactctcccccaacccaaggaactgaagaaaggacacccaggcagagaagtgaatgtctatggatttggggatccatattgtctatggatccatttcgtgacagaggaccaggaagcctttgggtgggaggctaacgtttccttgaccagttttggagaaggctgtgcttccaaccctatcagtagcccctgagtgcagcccctgggccgctgtgtccccaggagaagcctgcccccaccccccactgcagtctttctgcctgaagggaagggagaacacaggcagttgacccaaaacaatagaggatcccaaagtgatgattcacagtccattcaaagcccagcacctcagtgtgcagatggggagactgaggcctgcgcgggggaggggggcgggggggtctgagaacaagattgtgtccgggtccgctgagaatacagattacacaggggcagaactttgccaggtgtagggacttcgatgcgtgagtgtgtggatgcaggtgggcggggggaagctgagactaccacagggcccctaccctgctgccatctgggccaccccaccagatgttgcccagcctcggctttctccctcagccagggcctatccctcagggtccatctcctcaccaagctgaactcctgaggggtgccctcgtggggacagtcctggagacccttgtctcctggctccccaacttcctcatcgccccacatctgccggaaggtgtcctaggtccggtccctcctcctcctgcctcttactcatcatcaccctaggcgcagacacacacacacacacacacacactgacaccacttgaccccacacgcacaccatggcgccagcgagctcggctcgttctcagtcacttgggctcctctccctctatttcacactcacagtaacgggtggccctggccctgcgccggtcacgccccaagccacgcacttcgtgaccccagtgaccccgggtctttccctcacacaacacacgcacacacgctgcctgtctcccacacacagagcccctctgtgtcgcccgctcggcccggcgtcaccgcccagtgtcccagccacacgttcgcccggccaggccgcctcacgcgccgtgtcacccacagtcacgggctgacaccatccagacccccccttggccgccccgcgccgcagccgcgccgaggcgccgccgtccagcccgcaccacaacctggtctcggtccaagtttcccgggccggggaccgctccgggccccgccggcccctcacaccgcaagttccgctgcttccccgcgcgccccccgacagccaccacgcagggccggcccggagtcgcggccggaggacctgcaggtcacggggctcggagactggcggtggccggtgcgcggaaggcgccgggacaggacgcgaggcgggaggagtggggtgggggggcgcgcggccgggctgccgcatccgccgagcccgcgaacttcctcagagacacggggaggcagggggcgccactagggtccgtatcccgctggcccggccgcggagagcagactctggatgggcgctccgcgcgccctccttacctggctgcgccgcggcagctccagctcggctccccgttcgactcggcgccgcggcccggctcggcgagcgcccggacagccgcgcagcctgcgcgccttttgaatgaatcgccggctgggccgggaaggtgcgcagacccgcccccgcgcgtcacggccgctccgcccccgacgtcagagcgcggtctgcgccccgcgcccgactcaccccgagccgcggaggggctcgccgctctgccgctgggcggtgctgctctacgtcgccctctctcgcgcccctgggaactgcagggggctgcgcgggactgggcggcggtgcccagagggcctcttgtatccgcctcttcaaggctctgaaccaagcaaggagttgtgcgaagcaagataaagagactggagactgagatactcctctgggtcctctcagcattgccagtgtaactagagccacctctgcccctttctgggcttcatcttcctcctgccagttggtggccaggaagaataacctcactttgctttgttgacgaggcccaggcccaaccctggaaaccctcacctagttggcgaaaaggcctggtgaaggtgagtctataaaggaagcccacacggtgggcttcggcacatccttcaaggcctagtgaaatcctccaggaggcgtctcctgcctccactcccctactccccgcaccacttctctgtgccagggtagttagtttccctccagcaggacaggtgactcagtgcccccctccctactacagccatcccaccctgccagtttccaatgccagtcatcacaaactccaggcagtattcacactgtattccgactccgaatcgtgtcccctggagttgtgctacagggtgtgccaggactggagggagcagctcagtggcccgttccccctctcagtactattcaggggatctcaggcggtcctcctgggacagtagggctgatgggagactgagacaccagggaggacctagtgctgggccagaggcctggctggggtcaggataatcacagcccatgacagagatggagaaaggaaggtaaataagtcagctggggatagatggctgggggtggggttctaaacagtcatagaatctgaacccaggggctaggagacggaaaaggtcaggtccccagggtccaggagattccaggaggcgaactggacaccgcatggggaggggagcaggggatgagttttcatttccctgggtcatgctcaggttgtgggggaagggcataaggagctacaggtcattgatgtcaggatcatgacatcagcaccctcatatgtcaatggagacctccagggctggggcaggggttcttccagggtcccacatcccagcctacggaaggccagagcatccagaatgcctccactcctggaaatgttttctttgtaaggggaccatctacaccccagctctaggttctagagttcaaatggtggcaatttcaggtgtcgtcactcaataaaccaaatggggaaggccaggtgtagtggtcacacctgtaatcctagcaccttgggaggctgagttgggaggatcacttagcccaggagttcgagaccagcctgggcaacatgatgaagcccagtctctacaaaaatatgtgggagaatcacttgagcccaggaagttgagactgcagtgagccgcgatcgtgccactgcactccagcctaggtgagagagtgagaccttgtctcaatcaataaactaaatggggaaatgctttttggagcactggctattaatcagacatcccagagagggtccaggcccctctctaccaccagctctctgtgaggttttcatcaaatccacccccaactcagtttcctcatctgaaaactggggtgccagacatgttgcctgaagttctctgtgggaggcggctacctggctgccctggcagcagctccatagagtaggtctcctggggccacagcccaaacacttctcgctcctgcaacccccaggttaggagggagcctaattattatttactgctgggtggatgcgccagctcctcctgcagccagctctgaccctgaaaccactgtgacgtgggctcctccctgagagtctaccagcatctgggttgctccaca

SEQ ID NO: 915439 - DNA, 4001 bp, Homo sapiens
gtgcactaacagaaattctaaaatcttaatactgatctagaagaatcacatgtcctagttgaaaaggcagaattgtaaatatggagtcaagttaaagtcaaggttatgatataaagacgcaaacattggcacgagtcaccaaatctgatgggaggacagctggctgtcctacttgttaggagcaccttactgagacagcctgagttaaactcttggctcccccagtaaacagccactgggacctcagacaaattacccaacatctctatgctcaagtgtcctcatccatcaaatgagcattataacaataactaacttatagttgctgtgagaactaagaacaaagacatataaagcacacagaaactgtagctggcatacagtaagcgctcagtaaacgacagaatttatgtttctgtaaatttctggcatggttaattaaaaaataatgtttaatttttaattttcactaggctgtgagatggattactttggttctagtaccacccctaccatgacctagcacattaccttaacccatatagacctcaactttcttattttttaaataaagaagctggaaaaaatgatggttatatttccagtgccctttaaaaagtatgactgtattacatggcatcacgtacttcagccaaaatgttgagatcagagtcagttatcagacaggccatctcaataatctggtccttctcaatgtccaatcctgtcatctgcaattaaaaataaatatataacacacacaaagccatcattctggcctcttttacccaagtttatttaacaggaattccctcaaacatagtcagcttgtaatccatagccgaaacagaagagaaagaatgctcctcgggcaactactgaaggtactaaacacgagtcctcgtttattcaacaaacatttaccaagggcctgctatttgtcaagcactgagattctactccgggacagatgcaaagtaagtaaaactgagtgctgacatcactcagttttggaagagttggataactaccaccaccacgtctctgcagagtttacaaagttttcacattaattacaccactggaccttcacaatctaatggaaaaactactgttattatcctcacttcatataaactgaggctcaacggtgggaggagcccttgtttcgggcatggaaagcctgaagggataggaactgggttctggtctcaactcagactctcactaacagcacgaccttgaatgagttgaatcctttctgtgggcctcaatgttctcacttatggaatgaggggtaaggctgagtcatctccggagtcccgtctggccctaacaacctagggtcctttaaggatttagttgggggaagctgggaacagagccgctgcccccgcccccactccagtgacccaagcccagagacgccagagcgttaggaaaagtccacatctgggcggaggggtagggaggagaagaagccacacggaggactcctcccttgtggaaagaagccctacagcgcagcacggcgcccaacacccgcaggactcctgcctccggacttgccctgcaccgcccgtggccggccgcgctcacctgccacacctgagacccagacccccaacgctctcccaggacgggctcgactcctcggttccacgagcgaaacctcactcgcctccccaagccccccgccgacctcactcacctccaggtccacccagaccatccgctgagccatgctctcccctgccgccatggctgcgccaccttcgcggacacctcgggccccgaaccgtccgtgactcccacctacaccccgcaacagcctggagcccagggagccgcctagcatcacccgggaccagcagccacggccccagtctcgcagccggcgctggcgcaggcgcaatagtcgctaaacgtcgcaaacccacggggaggcgcacgagctgaaaccacacgtcccagcgtacggtgcgccggctcgccctcaacagcctggcttggctgccgaagggaatgatgggacttagagtctcacctgcggttgcgaccagatgccccacccccgccacgtgtttttctggtgttactggacgcgcttgtttttcactgctaagtttgtttgcttccaggagttatttcctgagttttggttagttgtaaccgcgcagttaaaaaagaactcttactttggttggttggaaaagagctgattatctctgtatgacatttttttcatgtatatctttccttctttgcatttctttttctttttttacttacctgcccctctattccacaaactggatattttcctcatttatttgggaccaagaggcagtgtgcttttgggggccagaaggccattaacattatcatcaaatcatttagaaatatttaaataagatcttgtctgagaaatcatttagcacgtatcaggtgttcagtcaaagttagttaccttccttctttttcttatgggaaagcggtccagatccagacccaaagagtgggttcttggacctcctgcaagaaagaattcagggcgagtccataaagtgaaagcaagtttattaaaagtaaagaaataaaagaatgcctactccataggcagagcaggggcatgggcgaccgagtatacttacacttatttcttgattatatgctaaacaaggggtggacaataccgggaactgagggttctccgcttttagatcatatagggtaacttcctaaggttgccatggcatctgtgaactgtcatggcgctggtaggagtgtcgtttagcatgctaatgtattgtaattactgtataatgagtagtgaaaatgactagaggtcactttgtcatcttggttttagtgggatttggccagcttctttacagcaccctgttttgtcagcaaagtctattgtgacccgtatcttatgctgacttcctatcccttcctggcacttagaatacctaacctcctaggaatgcagcccagtaggtctcggtgttattttacccagcccctattcaagatagggttactcttcaaatgcctctgacaatttggccaaggattatcccttatttcttatgaaatgcggcctgcatttcagttcacctattaggtgtctgcatgatgacaacttgctactctgttcttaaaagttctcaaagttaaatttcgtcctcctataacaaatctatgcagcaaactaacttaaaatgaactaaaacagttctgcctgctctgccatcttcttgggctttgatccaggtgtctttaatctcctgcaatgactgctataatgtctatcatttctaggagtccaggtggccagcatcaggacctttaggccctggagtgtcaaattttgtgagtctcttaaatcttggctattcagtaacagatttgtggcagagtgccgctttgtcacaaatatcaatctcggctttgaattataacctctatgtatttttctgaaagccatattgctactcattacagagcttgtggtccatcctacctggttttatgagagagaaactttgttgcctaataggagctttaaggaaagtgtagggtactggatttcaccttctactgattttgtgtacccaacccaccacctgcaagggcctagagaaactctttgaagggccatcaaaaggtatgcacagattatacacataaagacttactgtgcacaatgcgtatatattttacctgcattgcctgatgtcgcattgttttactatacctttttactcatttgtggcctactttatgaaaaatggtgtgcatttcttctttagttttttcttagctttaaactcaattcatagaaagtagagtcagttgaggccaggcacggtgactcacacctataatcccagaactttgggaggctgaggcgggcacatcacgaggtcaggagttcgagatcagcctggccaacatactgaaaccccgtctctactaaaaatacaaaaataaac

SEQ ID NO: 915440 - DNA, 4001 bp, Homo sapiens
caagctactaaacaaaagtggctcaatgccactgcagcagaaagcacatgggccaagggtgggagacaggcagacagatatcatcctgataagaactacagtgtgataagaactggggtaggcccgaccgtcctgcttgtgctcagatgctccagcacctatacaaccccaggggcttagaggatgctgggaagaaaaggaggaagaatgccagttgcggtggctcaggccagtaatcctagcactttgggaggccgaggcgggcagatcgcttgaggccaggagttcgagaccagcctgaccaacatggcaaaactccatctctactaaaaataaaaaaattggctgggtgtggtggctcacacctgtaatcccagcattttgggaggccaaggtgggcggatcaccaggtcaaatgatcgagaccattctggccaacatggcgaaaccctgtctctactaaaaatatacaaaaattagctgggcacggtggcacgcgcctgtagtcccagctactcgggaggctgaggcgggagaatcgcttgaacctgggaggcagaggttacagtgagccgagattgtgccactgcactctaacctggcgacagagcgagactccgtctcaaaaataaaataaaataaaataattttaaaaattagctaggcgtggtggtgggcgcctgtaatcccagctacttaggaggctgaggcaagagaatcgcttgaacccaggaggcggaggttgcagtgagctgagattgtgccaatatcactccagcctgggtgacagagtgagactcttctcaaaaaaaataaaaataaaaaaaaagaagagatgctggaagcaactccatggactcccaggacaacagggctgagaggcggcagagcaggggccgcctggtgcccgtggagtctgcctgggcagtcagtgagcatgtcaggaaggattaacggtgggcatgcctacagcgccaaggacatgccagctaccgcacgggagctgcctgtcagcctcccctgggctccacttcaccactgccctacagtccctctaccccatggggttgttgtgaggaaactgaggctcagagaagctaagcaggttacaaaagggcacggggctcagaggagagcagagacgcgggcccagcagctgaggctacagctggcgtgctcccaccctccaaggcagagcccatggcatgtgctttccagcggcaagagctggaagggagacaatgtttcccaggagcgacatgtgccaactctccgtgagtccttcctgtgcacaggccggggctgagtgcttgaggtctattaactctctgtcacagtgaccctgtgtggtgggcactgtcactcacctgtgatgtagtgagggacacaggcacagcagggttaggggacttacccaagggcacacagctataagaggcaaagccataatttgaacctcggcagtctggcttccaagctctcaggccctcagcggaattgtgtggccaagtgctgtcttaggatcttgtgtgcacccaggtcgcctcactcagtccttgtgacacctctccccggtggatgccattcctccggctttacagataacatcactgaggccttcattcccaatggctggggcggaagaactctgccctggaccccaggccccgctgggacacccctcggaggccgggttaggcgcacagcctgggccgctccggcacggacctgtacacccgggcgcgcgagcggaaccgggcgaggcggaggcgcggggcactcacctcggggaaggccccatcggcgaagaccatcagcagcgacgtcttcccgcagccgccgtcgcccaccaggaccaccttgacggaccgcacgcctggtggcgcctcctcacccgcggcctgggccgccgtcatcccggggccgggcgctgagcgggcgggcgggcggctgcggcgcagagacccagactgcgcggggcaggcccggcggggcaggaatgtggaaggggcggggcggcgggaggaagtgcgagccgggcgccccgagagccaggtgagaggcccgggcggctgggctggggcccttcctctccaggccgtctaggtccctgaagaaacgctgcccgagcacctactgtgagctggccgcgctggggccacgggaggtcggaagggagaagacaaacagcgggaccatgacagtgggggcgggggtgtgctcaggggctgggtcccagatcccaggcaggagccagtgacctttagtgaatgaatgaatgaatgaatgaatggtgcatttccccaggggtctcaggacgcagcacaacacaggcgtttcatgccaggtgggaaggggatgacccccttcactggccccaccaggcctggcctgccccctcccgcagcaccaggaagctctgctgcaggtgggcagccacctgacaccgtggctggccacgatctagggaaagcgatagaaccttccctctgtaaagtgtgagtgtttcttattattgcaccatgagatgtccccctggtgcccaagggcccggggaccctgaactgtttaagacaaaatccaggccctgccttgagaagcccacggcttagaatggtagacacgcaggacatcagtgtgatcagaactacaacgggagtagggacaggcagcgggacgggagtaggggaaaagagctcctcgcccacgttgagggagtcaggaaacctttcagagtcttgaggaaaaagtgaaacacagtcagatgggggagggaaaaggtgttccaccggagacagcggcacgtgcgaagctgcggaggccggagcggaatgctgcccccccaccccgcccccgcagagggtgaggctcgcttgcacagtggtgcagcatgaggagctggtgcttgctcagtggagcacgttggatgccagcagtaaatccagcattgaactgggaactcattgtcacctgatctctccacttctcctaatggccagagttgaaatcttttaaaaatgggcacaagggtcttcccagatcttggactgagtgtttctattgaagcttaaaagaacaaggggcagacgtcattaggttccccctaatttatgctggtcatgacatcccccctcatggagttccaagtcaggcaggtgaaaaagcaccttcaacctcctttaaactcactgtggtctaaagaggcagccagggcaggagtcactaggtggagaggcagagcccagctccttgactcctctgcccggctcccgctccgggctgtggtctgcaggctggatggagccccacttggagggaaggatcctccccagcacagctctgcctttccaggtgccccttcctccccgaaactgccacagggctcggcagtgacttgacactgggctgggcaggtagctccagagcagggctccccgccccaaggagtggtgagaggggccccaccccctcggatcagctgtcagcatcttcctcccaactgctgctgtcgtcaggccttgggtggcaaggctggaaggcaggtggggccagactgggggtggagggagctgagagtcaggcagaggcgtttggccttggttgctatagggataatctctgtaatgacacacttgatgtttgtcatgctatacagtttcactgaacatttcctaataataacaacacccattagtggattgcaagccacgtgtaggcactgttccctaggaggtagggactcttagctccatttcacagatgaggagcctgaggcccagagaggctaagttgttgactaacatccacagctagtaagaggctgaactagaatttggatccaggcgtgaccccaaagccaggtggtctccctccatcacgcctcatctgcacaattgcaatttcatttagctctcagaccacgaggtagaccaagcagatgacctgcttcctcccattttacagatttgggaactgagcctcagagagaggcagaggggtgt

SEQ ID NO: 915441 - DNA, 4001 bp, Homo sapiens
atgcagatcagggcatgcgggtacccagcctaggcaggccccagaaggtagcaggaaaggagcagacacttttgcctccgccgcttcttaagtccgaagttagaccagctgcagtctttcctccagaatcctgcatttgcctcctccctttatttccatcacacccaagctggtcccattctttccaccaggtgatgctggaactagtaggtaatggagtcagggaccttcaggctgtcttccggcttctaggcctggcctcttggtcaagcaccacgggttggggtgattttgatttcccacggcctctcttacaagtcttattcctgtgtcaccctaccctgactgctacaaacggcttcctcctgcctaaccacaacctcactcactgcaggttcccttcattctgctggcttcccttgctctgggccctctcaaggctgagggcagttattttgtctgtaagagataaagatgtagtcacacagacacgcgcgcgcgaacacacacacacacacacacacacacacacacacacacaggctttccatctctttaatccatctctaagagatgaagatgtagatacacagacacgcgcgtgcgaacacacacgcaaacacacacacacacacacacacacacaggctttccagctctttaatccgtctctatcactgggaggctgcagactgcctctccaagctagggaggtttgaaaagactctagaactcactaagtcttcaacaactgattccaaagctggagataagtgggtgggagggaaggatacagagagggtgacaggctgagggttcaaaaggaatgaggggtgatggaagaaaccaggaggtgcatgtgtgtgggtgccagagctgggaagggaagggatggggcaggttgcagaggaccaagacgaacatggggcagggtaggtgaagacaggtcaaggcctaggtatgaccgtatgtttggaggaaaagagactggaagggatgagaagagagtgatggcggatttgtgggtagaaactaaagaaggtgtggagggagacgacaggagcatgtgtataattcagggactaagaatgaagaggaacactaggagatggttctcaattgtccccaaaagacacaacaaaaacttgtcagggactatcagtacctctgaatgagagtccttccacttccagttacagggcaagaccaagttactcccaaaagagcaaggccaggctctggtcagctaggaacagcgtctgctcactaaatacctactgcttggctccaggtaaggtcgggactcaggaaaacagacatacagacaacgactggggtcggcggggctcccccacccaacccgggtcctcctgagtgcagagggccttggggctgcagaccgagtgtgggtctgtattagcatccatctgacagggagagagctttcggaggccccagacaccgcccctctcaccccaagtgtcacaactgccagagcagagggagcgccttttccagcccagaagccctctcccctcacgcacttctcaacaccccccccaccaacttctgaggacaccccacctgcgtccgatctcccagctctgagctcttccacttcagagacacttatcttggagcccgggaccctccgacctcaggggtccctctcggctccctagaggcggtacagccgccgggaagccaccctcgccgagcctccgccggctcgcagtggccccgttcccgccccgcccggccggccgcgcccgccctacttggactgaaccgagaagctcccgcccgcggcctccgccagcaaactcatgagccggcgcccgcgccgagtcctgggccggccgggctctcctcccccggacccctacccgccagccccggccgggcctcacctggtgccctccccgaggcgggggagctgggggcggcggcagcggctccgggctcgagaaggaagtgagagcgggaggccggaggaagtggggggggcgggccggcgaggcggggcgggccggggcggggcccgaccaggaagtccgagggccgatctccccctctccagccccggcccgcccccagcctcgcccccggcccagtcccgggcttgccacgttcccctcccagtccgctgcccctgcggtcagtaagtcaggcctcccaaggtcaagtctctccgcctcctcctggccaccctacccctggaggccctaccctgggcgctaggcgttcgtcctcttccccccatcccgcccccaccagcctccgcgggaagatgctgagaaaggcgcccctgggcctggtcccttcagtcaaccccagggatagagtggtggccgaggctggggcagtccccgcccctgccctgagccccgggggagtgcgaggtggtggtgattcagcagtgggaaggccccagacccctggggagggtggggagactcggggggaagaggagctggcgtcagcacccaagggaaagacaagatcagcagaggcgcaggcggagccgcgggccccaaaaacaggatgtcgagtcgtcattcagcaccgtgcagccctgcgaggcctggctctggggagggggcggggcggacggaggacttggggcttccctcgccccctcgccccctgttctgctggggcgcgcagctgcttggggctgaagagccgcacccaggcctgaggtccagcttgggccccggcgacccgcgggtgggcgggctcatgggcgccctctggtgcttcgctccctggctttgcgctcggagctttgacttgagaatccatatccttcgttcagcacaaagtttctgagcgcctaccacgtggagagagctaagtgctaggtgctgtgaagaaacacagcgtttaagacaggatccctgtcttccagaagcttttcaaataaacggattgattccaggaataaatagcttaacctttctgagcctcaaatctgtctttggtaaaatagaataattatatttcaccccgtagttttgaagataacatgagaatgggtgtaaaagacctgttgtcaatgcgtatctcaaacactaaacaaatatcttttaaaaatatcataccctaagagtctggcgcggtggcgtctgcctgtaattacagagatggtgaaaccttgtctctataaacacaaacacacacatattttttgacagtctcacgatgtcacccaggctggggtgcagtggcacgatctcggctcactgcaatctctgcctcccaggttcatgcagttatcctgcctcagtctctcgagtagctggggttacaggtgcatgtcaccacacccggctaattttcgtatttctagtagggacggggtttcaccctgttggccacgctggtctcgaactactgatctcagttgatccacctgccttggcctcccaaagtgctgagattacaggcgtcagccaccacacccagcctacttatatttttaaaaaaataaataggaaccacgtaagtaatttaaaactgtctattaatgacatttcaaaaaaagtaaaaagaaacgaaatgaattttaactatatttgacttagccatagccaaagtattatcttttttttttttttttttttttttttggagatggagtctcgctctgtcaccaggctggactgcagtggcgcggtctctgctcactgcaacctccgcctcctgggttcaaatgattctcctgcctcagtctcccaagtagctgggattacaggcacgtgccaccatgcctggcttatatttgtatttttaatggagataggatttcaccatgttggccaggctggtcttgaactcctcacctcgtgatctgcccgcctcaacctcccaaagtgctgggattacaggcatgagccactgcgcccggcctcaaaatattatcttttagcatggtaatcaacataaaaattactggttataaaaattaactggatattttgcattcttttcttgtacca

SEQ ID NO: 915442 - DNA, 4001 bp, Homo sapiens
tactggaatgtaccattcaaggtaagttttttcctaggttatactacttcagtagcttctccttgtcaaaaacagaatttacagtattggtagcttaataatcttaaagtatttattgactgcccattatatgccaggtactgaagaaacagtggtaaacaagacaaagtccctacccttgcaaacttacattctagaaggtgaagacaaaaaaacaaacaagtaaacacttaagaatattccatatcatatagtgatgcctatcatgaagaatataaaacatgataaaatagagaatgatgggagaaaagagttattttagttagtgtcatcaggggaagtctctctgaggaggtttcatttgagcagaaatttgaatgatgagaagggcactgagggaaaagcacagcacttcaggaataaagagaactgaaggtacaaagatcctaacatgagaacactgaataccaacacttgagttctcaagggaacaacccatgtctaatctccactctacattttctacaacgttcagaagagtgtctcccactcacagtcaatagtacttgttcaagataattcaccataatggaaagtaaaaaaaaaaaaaaaaaagttttcgaagaatcttcactgttcaggatcatcatgaattgactcttcttcaaagtagacaatatcattagacaaagcaggtaaaaatctttgggattattgcaataagacagaaaggaaaaaaaaagaacaaatacgcaaagatgttttagaagtccgtcccaagtggatagtcttacaagcataaagattatcaggcaaattctgtaaacagaattatgtgttcaacctgccctccacccctaaagcttggtgctttgcatttatagtgtgtatgatgctcaagagaatggaactacagtcaatgtgcataaagcagacggaagtggattacagttcaaaaggagctgtccagcaatcaacagtttaaacattactggaagtgttcagacaccgtaaaatcatgtctcaaagatattacaaggataatttacaggagaaagttaccagtagaacttcatgacctatagaaaactgttctggttccttctcccagccttcagcaccgtgcctttacactcattctgtaaaaggccccagtgcagctaagaggatgaatttttaaacaccacatacatcatgccaacaacgaagaattaacagataaatactgtttcaataaggggaacgtaataatttgttcataaccacctcagtaactgaaactggggttattaaaatcttcaagatatatttttaaaggcacaagaagagcctgaagcagtgagcgcccagcaccaagttgaaaaaacataacgacttaaggtttgctgtaccaattccatttgccttgatttcgtaccaagcggcgcgtcagaaagtacacggaaaacctaaagagggaaacccaactgggaacccttgactcaaagcacgtgaacaaatggtgacgagatgagttaagccagcggggtaagagagaagggactgcgcctaaacgggagtacgcaaggccacctagaggatgcacagacctgcatgcatacgttcctgacccttccagcagcagaaccatctgggccgccacccgctgataacaacggaaccgtgggcattggcccttcaacgccgtctcgcccgccctctccagtcagtttggtggatatttcggtgaaggctgcagactctcagagtcacccctccctcaagcagcgttctccgtactcttcggcgccgggaagctcagagggagctggcctgctcttaccttcaggtgtcggcggcggctcctgccgcttcccgcgggacaggaaggccttgggcagcagcagcgacagagccaggacaagcccagaagccagagcgactctctgcactgtggagtacgccatgactgctcacggtggtcgcaggtgcagacgccagccggaaccggaaccggaaccggagcacgggctgccgctcccgaccgaaccgcgggcggcgcggacggcgtcgcgcgagggacaaggtgcgcgaggcgcacgcatcttcacctccactgtcgggagttgacctgctcctcccgcgtggttacccgtcgctgtaaatggtaccctcgccttcccgttcatactaactaaaaactcctccctcactccccatgttcatcttttactgagtcctgtgcattctaccgcctacacatccggcggtcgtgcccggatctctatccccacttaccaccactgccccccacccacccgtagatcacaacatccagtttctcctcatctccatgatctcgctgtcttccagcttccactcatgcccctcgcattcattatccgtctgcagccacaggtgataatgctaaaacacaagactaattctctttctctccagcttaaaccttttaactctccattatcttcagaacaatagttaaactcctttctataacctcaacgccctgcatgatctggtcttaccaatgctccttccaaactggatgatttgctatttctttagcatattgcttgtcttcagggaagctttgcttgtcctgttcccactgcctggaaaattcctgacaccatctccagttgtcaaaaacttctctgaagaacagcttaaaaacactgctctctcgaaacgttttcagtcagcctctcctttctctacaatcccaccgttctttgttactctcttcattcgttcatttaacattattttagtttttactatgtattagaccctcaacttggcactacagggtctgatgaataaaatggattccctttgtaggacagataattatccaaacaaaaaaaatgcaggaaatattctggatccccgagcagtcttctcaactggtacgaggaaaagtcaagaaaagcccctttgagaaggtgaaattgagttagctgttgaaaaatgagtaacttataggcagacaggtgggaggggttagaaaggtattccggaaaaaggaggccaaaaaaataaaggcaaatctggaagcttcctggtgtgttcagaaagctattggtaattcattttggcagggccatagagtagtgacaggacacgaagtgcacaaatataagcaggagctacattgtgaaaagcttaggtagaacttccagttaaacatgacagatgtaacatatgcatttatctttgctttcctgggacagtgcccaaaaaggaaaataaagaaataaagtatataaactacaagactaaatgcaatgatagaaaacatgacagcagatgagaaatgtcaattttgtaagacgcacacaacactgtccaatagacacataataccagccacatatgtaatttaaatttttccagtagccacatttaaaaagtaaaaataagtaaaatttattttaataatattttaaaccaagatagcaaaaatatttcaaattttatcagcacgatagtgtggctcgttggcgcccacagtagacagtgcaggtgtagagcataaaaagttaaatgcctgtggactgaaagcctgtaaggagtgaactaatttgcccctcagaacccatgctcttaagaattggaggtactgggttcctttaaagccaagggtgcagagtgggtctgaatgaaggattggctggaaatctgattaaaaagcagttgagactgggcacagtggctcacacctataatcccagggctttgggaggccaaggctggaggatggcttgaggccaagagttcaaggccagcctgggcaacatagggagagccctaatctctaccaaaaaaatgtaaaaaattaaccaggcatggtggtgtgcacctgtagtcccaactactcaggaagctgaggtgggaagatcacttgagcccaagagtttgaggctgcagtgagctatgattgtgtgaaaccacaattaattatgatatataagatgataataatgcctgaatgaagccag

SEQ ID NO: 915443 - DNA, 4001 bp, Homo sapiens
gcagttgcggtcccgggacaggattcggacactctgcagccagatgacacggtgggagggtggcaagccctgttccaggacggagaccagcagctccgccagtctctgtgggcagggagaagagcggctccaccaggcccttcttcctggggccacccgtccctgcccctttaccccttgggccagcacccaccttccggtcctcctgttgggcatcatcaaacgtgaagctctgggagtgctgcagagagaactagtgaattcaaatccacagaggggtaggatccgcgtccgctgatgcgggcggcctattggcctctaactcaggcagcagccactgctcagaacggatggcagggtcggcactcgcccccatccctacacgcctgccacccaacgggtgcacccccactctccccgcaacactgcatcccagacctgccccccgcaccccgccgcgtcccctacgcttgctgacacagcctctgcctcacccacgccctccctgctacccgcgcacgaccctgccccaccccctccgtgcccgccccccggcctcaggcggccgcttacctcctggttgtatgaccgcagagcttccataatcacatcctcctcacccgtctccacggcttctgcaaccgcccggggctccatggcgcgccggggaaggcgggacgggcccttcctcagccgttccgggccgcagttcgccggccccgccctggcccagaaagccccgcgccagcgcgcgggggaggccgggacggggcgcggcgtctggtggcgctttaacggggcgcagcgtctggtggcgctttaagggggcgcggcctgaggcagaactggcggctcggaggttttaagacccgagtcgaggggctgagtcgctctgaaccgaactgacccctctccttgtgacccgcgcttcttgggccagaagttccaacaggaaacgatctcagcccccaccgtgccctgccacacacacagtgacgcccctcgagctccacagaaccgatgggatgtagaggggaaagccgaagtggaaaggaattttcagtcctgggccattgggttcgttaggcgtttgctggggaatgcaggcgaacgggattcccaggtccctgcctttgtggagcttatgttccagaggggaagggggacaaggaaaaacaaaaggacacgaggcggtcacagggctgtgcttcaaaagaagcaaaaggcgactgctgggctgcaacgggctgtgaggaagtgctgtttttgctgacaccggacggtgggaagtgagccgggaaaagactggaggagccactccaggcagaaggagcagcacttgcaaaggtggaggggccgagagaaaggggagcaacccagtctggcctggactcagttccctcttgaaaagcaaagatcctgcgtgtccgtttcagtggccgtcatgaggattcagtgacgcacaggaagcgcgatccactcgctcttctaacaagtgcccgggagcaaaggcgtctacggcccccagtccccgcgccgcctcccagtctctctcccggcttcactttcctgtagtgcgttctgtacggctgtattcgacgcggcgcgcactcgcaggcacgagcgaggcgccgatctccacttgacagaggaggcacccctgcccccaccacacccagtgctcctcgcgggcttctgcccgaggggtctgctccttcctcatgacccgcctgtgaatccttcctaaccgttaggacctaacccacagaagcgtctttccaccaccatcgtctaggcactgagcaagcaaacggccccgccccgccccacgttcacaggaacaccaaacgtcacatccgcggtgctgctgtaatcccagcaccttgggagcccggcaggcgggggctgcagtgagctgagatcgcgccactgtctgcgcgacagtgctgaaaataagccacagatatgcccatcgcttccgcgcccggcagttccccaccctcggccctaagccggaagtcagcgagcccgaagcggaaggggctgggctatctaggggcgtggtcggtgcggaggcggggccatcgctagctgggggcggggccggaagctctttccccgcgactgcgccacgtctgaggcggctgtggccgcgtcggtgtccgcgtcgaggagccggggcagggcacgatggcggactgggctcggggtgagcgcgggagagcggagccgttgggggcagggccgggccgaaaccgacgccgctgcctgtagagccgcgtgcgcctgcctctggcccagctggggtgacctcggccgagaggaccctgtcaggggggcggattcggatccttccgggtccgagcagggccgggtttcggccggcactgccgttaggaccgaaggcgcgcgtggcggcccagcagctccagcgaggggtcgcgcagcagcggggtctccccactccccgccgccccctgtgagatcgttctgcatgggttcggggtgagcgggagtcggcattcgacaggtcccgaggccaggccctaggagtagaggctgtgctccgctggtgtccaagcaggactcttactttggcctcggtggccccatttcccctcctggagcccgtgttcttgtctgcaaagtgggatattgatgcctgtctctgtgaggtgttatgatgattaaaggaatttataaatatgaagtggctggaaggacgctggcatcccttcctgacactgaagctagggaggaggtggttctcacgcacctgatgtgacagaacttccttatcccctggcccagcctgtcacaggccaggcctctgcgagcactctgccctgggtgttgcaggaagccccatgcgggatgcagaccaaggatcccgctcctggtcgacctcagctcccgtctcggggaaattgggaactttgctcagccattttctgtgcggtaaagggccttcccaatgttctgtcctggttccttgccacctcttcaggacctagctcaaaggtcgtctctgcaggagcctttctgctgccttgctgggtacttttcccaagtcttttctatgctcttagcagagtttactctttttctataagaatgggctccacatacacagatggtgacctccctggatgcaagtgtcacatcatactagcaccccagggctgggtccagtttttgctacacagtctcagaaggtgctggttggaccgaacccattgtgggtgcttgcccatccccaccttgatgtgtacacaggacatgtgttcacatgacaggcccttacacacatcgtcctttatgcagcctgtctcatgtgcaagattcacctgctggaaccttggttagggccccctagatttctgactcacccagatgtggttggagtgagaggggtcaggggccgtgctcaccgatggatgcaacccttcagcccctctcttttctcagctcagagcccgggcgctgtggaagagattctagaccgggagaacaagcgaatggctgacagcctggcctccaaagtcaccaggctcaaatcggtcagtggtggtctgtcctcttacctccacctggtgcctttggggaatggggatcagagggaaggcagagggcccagaggagtttcaggcagttttccatcctcatccaattcgtggctgtgctcacctgcatgaggccccagctgacacctggacctttctgtctgctgcagccccactgtgtctggcagagttgttggcagggtttatctggtctggggagggtgagtgctgtattatgtgtctgctctggcccaaccctgccctctctgtctgctgaacagctcgccctggacatcgatagggatgcagaggatcagaaccggtacctggatggcatggtaagggcccacggtgtgcgtgtatcagtgccctgccctagcactacctgctgcagagcctgcagtgtctccttcagcactggtgcgggtgggtggtcaa

SEQ ID NO: 915444 - DNA, 4001 bp, Homo sapiens
cagcagcttctcagggcccagctccgcactcagcatggcccgggcccggctcagcgcctgacggatgccctgcagctcctggggctcgggcccagcccgcacctgggtcagtaggtcctgcaccagctggcccgcggctgtgtgtcggtcctgcatcagtgctgccgcagcccggcccacctgccgctccggtgccagtagggagcagaaggcggcgctcatggaccgaagcagaggtcgtcggcggcccaggtggggtgaggtcgctgggctcccccgggaccctggcaccccctcctcctcggagctgctgggggagccgcagtccacctcttggagggagggcataggcggaaggctagggccactgcctgctggcacgcggtaccccactgagctctccctccgtagcagctggcaagggggcagccgctctgtctggctggggactgcccctggcagcacggggacggggggaggtggcacggcaggtggagacagggggctggaggtctctgtggacacgcgcactttgaagcttctcttgaatttctcccgcttggtgggccctaggtcccccgggaacagggggttgaagaagcacaaggcggctccggtgccctggtccagctcttgaggggaccgggccttcagctggggcaacactgggcctccagccgggccccgctgagccttgatgttgagggaggagctccagaactctagggaacaagaaaccgactggggcctccgggactggttaggggaagtttcccaaccaaggcaaggcaggggcttcgggcggtgtgctgcgagccttgccttcccctcggcctcagcttgttcatctgtgcaatgggtggcaggaagcccttaccaatgcccagatgggagatggcctccagctctttgtgagtggctgcgtggtggatggctctggggagctgcagcgggaggagaaggatgtccctgaggccagagaggggagcagaagggagtgagggccgaagagggcgggaaggatgggctgtcccaaggagcagggcccgtggacaccaggcaccctgcgggcagactcaccgggtgtggcagtaggcacagatgagctggactaggtctgggaacatgagctccgagccctccaaggagacgcctgagagaggagggaagtgaggtgcttctctggggaacctccctgcttccagccccttcccgccaggccagcccctcaccgccagggctctccaggatgtagtggctggagacgaaggaggggccactggcttcaggcaaccgcatgcacagggcctggcactggcgggtgttagatttccgcacgaggaacgtctgcaagtggatagggctcaggcagctcaggaccttggcgtcccatccctctccctcccacccctggctggccagtccctggagtgtggggcaagactcacccccgggggctcggtcctcagcatgtgcagtgcggccgctgcgttggcttgcagctgcagccacacgggccgggtgagcagcaggcgctcccgcaggctcacaacgcgccccggccgctgcggcccgcctgcctgcccgccgctggcattgggcacgtcatacagtgggtcctgggctggcctgggggcaggcacccagatctgagcagggagccaggggctgggacccttgctctcctcttccccactcccgggtttcccactttctctatccccggataggccctcctctcgcagcccctccctgccccacctggctgccctgccaacttcactaacttttctctcgccaggtgcccagtagtgaagctggacgggctgggggctccaggagagcccgcgcctgactctccagggctttccatggctgggagctccttcgcttcaggaagagaatccagtcccaaggcaaggcacgcacatccccagtgagtaacacttcctgagggcggtccgcctgtcacacccgccagttaactcttgtgtgtccaccctgcctggccagtgcccgcctcctctgttctggaccctgctttgggggtcaggggtcccctccatgctagccctgctctgagggccccagctgggggatgccacctccacacacggcctcctgcagcctcaccagctactcacattgcacacgtgggcgggaagtggttaagcggcctcagtccccacaggccccagccatgctctgggggcacctttggctctgtggtcagttgctcatctgcccctggcctcaggtcagccttgtgggagagcaccctctactgtccatagatgactcattcctgaacctgggttttaggattttaggttgccatggagaaaatatgccatgtctccatggaaaccaacctatttgcttaactgaggttctgggggtggttctgacactcagtgctaaccagggggagtctggctgtgaggtcgtcagcacatggcggtgctgccggctgcctcccacgcacgcaggctctgccagcctgccttgccaatctgccaggcaactgggacaggtgcagacatgacccaggctccaagcacacgcatccaccctccccgccgaggcactctcccggtgccatatgttgactctgcccagcgccaggcagcccagcgcccacctccccctccccagcctggccccacgcacagtgctctagcctctgctgggtagtgtgaggagtggcaatctgcaggcaccctagaagtcggcctggttcaggtgctccccacgggagccctgattctcttgcaaggtaaatcacacacacacacagggcacgccagagtcccaggaaaggttttaattccagtccttggaatctgagaagcagacaccaagaactgccctgagaacacctggggggcctggcatcttgcctccagatccagccagggtggacagacccccagataatcacgtctgactcagagttcccgcacagtggaaactggctccctggccctgaggccggacagcctgcatccaacatcagcaagaggatgtggctttgacttcggctgtcttctctgtcaggggagccccaagagatggatcttcaggagtgggaggtggcaggcggctcagggatggagacagcagccttgcctggtcaggtcagctccacggccacagctgtgcaggcctcgaggagggcagaggaggagtccaggccagtgccagatggagtgggagggcccagcagcaccacaggagcctggctgggcagaccctgaggggcctgtgggtccgcctgtctgcaggaggaagacgagaatcctgggtgcagtgccagctgctctgagggtccccctggctgtgaacagcagggtcaaggtcctgtgcatatgtgggaagaagaaaactgtcaccagttaggaagctgaaaggaaggaggcagccacttactgagtggctttgggctggcccagaacaggcctcctgggcagctccacagccctccctgacccctcctgagtgggagctccatcaacccagagcttccccagccccatcctggttcctgctcctcaaactcccacaagcccctcaaatctagaccatcctaactttcttgagccactgattctgacacagtcacagcctttctctgggctccttcctggaagctgagctgaggaaaggtgatggcaagggggcagggaaggccatgcaacagccatggttcttaccatccgattttctcttctgaggggacacagctgccctagcctgggtgggtgagaagaaaagctcccctgagagcccacctccagcttggcaatccctgccccaccccccacctctgtggcttgtgggctgttgcctcagtgctgtgcccccaggaccgggagcataggccccacccaggcagagctcccatgctcctgactgctggccagctcagcggctctcccgcctccccgccaccctcccaccccatcaaaacctgccccagaacgggaaggggctgacacaga

SEQ ID NO: 915445 - DNA, 4001 bp, Homo sapiens
catcaactactacaaggtagggaggcaggcaggggagacaggtgtgtgggatgcagagtgcagtcctctgtgggctgaccacctgctgaacccatctcctctgcccagggccagtacatcctcacactgtcagaggacatcgtggatggccatgagcgggccatgctcaagcggctcctgcggatcgactccaagtgtctgcacttcactcccaaggactggagcaagagggggaagtggtgaccagacactgcccactgcagtgccaagacggcagcaggactggggctgatagcccaccccgcccccactgcagctcccacaaagcactctaagggagatggggctgaggacagctcaaaaaggagaggacaggcctggcaggggcccactggtgcccagcaccaaggcgagctccgggctcagaccaactccaaggtcagctggccacaggcccaggcctcctctgaagcagggaccagagggagccaggcagctgtgtacagtgagaagggatccggatgggggagctctgtacagagggctggtgattgtaaaaatttcttttgtaaagtagaagttgggggtggggtgggtgctggctgcaaaaatttctggcttctcttacccctattgcccccggcaataaattgtttctatatgccagagccatgcaaagttcttggtggggagggggaaagggcccatgctggcttaggggctctaaggcgcccagactcacaggtgctgtgaagagctcctttattggggtgatggaatcggttccaaagagctggtttactgctgtgaagggatcgcagctttgaatttcaagctctggttctcagtcctcgggcacctgtgcgtgaatctgcaacaggagtcgcctctactgttggacttgtaagacagggcggcaagctggcccccatacccgaggaaggacccagctgttcagaataaccgcttctagacatgctaggaagagtggtcagggagctacgcttcccacacactacccagtagaatcctccaggctccgtctgcgcaattgtgctccccagcccatccacccgggggcaagacggaactcctcgtctactcaccgctgccgcaaggctgggccaagttaaggccccacgcactttggcatccgggccagggatggtctccagaccccacagggtgaagcggctgaagttggcagtggctccaatgaagcggtcctggggaaggggcctggctcagcatcgggactacagctcccgcccgcaccccctttcaaccctatccctttgctcacgaagtcccgctccagcggctcctcctcttggtcgtcagtcccggaatcccgcaaggggtctggcttccccatcgacaccttcttctcttctgtcaccatcacgtatcccacgaggccaggcggcaccgccacctcctctccccgtagacagcggccccgaaacgacacttcgagtcctggagcgggaggcgcaaagggcctcaggcaggacccacgctgggtcgagcccggagctgccctcccgccacctccggacggaccacgatccccaggagcccaggcgatgagaagcgcgcaggccggcgcgggggctgccgggagccgtagtccggccgcagggctcaccctcggggccctggcggatggcgggcgtgaagaagcgccccaccggggcgggcccgtccaccgcaacctcgcagggcagcagatgcagtgtggcgggtacggcgtcgcgcaatgtggcggagcgcaagtggacgcggtgcctctcgatggccgcttcgtcgccgctctccatcctccctcctacgcgacgccagggctcgcgagctgacactgaagctggcgcggaaagcgcgcaggacctctcaggaagcctccgcggggcctcacgggaagccgccgcggagcttcacgggaagtgtagtccccttaccccctaacgctttccctgggttcaagtcctagggttttccagttgtgttttgtttttttccttccttccttcccccctcccctctttcctccctcccctctccccctctccttccccctcccccctccttccccctcccccctccccctcctccctgcctcccttccttccccccttcccttcccttccttcccgtccttccctctttctttctttttcttatttattattatttttttttgacagagtctcgttttgtcgcccaggctggagtgccaggcacggtctcagctcactgcaacctccgcctcccgggttcaagcgattctcctgcctcagcctccggagtagctgggattacaggcgcacaccaccatgcccacctaatttttgtatttttagtagagactgggtttcgccatgttggccaggctggtctcgaactcctgacctcaggcgatcctccagcctcggccttctgaagtacttggattacaggcgtgagacaccgcccccagccgggtttttttcttttattgtttttaatggcacatgtcgttgtaaaaatctaaaacgattctgaaaagtactctttttatattgattagtaggtaggttattcatttttagtttattagggacatcaacccttttcttaaatgcattgaaaatgttttatctgtggtctgtcttgcaaacctgtgtaaaggtgatttttgctggacaaggacttatttttgtggttgtttggtcttttagacaaggtctcactcgcctaggctggagtgcagtggtttgattggctcactgcagcctcgacctcccaggcttaatccatcccccatcctcagcttcctgtgtagctggaaccacaggcctgcgccaccacgcagctaatttttgtatttttggtagaggtggagttttgccatgttgcccaggctggtcttgaactcctggactcaagtgatctgcccaccttggcctcccaaatcacgctggaattacaggcgtgagccactgcacccaggacaaagactaattttttgtagtcaaatttatcaacacttttcagtcttttagatttcacaattttctctctttggtttctcagctcttctctaatgtttatttgttcagacacccaacttagatatattttttcaagttctcacataaaacaaacacaaaactggaaatttagatttaaattgcgtttaatttatacatccctgcacatctgggagctggccttggtattctgttgaatataaacaatttcagagaacatcagcatcggacaaggtcactctgtgaccgtgagggagcaagacagaaacagaaccactccatcgtcacatctgaatgctggcaaaggtgaacactgtccaaaccacaaaaggcatgaaacatccctctttctcccataagagagtgactgttgtttccttaccaattacagcattagcctccaactaatcttctctccttctgggcaagactcattaagatagtccgtcatagacatacccccacctctgacagcatccaagccagagagaagcctggcttccctaaaccctgactgaaatcactgaacatgggcacaaatcctcctataagtcctttctagcaccctcttattgaaattccccagagtgcaggagtaatatacccaatttgttcaactgcagatgtattcctggtgctctttcactagagtggcagattaatttagaaaaaggcttgctttagttttctatcaggaaagacataattcaatttattcacatctccttggatatctgtacagttgtgaggttttgttcatatataatagctattaatacatattgtaaagtttatttcttcttagcttatattaataattgtttctattaagaactgaggggctgggcatgatgattcacacctgtaattccagtgctttaggaggccaagatgggggaggattgcttgaagccaggagtttgagaccggcctgggaaacatagcaagactccgttcctacaaagaaaaaaa

SEQ ID NO: 915446 - DNA, 4001 bp, Homo sapiens
caaaccttaaataagaacttcaatacagtatttaccctttccaaagtgtcttcaaatatatctcactgaaccacagccaactgtaatcacagaaatgtaaaagctagaaggggtcttggaggtcatttccacaaccactccacctaaccaaccaactggtatccaaacacctgtagtctctagtgattgggaggtagaagactacaacacttctttaaaaatccccctgctgtgatcacctgtcaatttctcagtcccttcctcccaccttaatgatcccaatcaggtaatccaactcctccaactcatcccactaccaggcaacagtcttattgcttcccaagtccacttctccctttctctgaacctcatcttcaatcatccccaatcctccccactcttcccacacccaacacacagcaaggggcctctaagattctgacccctcagagatctcactggttctatctctgacaaccaatccccttcctcctattcctgtgatgtctttgcccatatgctggcatgtgcaagatcacaaacaccactagctatcaatgtctccatggcttcagaatcttttcacctctgtctctgcttctctgccctgtcccttcattcctttcacactcaacatctccttcctcctagtgattccttcaaggaccactggtattttaatacaccagtctttaaatgcctattagataggtaaagggaacatacaatctcaaggagctcaccttcaaggaactcataaatccagaagaagagagagacacttatttatcgtttaaaactcagcaactccgggaagccttccctatcccaagctgaaatgttgcacacttctcagtgccaccattatatctctaatgcaatgactagtcttcttgtctgtctcccaccactagactgtgggctcttcaacggaggggccccttgtctccctagcacctggcccagaacccggagcaaaagtcataatgtttattaagtgaataaatgcatgaattccggcatacaatcatttattcatccacttgttccttcattcgttggccaaaactttactgagcatgcattagatacaaagtcttagaatggaacgataaataaaacagttccaactttaagataactcaaagctatactactagtggattagcactctttcccggtctgtgtccccaacccccaccctaggcttagacagagtcctctcccacagtagaagcccagccttcccctgaagaaattcacgtccctccaactcaaactacctcttagcccttcggtcctaccctaagacacccagctagtaatcacaaaatcttaacacccccacccctccgacctctctctctgtcctccatcttcacccttgaggctaatgcaagtcttctactcccaaggccgcctcggagtccccaagtcaggagtgcctctgacttcgctctccacgcacccgccccctagtcagctccttccctctcaggatctttcccttctctcctaagacccccacctcccgatacctcactgcccctcccctcagtctcaggttgagtctctcctcgtctctcaactccgcttacctcatccagctcccgttccccagcagcaccacctccaacctccacctccaccactgccgccatcttcacggctcgccccctcaccgcagtccccgcgcgagccagctgcttccgctgctcaagtgctcctagccaatcggcggctcggactccagcagagggggcggggcatcaacacaggcggagactgtcagggatcaggaggttatctacttgctgcacgtttcagggtcaaggagaggggagtaccgtgcccttgcaagcttcagcaagggagcgttcttggaaaatgagaaatttgaatcgcattattttcagtgcaactatttaaccaattcttccctttggagagccaaatgggagcgttccaaaacgggcaactttcgcgacgctccctcagtctgggctccaaggagcgagacgtggggactaggaactacgtttcccaagctgcactgaggctgacccggaagtttaaattccgctccctccacgaaagagttgtagtgagtgaaaataaatattaaaacacacggaaatgtattttcctggctgcagcacctgccatcttgcctcggtaggactcattttcaaaaacagcagcttcttgaagccccagaacgcattcctgtgctacggaagacggaagagtagctctcggggtcagaaggcgaaggtcagaaggccgaattggcgggagaataggtttggtggtccgagatccgaggcaacggtggctcctcgaggtccacggtcccgggtgaggggcgttgggatttgttgatggggaggggagtggccgagagggaggagggtggccatcaaggaaatgaactgagcagcctgttcccgatgagctgtgaaagcagcggtgcggcttgagctcccgaaactgagagctgaagagccttgcgggacctccagggcacccacattccgcgtcttacttaggctgtcatgccagttcacacacctcggcacacttttctaacccacatcctgcggccccagcttctgccttaccctcctttttatacaccattcactgtcccacccctacgtataccttcataactgatttttcagcagccggtgaactcgataccttgcaagcctgtagccccagctcacacgcctctgggcgtccgcctggatctgtctggtgaatggaactaggatggcctgtgagcccacagaacgtctagaaaagtcagctttacattgggaccaacagaaaattacagggaattatctacatcatccacaggcatcccatttacttaaaaataatcatttttattttgtgacacttaatacggagaatattgtaaatactgtacacccatcaccctaaattgactactggcattatgatttatttgcttattttttaaaagctagataatacaataaaagttaaacttacctgttttttctactctcaagcctattaccctctcatcctctccagaagcaactattatgaattagaattagcttgtgttctcccagtccatttttaataattatatgtagccatgactatatagtattgtattgtgtttcattttgttttttaatctgagtgctttttttttttctttgaaacggtgtctcgctgtgttaccaaggctggaatgcactggttcaatctgggctcactgcagcctccgcctactgggttcaaacgattctcatgtctcagcctcccaaatagctgggactacgtacgcgccaccacgcctggggaaatttcatatttttagcagagatggggtcatggccatggtctcgaactcctgaccttaagtgatccacccgcctcggcctcccaaagtgctgggattacaggtgtgaaccactgtgcccagcctgagtgatacagggtccggctctgtcgcccaggctggagtgcagtggcgtgataactgctcactgtagtctcatctcccaggctcaagcaattctcccacctcaaccttgtgagtacctgggactataggcatgtgccaccacacctggctaatttttaaaaatattttgtggagatggggtcccactatgttgctggtcttgaactcctgggttcaagcaatcctcctgagcctccgcctcccaaagtgttgagattacaggcgtgagccactgtacccagccttttaggtataattatttgtcttttattttattttattttattttattttattttatttcattttttgagacagaatctcactttgtcacccaggctggagtacagaggggtgatcttggctcactgcaacctttgcctcccgggttcaagtgattctcctgcctcagcctcctcagtagctgggattacaggcatgtgccaccacacccagctaatttttgtattttgagtagagacagggtttc

SEQ ID NO: 915447 - DNA, 4001 bp, Homo sapiens
agcaaaaacgaaaaaactgctcaaaaactcctaaaaatttaaaccataattcattcataaaataactaaagcaaaatggaaaaggctgaaaatgcaccaaaatgactaaatgacaagtactgcactgtagtattttaaaaacctctctgaaaccagttctccatcaaattttgtatcaacctcacctaaaaggatttaattgaaataaacatcaatgattttcactgtcaagtcaactttaacatcagtaataaataccaagtactactgactgggtccctaaggatattatttactttattactcattgtttactcaaactgtagatctgtaaacagatatcaacttttttttttcaagacaagttaatatagatacatagtgaaataattaggccagagtcactatagagtccagaatgcctgttccagaatcaaagatcttgatcagaaaaagatacatacatatatattagagagagaaggagagagaaactacaaaaggatagagtgccgtactaggagattaagaatatggatttctcacagtaacagtgtgtttactaaatgcatttcatattggaaaaagcatattagacttgtaagaattctctctggacctcccttgcctttttgggaaggaaagcgtgtttgtatttagatgggaaccaagaaggatcaggctacacacatcgaatataaagttcatttacaccaaatgacaaatattaatttttgaaacatatagtcatattcttgagaaaaagttctagaaactgaagtcaggcaatgtgaaagaaaaggataaaaatccatactatttttgagctctgaattcagaaagcatcacttctcagacgggtgacttcgacatggaggtgactaatttaggatcgtcggccggtggcagctcatgcccccagacaaaattctgaatgggtagaggtcattttatagcaagaagaatgggcagaagggagtgaaaacgaataaattcgtgctgaagatgtaagaattataaacaattgaaagtgttccagcagctttatatatatgccagaggcaagaactgaattagctggcaccgctaaataggacagtgtcagaatataaaaggtacactacctttaataaggggcatagggatcgatttcaataacaatcgtaaatccacattttgtaacgccgagacaaataactgaaggaataatttcaaaagctaacacagaagccttctgctcctgctgtgtaatcactaccttcttattattagcaagaaaacgttcttttcttagccgggtctcaaggtagcagctagtttgacaaggaaagacctttgggaagggtagcagcctaagccaattcataagtgtggggctggctaagtagatcgacgtggctatttctgagctatcgtcccaggcaaaaggtttcttatttgggtgtccagcccggcggagaccgagcccgcgggccaccctagcgctcgctctggctacgccgcctcagcccctcctcaagcgcacctggacatttaaccaacagctaagtccggcggccgaatgactgagccggcggcaatattcaaacaaccgttttgggatagagaaggaaaaactctctccgggtccctcagaaccaccccgaggcgggacaagccaccgccaccccgggcaactggaacccgccgggcagaagacgggcgtcaatagaatggcctccccagccgtccccacgccccaatccgaggcccggggagggcggcggggctaggcctgtctccccgcggaagcctggctcggcagcggagggccctctggggtttctcttcccagacccagagtcctggagcagctagcaagggaaacacgaaaggacagcgccgcggagctcaccccaggttcaaggcatcgcgcaccctgcggcagcggctgcgctgcctcagcccacagctcagacctgcgggtggccgcgactcaggccgggacccggtcgcacctctgtgacgcaaagccccgccccccgcgcgttgccgggagacggcgcccaaccttcctctgcagcgcccctaccgacccgcgctccgcagctcctgagggctttcgagcccagatggtcatctgagacgagaggtggcggcgaaggagagtctcgcctgtcacgctcccggagcaggggcttcatgaggtggccatggaaacagcctggcagactcccatctctcctggtgccatctccggagcggaaagtggagcgccccgctggcgaccaaggccgcactgagagccctggtttggtcaacagttgggctccaaggtaccacttcccagacctccagcctccccactgatgatagatacacaaaggtcatcttgtttctttatgaggcaatggattgtgttcacctagccgagttgttaagcataagagaatgtatgaaaagtaattacaaggttcaaaatcctgagctttgataaatgatagatatgatgatgagcacatgttagtgatattactgctctgcgggacgtctgaatcagtaattgctgtcttttaagcatctgttgtgtgccaaatactgcactaggcactttacgggcattgctcttgtttaagtcgtctggtcaaagttgcctagacaataaacagcagagcaaggattttaacccaggtacagctgacactgctgcctctatgcttagcagttaaactggtttttatgtttcttgtttgtacacccctccttcaccagtcacttgtagattcaccttgtgaagagctaattcttccctctaataataatactctttgaccatttactatatgtcaaaccgtattttaaggactttaaaggtattaattcgtttaatcttcacagcaatcctgtgagtaggtattattaataccttcactaagacacaggcttagaaaagtcgattaacttttccaaggtcaaacaaccattaaggagcagagccagattcaaacccaagcagacagaaccctgaacctgtgtttttaattcctgttttaaactgcctcggtagtacggtaagacttcattagcgctaggtccatgcctgtttgtgcaccattatttccctgacagccagcatggtacttgttcaatatttgaacatttgatgaatatttgaacactggaaaaggaaaaagcttaaaaatgaagtataaataatgatttaataaattccaaaagatatcaaattcaacaagattccatagttcagcctaatccgggcctgggagttagaaatattactctgtaaaaattgccttcaattaaacattgtattggaagttctggtcaatgaaataaaaaaagacaaatatataaaaggcatccaagttggaaaggaagttgtagcactgcatttatttgcataagaaaattgtggaatactacaaaaaagctgctagaactcataagtgagtttacaaaagttgcaagatacaaaatcaaatatacaaaaatcagttgtatttctatatactagcaatgaacaattagaaatggaaaatttttaaatatctcttatcagcaaaaaaaaaaaaaaaaaaaaaagcagcaaatttgggacaaatttgaccaaagatgagaaagacatgtatactgaaaactataaaatattatggaatagcaaagacatggaatcaacccaggtgcttatcaatagtggattggataaagaaagtgtggtacatatacgccatggaatactatacaaccacaaaaaggactagatcatatcttttgcagcaacatgaatacagctggaggccattgtcctaagcaaaataatgcagaaacaggaaaccaaataccgcatgttctcacttataagtaggagctaaacgttgagtacacagacacaaagttgggaacaataaacactggggattccaaaagggtagaaaaaactactattgggtactatgttcaccacttgggtgacctggatcattagaagcctaaacctcagc

SEQ ID NO: 915448 - DNA, 4001 bp, Homo sapiens
aaaccttgggaggccaaggcgggcggatcacaaggtcaggagttcaagaccagcctggccaacacagtgaaacctcatctgtactaaaaatacaaaaaagccgggcgtggtggtgggcgcctgtaatcccagctactcgggaggctgcggcaggagaatcgcttgaacctgaaggggtggtgcacagaggctgcagtgagtggagatcgcaccattacactccagcccgggcgacagtgcgagactccatctcaaaaaaaaaaaaaaaaaaaaaaaaaaaggtgaggggagtgacaaggaacatagaaagtaagatgcaggtccccctcaaccccaggaataaaatagcccaatatcctaggacagtgacaggtgtctctggcggcttgaatcaaaacagagtgcattctagaacctgtggtttctagaagctgcacttgtatacacaagcaatgcctctctttccttacccaaaaaaacacatggcagaattcccaaaacagaaggtacaaatatctggcctttcgtgatttatgtttcttgaaaatctcattctaggtaagcattttttatcaaacagagctgcagatgttatgttgactgggtgtgtccccaaaagaatcctaagttataacagtcttattttatacagggcactttgcatttcaaagctcagaaccgaggaatagcaggctgctggtgttaggggaaagaagttcaaggcaagagtcctacaacagacttttaattgccagcaagccagtaggaaacccatactgccaaggagatagaagcagcccctgccacccaacctttgtttccaaaacttttaaacccaagccagcttttctgtcaggcactactggacttagtagtactagtattacaaatataaacgacagtcacttactgcttcctcactatgtgccaagttctgtgctaagcatacattttccaaaatgtatgaaaacaactgcacaagtgtgctcccaaccccctctgctctcgagtctgaaaagctcccttcacatcctcaaattcaacctgttccctaaactccggattctccacacccttcactgaccctttcaaggccaggagccacatctctccaagcaatatgacccccaaactcttcatccaacattaaaccaagcacttctctgatccaaggcccctcccactcccacacaccaattccaacctgcccctaacttgttccaacaattctgtttccctccaaacttcggacttacgtaaggcacagggtgccctcaccgcccctccgcatgcaacgtgcctgtccttcactctgaagttcaaaattcacaaacacactgcacctgggtagagcccgggttctaatcccacgagaactctccacacccgcccgagtagggcccgggactctccaccccctcaccaggccgggccggggcgcgctcggcctcgctccagaccctaaggggaagtggggaagctccacctggctccgcaggcgcggcacgcggctcctgctctggcctgggccccgcggcagccgcgcccccgtcccggcgcgggcggcagcgctcgggttggctgcggcgggcgcactcgcccagcacctctgagtcggcctggccgtcgtcgcgggcccgacggcgggcccagcctgggccgcgggcgcggcagcgagggcaacccgggcccgccgcgtcggcggcgcgttgggcgcagcctcggcaaagcgagtggccgcacggcagggccgctgcttctccggggggctccaggcacccggcgcagcccgattcctccggccgcggcggcagcggcggctgcagcaacggcggcgacaacaccaacagcgaaggtccagaagccgggcctggggccccagtcttagctgccgccgtctcgtcacagcggccccgccggccccgccgactcagagcggctgctgccgccgcggaagaggcccgagtactcggacctgcagccgccatcttgtttcccgtttgaagggagagtcggttgcgagggagaagagtggagggcggggcagtacgcgcggtgggcagtgctatctacatattcatgaggggcgaggcttctgtgagcccaaagagggttctcctcagacctgattggccagaggggatacttcattaatatttattagttattctttattatgcggtcatcagccgcactctcgaaaagtccttgcagtttcctcttactgaactgaaagaggtgggaactgaggggctttactggcaattctgaacgatgttaaactttgatacacgtacttatcctgtaatgccttgataactgaggagaaagtgagtggggaatatgtgagttactcagaaacctgccttagtgttcatttgatatgagggcctgagctctctcctaaggatgggggtagctttgtgactgaaaccaggcccaccgtggtaactaactgccaaaaggagcagcctcttgtcaatcctacctcctcatcctctctccccatgtcccttcctgaaactgccccccttggctggtaaaaccacactttcctggtttttttcccaggctcttggctccttctcagtctcccgtgtttggtgcttccatgtgggtgttcctctaggcttaggcctcagtccccttctcactctgcgtgctgcactggtccacattttcttccctcaggagctcccagattgctgtctgcagcccaggcctcctgagtccagccctccatattcaactgcctgatggaaacatcctcttagatccctacattcctcatgtacaaaactaatgtcactgtctcccatcctcctttcaaaactgctcttcttatttccttcattctatgaaaggtcccatcctcccaggtactcaagctccaaacctagtcatcttgaacttcttccttatctcccacaaaccatcagttatttagtcctgtcaattccactatcaaaatgactatttccccacctcttcatcccattcccactgcccaattcaggtctaatcatctctcatctagattactgcagtagctgctatagattgattgtctcccctctcccaacctcttttctaatccatcctccacactcttcgagttgcttcctataggccagctctgaccgtgtcactcctgcttgagctagggagaggtgcttggactttgatgctagtgccctttctagatgcagaggttccaggagaaagaatgacccctctctaatggaaaggtggttctgctacagtagttctcccattctttgctttctttgccctgggatagatttggagcagggcaaagaatgggaagcattaaataaatggcatttcttagtggaaacctttataggataacacgagttttgtaaagagagaaaaataaaaaagcaacataggctgggggcggtggctcacgcctgcactttgggaggatgaggcaggcagatcgcttgagctcaggagttaaagaccagcctgggcaacatggtgaaaccccatctctacaaaaaatacagaaattagctgggcatggtggcactcacctgtactcaggaggctgaggcaggaagatcactggagtccatgaggttaaggctgcagtgagccgtgatggcaccactgcattccaacctggacaacagaatgagacattgtctcaaaaaaaaaaatcaacataatataatagaaggcatgagaagccctgggttttgatgagattgcccagagctagcggtaaaccaatccagtgccgagtgattgattaactcagagagcagggggaaaaaaaggtgatggattcccaagataagaaccagatggctaaaggacagtcaagagttgaagaaaggccaatgggtgattaaaacaaagacctgtttgcatagagacccagacagaatcctgccagacacagaagtatggccttggctaggctatcctttatccatgggtcctgcccacttccatcccaacttaaggttctt

SEQ ID NO: 915449 - DNA, 4001 bp, Homo sapiens
tatacatatttagatatccatgtacacatactgatataacatttctcatatataacatataaacatatggttaaatgaacatacagtccacgtaggaaagggctggaaaatgtttgcattttttaatgagtttgaccccatgtattctattctatttattccccaaacatttagcatgcctgctgagtatcaggtgctgtgttggataccagaaatacaaagatagatcagacagtcctgtacctttaaaaagctagtgcagtgccatcagagccaaaaagaaagaccagctacacaagaccatctcaaaaaccctttacccaaatgaatcttcccagtcaggagtccacacattaccttagaccatctgggagaccttcgtctgatttggaagcacataaactagaagattccggaggactgggggcattggccacaacaccagcaacctcagacgctgccattatgctctgtacattcagaaacaaattacaggctacaagtttccaaagtttaaaacaaatgtatctctcccccctcagaatgtccacacaacagagctgtcgcagtaaagaaacacaaaaacctgggctccgggagaaaatacttaagagtactaaaagagacattgtatgcaaagtcctagtgtcctagtgggcagcaatcctcaggagtcactgtatttacataaatatctaggagtctgtgcaaagatcttattttcacttttggcagaaatgtagtcatttcaaacaatacatcttagtctgccaggatcttccaagtggtcccaggcctaccttgtctgctatcatttttaataaaagacgtacttttcggcctagtatcaatcagatctcatgtttttaaatcactttatggctgttacattcaaagcattctccattaatttaagggaagtttttggaggtgtctgcctgtaagtcaacaagtaatgcaatactgggcaatccagggtgcatattttactgtcagcgtgctccccacagatgggaaaggcctgatacccactaactgagcaaagaacagactcttcagagtgactagtggtgcaaaaaagaatcctgggttctctagcgtgaaaaagtcaaggtaaaaaacatggtaacacaagtaagggaactgggacggacgccttttttaaaaatcaaaaggtcatcttttatgccgcagagcaaacttatgaccttatgaggagaaaagaaaatcaaaatacttgggaggtggggatgaacatcgggttagtttgcattcttgcttttattttaacagcatcacacgtattcccccccggaacactgaagagcgcatagggcagataggtagatggggctgtgtcaacacctcagtcacagcccacagaccctctgtgcctcagtttccctcattatacaaagctcctgggagaaaatgggcccaaaccgccattgctgctccctcaggtgcaaacatcccgtctccaacatagcccagggctggggggtcctctgcgcccggtgaacgaaaccccaggacaagggccatgcatgcaactccgtggctagagagcccgtggcgcgggtaggaacagctggctggagggtcgagtgtaccaaaaagaactccgcaacccggggcgaccaccagcgaagcaggggcgccggagccacgggtcctcgggcgagaacaggggacagacgggaaggggacaatggggggaagcggcgctgggtggccttggccaccccccacaggggactgctaggctggccgctggctcggaccagacccccctccaccccttcccctcggtccccccaccccgctgccagccacccccccgtcccacttctaggccgggacccccgcctcggttctcacagcaccctccacgccccccacccgacccccatgcccggccctcgccccgcaacccccacccacgctcgccccgcacacacctcccgcgccgcgcccccgggaggaaagtgggggagggacgggacgcacctgagcgggcggagcggggggagggggcggccgagccacggggggaggggtcgagcgccggcccgcgcgcggcacctcccacttccggcggcacgagcggagggggcgaggctccggccgcgagaggagaggccgcggtggcgccgcgccgcccccgacggcgccctctggcggcgacagctggcgccgccggggcacggggatgctgcgggagacccctgagatacaagtggactctcccggggcgcggggaagaagggagagccgactgcgagaaggaaggcgacctgggtgggcaggatcccctctgggaagattacagggacagtcggggccatggcggtcagaaggagaagagcaacgagtggcttttaaaggtcggaaccgaaatgccctttacagaggacgccatgaaggagagccttctgaagagggaccatgtggaagatgccccgaggactcggggaggcggagcccgcgggttcagcccccagcgcccgcacggcccctgcctgcgtaggccgcccgcgggagccggaccccgggcgccggttgctgtggcccgcgggggtcgccgggccgcaggcgccgcgctgattggctgcgccgcgggcggaagtgatgctgctgtcactgctcctccggctcccgggaagccgcgagtttccgcagggaggcggcggcagctgcggcggggccggtgagttgggaactaggtgtggggctggacctgggtggtcagggggccccagaagtgggggaagccggcgtctgaggatgagggagctgcacagagggtgcctgaggtcctggcgtgggggaccaaggagatggggccccagggcccagaattcctggataatgtgggtgctaatgaggagaggggcacattgcacggagcgatcgaggccgacggagggagaatcgggaaactgacccggtacccaagctggcttctaggagccgggtgtggaacagcgaggacagtagcttgggagcaggatcttggactccaggctgcccattctcttcttccttgtcaattaagagctgtaaagggaggcctagccgttgggagaggttgagacctgctttcagaaggcatttaaggttcctttcccagaagcctgggggataaaaatgctgctttgccactagtagacagaaggagctcctgcttctctttcttcctgacatctgtggtgggatctactgagtctgaaggagtctgcctagcggggccactgtctggctaacaagggttttgtttgttagtttgtttacttagtagagtatgcagactggggaagacacctaaatatcttgggagaattgaggctcccgggggcagggagggattgagagggaatatgcctggaaacctaagagaaaacgagaggaagaaatgtagtatgaagatttttagaggtaaaggagaggtggcataagttctcctttccaggaagcctttcagtaaaattcccatttttctggaatgctttgaggtagagccgcttgggtgtgtatctgagtactaagccctgccccagggtggacccagtggagagcaaaggcttttaaaggagcccagccaccataggtacacacatgtcctgccaccccatttgtctgtcccccagttctaacttggctctttttttttttttttgagggctcctgagaccaattccctggttctgtcaaacccaggcaattggagtcccagtctggagtctgagtcctcaccttgaagccagcctcctgagctcagtacaggagtagctgcttagtgaggttctctcatcattcgttctctcctggttgcccgcttgtccttggtgcctgttctgttttgtttgcactctctggctttccccgtttcgcccccgccgcctccctcctttcactttccctggtatccttctgggatatacaaatcaagaagttagctaccacctggacttctaggacgttattacctactctttcaa

SEQ ID NO: 915450 - DNA, 4001 bp, Homo sapiens
gtttgcattttttaatgagtttgaccccatgtattctattctatttattccccaaacatttagcatgcctgctgagtatcaggtgctgtgttggataccagaaatacaaagatagatcagacagtcctgtacctttaaaaagctagtgcagtgccatcagagccaaaaagaaagaccagctacacaagaccatctcaaaaaccctttacccaaatgaatcttcccagtcaggagtccacacattaccttagaccatctgggagaccttcgtctgatttggaagcacataaactagaagattccggaggactgggggcattggccacaacaccagcaacctcagacgctgccattatgctctgtacattcagaaacaaattacaggctacaagtttccaaagtttaaaacaaatgtatctctcccccctcagaatgtccacacaacagagctgtcgcagtaaagaaacacaaaaacctgggctccgggagaaaatacttaagagtactaaaagagacattgtatgcaaagtcctagtgtcctagtgggcagcaatcctcaggagtcactgtatttacataaatatctaggagtctgtgcaaagatcttattttcacttttggcagaaatgtagtcatttcaaacaatacatcttagtctgccaggatcttccaagtggtcccaggcctaccttgtctgctatcatttttaataaaagacgtacttttcggcctagtatcaatcagatctcatgtttttaaatcactttatggctgttacattcaaagcattctccattaatttaagggaagtttttggaggtgtctgcctgtaagtcaacaagtaatgcaatactgggcaatccagggtgcatattttactgtcagcgtgctccccacagatgggaaaggcctgatacccactaactgagcaaagaacagactcttcagagtgactagtggtgcaaaaaagaatcctgggttctctagcgtgaaaaagtcaaggtaaaaaacatggtaacacaagtaagggaactgggacggacgccttttttaaaaatcaaaaggtcatcttttatgccgcagagcaaacttatgaccttatgaggagaaaagaaaatcaaaatacttgggaggtggggatgaacatcgggttagtttgcattcttgcttttattttaacagcatcacacgtattcccccccggaacactgaagagcgcatagggcagataggtagatggggctgtgtcaacacctcagtcacagcccacagaccctctgtgcctcagtttccctcattatacaaagctcctgggagaaaatgggcccaaaccgccattgctgctccctcaggtgcaaacatcccgtctccaacatagcccagggctggggggtcctctgcgcccggtgaacgaaaccccaggacaagggccatgcatgcaactccgtggctagagagcccgtggcgcgggtaggaacagctggctggagggtcgagtgtaccaaaaagaactccgcaacccggggcgaccaccagcgaagcaggggcgccggagccacgggtcctcgggcgagaacaggggacagacgggaaggggacaatggggggaagcggcgctgggtggccttggccaccccccacaggggactgctaggctggccgctggctcggaccagacccccctccaccccttcccctcggtccccccaccccgctgccagccacccccccgtcccacttctaggccgggacccccgcctcggttctcacagcaccctccacgccccccacccgacccccatgcccggccctcgccccgcaacccccacccacgctcgccccgcacacacctcccgcgccgcgcccccgggaggaaagtgggggagggacgggacgcacctgagcgggcggagcggggggagggggcggccgagccacggggggaggggtcgagcgccggcccgcgcgcggcacctcccacttccggcggcacgagcggagggggcgaggctccggccgcgagaggagaggccgcggtggcgccgcgccgcccccgacggcgccctctggcggcgacagctggcgccgccggggcacggggatgctgcgggagacccctgagatacaagtggactctcccggggcgcggggaagaagggagagccgactgcgagaaggaaggcgacctgggtgggcaggatcccctctgggaagattacagggacagtcggggccatggcggtcagaaggagaagagcaacgagtggcttttaaaggtcggaaccgaaatgccctttacagaggacgccatgaaggagagccttctgaagagggaccatgtggaagatgccccgaggactcggggaggcggagcccgcgggttcagcccccagcgcccgcacggcccctgcctgcgtaggccgcccgcgggagccggaccccgggcgccggttgctgtggcccgcgggggtcgccgggccgcaggcgccgcgctgattggctgcgccgcgggcggaagtgatgctgctgtcactgctcctccggctcccgggaagccgcgagtttccgcagggaggcggcggcagctgcggcggggccggtgagttgggaactaggtgtggggctggacctgggtggtcagggggccccagaagtgggggaagccggcgtctgaggatgagggagctgcacagagggtgcctgaggtcctggcgtgggggaccaaggagatggggccccagggcccagaattcctggataatgtgggtgctaatgaggagaggggcacattgcacggagcgatcgaggccgacggagggagaatcgggaaactgacccggtacccaagctggcttctaggagccgggtgtggaacagcgaggacagtagcttgggagcaggatcttggactccaggctgcccattctcttcttccttgtcaattaagagctgtaaagggaggcctagccgttgggagaggttgagacctgctttcagaaggcatttaaggttcctttcccagaagcctgggggataaaaatgctgctttgccactagtagacagaaggagctcctgcttctctttcttcctgacatctgtggtgggatctactgagtctgaaggagtctgcctagcggggccactgtctggctaacaagggttttgtttgttagtttgtttacttagtagagtatgcagactggggaagacacctaaatatcttgggagaattgaggctcccgggggcagggagggattgagagggaatatgcctggaaacctaagagaaaacgagaggaagaaatgtagtatgaagatttttagaggtaaaggagaggtggcataagttctcctttccaggaagcctttcagtaaaattcccatttttctggaatgctttgaggtagagccgcttgggtgtgtatctgagtactaagccctgccccagggtggacccagtggagagcaaaggcttttaaaggagcccagccaccataggtacacacatgtcctgccaccccatttgtctgtcccccagttctaacttggctctttttttttttttttgagggctcctgagaccaattccctggttctgtcaaacccaggcaattggagtcccagtctggagtctgagtcctcaccttgaagccagcctcctgagctcagtacaggagtagctgcttagtgaggttctctcatcattcgttctctcctggttgcccgcttgtccttggtgcctgttctgttttgtttgcactctctggctttccccgtttcgcccccgccgcctccctcctttcactttccctggtatccttctgggatatacaaatcaagaagttagctaccacctggacttctaggacgttattacctactctttcaagaggcattttggtaactgttttttgctaggcctctggggaacaaaatgaaaagagggtggcacgatagcacaggaagtgggttttttgggtgttatactgatttggcctca

SEQ ID NO: 915451 - DNA, 4001 bp, Homo sapiens
agatgaggtgttaatgctgtcctagcgtgagtgcctgcgtggagcatggaggggtgggcaggcagggaaggaggcttcagaggtagacattgagggtctgcaggatgccccggcggcagagcgggcaattgcggtggtagacggggtggcgcatcaggatttcagtgcaggcctggcacaggcacagatgccggcagggcaggagcaacactgtcttgctctggtcctggcagatgacacacttcttccgctcctcttgctccttcagcaatttccaagggtcttgcccacctggaggctcctcctcattgagcctctctcggcccctgacaggtgtcactctgatggtcctggcctcctcctcttctgcctctgatctgcgccccgcttcaggaagagtgtcctgtctccgggtcctaactgagaataccctcatagggtcaccctggggagctccaggtgcccctccccggtttggccaactcgccagctgcagactgcggctccagactcggcgccaggcctctgagcccagtgctaggcgagagagccgcatgacatcctctcgaagacggtggtaggatggccgggcatggagctggctgagtgcctgggtagccagcctcagggtgaagtccggatgcaacacagtcaccgtcactgccagcacacaagctagcaacaccaagccagtgagattgacaagcacaaagctggccaggaggcgggcagctgaggccagcagctccagggctagttggcagggtgtccaaaggaggatggccatggccacagcactgctggaaatgtgggctaggaaggcagccactacgtccgtcatcctccacagaggcccggtcactgcatcccacagggccagcaccagggaaaagaggttctgagtgccgatgaggcagatgttgaccaggctgttgatcacataagccaccaggctcatggcaatggcacagatgtcacaggcctggcgcagcaaagcatggccactggagaccacattgaggacgccccggtgcagtatctccctgctccgcagtgccccatgagaggccaggtgccccaggagctttaggctctctaggccagagcagcagctatacagcagagtacacaaggcctgcaagcccccacatgtgaaccggaccacggcttcgatcaaggccagcaatgaaagcaagactccgcggcccaagtgcagaagactagtcagtaccgtgtgcggcaggttgtagacgaaggccaggagccaggccagggaagccaggagggaggacaccagcaggaagttgaggtccaacaccaaggtcagcacgtccagcaccaggcccaacccattcactaccaggtacactgcctccatgatagggctatggaagttagtccaaaacaaagtctggctcctcggttggggggttgtcaaggttgtcaatattttagggggtctgggattaatttggaaggaaaatgagcagtctccaacccagggggtaccaagaatctgaggaagaagtgggtaagacggaagtggagtcttggtagagggaaaggtggccaggtgccagtccaagagtccaggttttgaagatgggctgtttgggagggaagaggccaaacatctctaaagcgaaggcgagcccaggccgtaggagcgacctcagctttggatgcctggtgtggcgaaccacggccgggcaacgggtcagaccgggaggagacgaggaacggatggaatgggatcggatcggatcgggtcgcgtcgggtcgggccggggccgggtggggtcgatgtaagctgggcgcaggctctcagtccagctacgcaggtgcccctgtccccgcccggcccccgtcttcccgctagcggcgctttgcacccaaaaggggagtgggagaggcagccagcttcagcaaaccccaagcgcagcccctactccgctgggcgccgccatcttgtgtgcaaaggggtggagccagaggcgtgacgaggagggagggacgacaaactccagccaatcggtgaaggccaaccacaaaaacgtcgatcactcattggtccgtttgaatggcgcccgaacgtatttactttccaaagggaaggagaggcgacagattaaatcccctccccctttaggcggggattggttcgttggcgggcagcgtcgaaatacgctctcctagccccaccctctaaaagagcagggtcttggactcccctcaatttgggagctgttctttctcccggcctctgaacgcgaggttttttttttggcttgggtcggaggtcactgcctctgggctgggctttggaatagcaccgccttcgcagcctgcccagatccgtctcctcattctcttctatttattcatctattctatcatttattgaactcctacagtgcattgaggatacaaaaaaattttaagacagtgcctgctgttcacaagggaaagcagattattacaggggattcccaaactgctattccaaactttcctcaccaggtttttcaacatctcggaagattacttcattgtcattgagaaaaaggggctacagatttagaaaccgctcagcttcctaccctgggccttcctaccctagagtgcagtggcgcgatctcggctcactgcaacctctgcctcccgggttcaagcgattctcctgcctcagcctcccgggtagtacaggtgcccaccacctcacccggctaatttttgtatttttagtagagacgaggtttcaccatgttggccaggctggcctcgaactcctgaacctcgtgatccacccgcctcggcctcccaaagtgctgagattacaggcgtgagccaccaagcccggccctgcccttttctttaatactcaaacaatagtcaaaatatatttgaaaccccatcccaaatatattgggaatcctggcgttttctactaactccaaggatgcttagcagactcctagtggacttatctttcccctggtcacctttgctgaatttcctacttgagttgaattctccatctccactcctgggctcctgaaagtgtccgtcctccttcagtctgccctgaacactgcctcagagtccttcattctccaaagcatcactgataagaagctgaggtgtgcagcaaacctttactgaggccttgggatcgtggtaggggtacgctatagtgcagaggaaggactgcagtcgctgaaactcctctggcttcttcctaccctttctctctccctgctctcaggccctggccaggttatggtttgttgtgttgtgatgtgttgctgatgtttttattttcctactcgcatcctcccgccagtgtcaaatcttggagaatgtgcccacctccctttcaagacagttgatcccatcgcccgtaccatctcctcttaagggatcttatttgtccagtgaacactatgttgttattaatcaatcttcctccagcacttgacaccacttcctccacccttggcctcagaatcattaccctttcctatattctttctgtttccatcatagcctcctctcctgtatacacgatgatttctgaatttgtgtcttcagcctgaacctgtcctgcaaacttcaggctccagctgcttcctggacatgaacggttcatgggtatcccactggtgcttcctacacaatatgtccaaagtcaaacttggcaaacgtgctgtgcctgcactgcgtgcaattaactggccagttttccacaccaagaagcatgtaaagtccttctcagagttggcaggatcctctaagagagaatttccattcgtttaggaccaagacctcccctttgagtgatttgagactcactaatccaaagccctctttaatgagccacaacccttgactcccaggaaacctagcaggtaatcctgctttgggcagggacaaagactccaactggctttggggaggcagttcaaattgtttgacaatgttagtcccagggattgagaaga

SEQ ID NO: 915452 - DNA, 4001 bp, Homo sapiens
acctgagacacccctttttgctaccagactggagaaggtggaacaggttgacgatgatttgttgtagctgaggcgaacggggcgaggctgtgaggacgggttttggagcgccgctcggccgtcctcaaaactttggacacaccctccgtttctgtcagtcaagagttcttcatgcctgagctcgggaagcatgttcaaaatctttttttttttgtttggtcccgcctttctggaccaaaccaatggatatcttaaatgtatttcattaatgcctcatgtctctctaaaacatgtaaaaccaaactgccccaaccaccttgggcacatgttcccaggatcccctgagggctgtgtcaccggccgcggtcactcatattcgattcagaataaatcccttcaaatattttacattttaactattcttatcgacagtacattttttaaaataagaatggccctgaaagatgtccacctcctaatctccaaacctgtggtgttaccttaagtggcaaaagggactttgcaaatattaagaatattgagatgtgaaggctaccctggggtgtctgggcggccggcatataatcatgagagttcttatgcagagacagtaggttttgaagatggaagaaggtggcctctagaagttggaagaggaaaagaagcagattctccttgggaaactccagaaggaactacccttgccaacaccttgattttaacctcctaaaactcacttcgggcttctgagctccaggcctataaaacagcctgtgacaaattcgttatagcagggatgagaaaatagctcactgcagcctcctcttccagggctcaagtgctcctcctccctcagcgtcccaagtagctgggactacaagcgttcactaccgcaactggctaattttttctatcttttgtagagacgggggtctcactattttggccaaactcagtatgttggtcgcaaactcctgggctcaagagatccgcccgcctcggcctcccaaagtgctgggattacaggctgcagcgcacccagcctaatgtaactttttttttttttttttttttttgagaaggagtttcgctcttgtcagccggctggagtgcagtggcacgatctcggctcaccgcaacctccgcctcctgagttcaagccattctcctacctcaacctcccaagtagctgggattataggcgcctgccaccacgcccggctaattttgtatttttagtagagacgggttttcaccatgttggccaggctgttctcgaactcctgacctcaggtgatccgcctgcctctgactgcccggcccagtgtaactgttaacggcaacatcgtgtgcagtctccggcttgcattcggtttagtcagccaatcgctaagacgacacttgagaccgttttcagatctttaggctttccaccatcctagaagggggcctgcctggttctaaggcccttctgaaacactgccaaactgtcctcgggaaacggtgcagaagtcctctggtttcccccaaggcgcgtgggcaccttggctggaacctcgcccagtaacacgacgtgcctggggccccttcgtcatttccgccaaccccggtgacaaccctgacaccggcccctaagtgccattccagttatgttgctctcctccccgcagccccaggcggcagcttcgcggcccggcgtccggtcccccggtggtcccggagcgaagctccgcaatggagagcggaggaccctccctccccgacctcgcacgaccaagaccgcccacctttcccccaacgcccggctgtgggagccgttcgagtcttctccgccagggcgctccttcccgggaggccgcttctttgggggaataaggtcaaggattacgggatttggggaagcaagctcggctgggccaggattgcttgcgtagctcgctggaatctaaggcactagagggcttgacggccacgtgaggacgaaccacgcaggcgcagccccgcgccccgggcaaggacttccggcaagccccaaaggggagcgtgcaccgcgatgacgtcctcaaggcgcgccacgtccgcccggcggcgcagctgcccagcgcaacctcggccccgcctcgatagccccggacccctgccccgcccgaccccgccccgccacgggagcgcgccactcgcccgcgcagcaacggcctcaatagcgccaggcccgcgtctacaagaagcccgaccaaggccggcgtgggcgaggcctggctagacgctgacgcaccgctggagctactgacctcgggacgactggcggacggtcgcgggcctggagacccagagcgagacggcctacttcgttctcgagccagcagaacgggttgaacgtgtcgacaaccccacccgccagtcagcggcgcgggcgtgttcgagccggctcgtgggcgtggtcaggtgcgtgggcggggactactgggcggggctcggcgcgggggcggggcctggcgggagtagtctcggggtcggggcggggcccggcgggcggggctcggctaagcacagtcttggcgcagcggcggggcctggtggggcgtggctcggtgagggaggtctcgcttgggggcgtggtctcccccagtaggcggggcttggtgccgggggcggggtctggcgggcgcgggcgcgtgtgcgtgttgtgggcctcgcactggcacgcaagtctcagcaattcctgagaatcctcggaggaagaggccggggcccggtgcggcagcgccttgggggcggaatcgcaggcgcgggtcgggccttgctggggcgcggggcgcggcccccggagaaagcggccgcctcgggacaggagggacccgggagaaacccccctggggcggctccgcatgtcggggtcgcgactctaggcgaccttggtagaggggctcgtttgcgccgagctcgcgacccccgagggagccacggccccgtgaaccacgctgcccgtcctggccactggctgccgcctttgtttcgtgggaccccagcccgcaaggcctgcggagccgcggcctcgtcccgagtgttctgagcgcggtccgagctgctcctgcgtccactctgctgccgacacccgagcgtcgcctggagccctggcactgaggggcgcaggccgagttccagaccagcctgggaaacgcaaagcgaccccacctccacaaaagtgggttttctttaagtttttgactagtccgcaattcacagaattgacattttggcagatgaagattgcaagtaaggaaactaacggtatctcagatttgttctttagcaatttgctaaacctctcctctgactgcctttattaggtatttgttttcgagacagggtctcactccactgcttaggctgtactgcagtggcgcgatcccagctcgctgcagcctccacctcccggactccagtgatcctcccgcctcagcctcccaagtagctggtaccacaggcgccagcacgcctggctaattgttgtattttatgtagagaagaggtctccctgtgttgcccagcctggtcttgaattgggctcaagtgatcctcctgcttcagcctcccatatcgctggaattactggcataagccactacacccggcctgatcatctttaaagaaggtggttctggccgggcgtggtggctcacacctgtaaccccaacactttgggagaccgagaagggtggatcacctgaggtcaggagttcaagaccagcctggccaacgtggtgaaaccccatctctactaaaaatacaaaaattagccaggcatggtggtgggcacctgtaattccagctacttgggaggctgaggcaggagaatcgcttgaacacgggaagcagaggttgcagcgagcctagaccacaccattgcactccagttcgggcaacaagatgaaactctggctgggcgcggtggctcacacctgtaattccaacactttgggaggccaaggcaggcagat

SEQ ID NO: 915453 - DNA, 4001 bp, Homo sapiens
agatgtccacctcctaatctccaaacctgtggtgttaccttaagtggcaaaagggactttgcaaatattaagaatattgagatgtgaaggctaccctggggtgtctgggcggccggcatataatcatgagagttcttatgcagagacagtaggttttgaagatggaagaaggtggcctctagaagttggaagaggaaaagaagcagattctccttgggaaactccagaaggaactacccttgccaacaccttgattttaacctcctaaaactcacttcgggcttctgagctccaggcctataaaacagcctgtgacaaattcgttatagcagggatgagaaaatagctcactgcagcctcctcttccagggctcaagtgctcctcctccctcagcgtcccaagtagctgggactacaagcgttcactaccgcaactggctaattttttctatcttttgtagagacgggggtctcactattttggccaaactcagtatgttggtcgcaaactcctgggctcaagagatccgcccgcctcggcctcccaaagtgctgggattacaggctgcagcgcacccagcctaatgtaactttttttttttttttttttttttgagaaggagtttcgctcttgtcagccggctggagtgcagtggcacgatctcggctcaccgcaacctccgcctcctgagttcaagccattctcctacctcaacctcccaagtagctgggattataggcgcctgccaccacgcccggctaattttgtatttttagtagagacgggttttcaccatgttggccaggctgttctcgaactcctgacctcaggtgatccgcctgcctctgactgcccggcccagtgtaactgttaacggcaacatcgtgtgcagtctccggcttgcattcggtttagtcagccaatcgctaagacgacacttgagaccgttttcagatctttaggctttccaccatcctagaagggggcctgcctggttctaaggcccttctgaaacactgccaaactgtcctcgggaaacggtgcagaagtcctctggtttcccccaaggcgcgtgggcaccttggctggaacctcgcccagtaacacgacgtgcctggggccccttcgtcatttccgccaaccccggtgacaaccctgacaccggcccctaagtgccattccagttatgttgctctcctccccgcagccccaggcggcagcttcgcggcccggcgtccggtcccccggtggtcccggagcgaagctccgcaatggagagcggaggaccctccctccccgacctcgcacgaccaagaccgcccacctttcccccaacgcccggctgtgggagccgttcgagtcttctccgccagggcgctccttcccgggaggccgcttctttgggggaataaggtcaaggattacgggatttggggaagcaagctcggctgggccaggattgcttgcgtagctcgctggaatctaaggcactagagggcttgacggccacgtgaggacgaaccacgcaggcgcagccccgcgccccgggcaaggacttccggcaagccccaaaggggagcgtgcaccgcgatgacgtcctcaaggcgcgccacgtccgcccggcggcgcagctgcccagcgcaacctcggccccgcctcgatagccccggacccctgccccgcccgaccccgccccgccacgggagcgcgccactcgcccgcgcagcaacggcctcaatagcgccaggcccgcgtctacaagaagcccgaccaaggccggcgtgggcgaggcctggctagacgctgacgcaccgctggagctactgacctcgggacgactggcggacggtcgcgggcctggagacccagagcgagacggcctacttcgttctcgagccagcagaacgggttgaacgtgtcgacaaccccacccgccagtcagcggcgcgggcgtgttcgagccggctcgtgggcgtggtcaggtgcgtgggcggggactactgggcggggctcggcgcgggggcggggcctggcgggagtagtctcggggtcggggcggggcccggcgggcggggctcggctaagcacagtcttggcgcagcggcggggcctggtggggcgtggctcggtgagggaggtctcgcttgggggcgtggtctcccccagtaggcggggcttggtgccgggggcggggtctggcgggcgcgggcgcgtgtgcgtgttgtgggcctcgcactggcacgcaagtctcagcaattcctgagaatcctcggaggaagaggccggggcccggtgcggcagcgccttgggggcggaatcgcaggcgcgggtcgggccttgctggggcgcggggcgcggcccccggagaaagcggccgcctcgggacaggagggacccgggagaaacccccctggggcggctccgcatgtcggggtcgcgactctaggcgaccttggtagaggggctcgtttgcgccgagctcgcgacccccgagggagccacggccccgtgaaccacgctgcccgtcctggccactggctgccgcctttgtttcgtgggaccccagcccgcaaggcctgcggagccgcggcctcgtcccgagtgttctgagcgcggtccgagctgctcctgcgtccactctgctgccgacacccgagcgtcgcctggagccctggcactgaggggcgcaggccgagttccagaccagcctgggaaacgcaaagcgaccccacctccacaaaagtgggttttctttaagtttttgactagtccgcaattcacagaattgacattttggcagatgaagattgcaagtaaggaaactaacggtatctcagatttgttctttagcaatttgctaaacctctcctctgactgcctttattaggtatttgttttcgagacagggtctcactccactgcttaggctgtactgcagtggcgcgatcccagctcgctgcagcctccacctcccggactccagtgatcctcccgcctcagcctcccaagtagctggtaccacaggcgccagcacgcctggctaattgttgtattttatgtagagaagaggtctccctgtgttgcccagcctggtcttgaattgggctcaagtgatcctcctgcttcagcctcccatatcgctggaattactggcataagccactacacccggcctgatcatctttaaagaaggtggttctggccgggcgtggtggctcacacctgtaaccccaacactttgggagaccgagaagggtggatcacctgaggtcaggagttcaagaccagcctggccaacgtggtgaaaccccatctctactaaaaatacaaaaattagccaggcatggtggtgggcacctgtaattccagctacttgggaggctgaggcaggagaatcgcttgaacacgggaagcagaggttgcagcgagcctagaccacaccattgcactccagttcgggcaacaagatgaaactctggctgggcgcggtggctcacacctgtaattccaacactttgggaggccaaggcaggcagatcacctgaggtcaggagttcaagaccagcctggccaagatgatgaaaccccatctctactaaaattacaaaaacttagccaggcatggtggtgcatgcctgtaatcccagctactcaggaggctgaggcaggagaaccacttgaacccaggaggcagaggttgcagtgagccaagatcgtgccactgtactccagcctgggcaacaagagcgaaactccatctcaaaaaagaaaaaagaaactccgtctcaaaaagaaggtggttcacacacacacacacacacccccaagaaagctcagggctggaaggcagccaacctggctgtgaccctcatcctgcacacgtgagcttggtgaccagtagctgattctttaactctctaagctttggagtctggatgtgaggtttagaattcatgacaagaagctggaaggatgccgccagtctgactcctggactggt

SEQ ID NO: 915454 - DNA, 4001 bp, Homo sapiens
cctagctgtaagaacttgggcaaattatttaacttctctcagtctcagtttctttctttgtgatgtgagagcagtgatagggttgctctaagaccataatgtatgtaaagcccttgggggataaacgtcactactctgccattatttaagggcttgtgttcccagcatatgcaccttatcttggctcctacagtctctacctgaatcaaattctaccaggccccaatattcttttttccccttggtatagccctcaggtgtaatggaaatggactgatctgttatcgctaggttttgcttcatgctgcttttgtgacgattagggcaccattcactctataaagcgttttctcggcggcaaaatgtgtctgtcaacaccttccttgcatacctcactaagtttcgagcttagatgagacaaagtatggtgaaaacactctgtaaacgcgctaggtgagcagaagcgggactctgcggggtgccagcgagaagggatctgtgcttaacctcctggaaatctaggagggtcaagaggttggagaatcgggctcctcccccatcgtctttctccccaatccttctatacggaccacacccttctggtcggccttttccccctaattcctgtagacacagctgcaggcgccctttccctggaatttccccctctacccttcccggtctcaggagatgcttcgactgcagcctaatgaatagctaatggccatgctaatgaggctctggggctcctccctcagcacctgatgtgccccacacatgaacacacacatattgccagggtctcctttctctccaccttcgagtccccagcacagtgctcgtcactagactcgagtgggtcgaggcagagggatggggaccgcgtgcacctggagggaaccacacgcgaaagcgcccggtaaagcgggggttcccgatgcggcaggcagggggcgcgctccggcctctccgcaggctggcggcggccggctcccgcagcttccccgcggcgctaggggagagcgcgctgtcccagtcatttattaatcaccgtaattagcggtaacgacctcgccgccagctccgcccgcccgccacagctctgccggggtgggccggctgagagtcccgccgctgaaagacaaacttctaagtttccttaaaatgatcgccgcccctatcccctccgtagcaaacacatccagcattttggcttcctctggtcctaagtgagttcttgggaaacttcggggttccgaagaccagctgcctgggtgggtcaccgagtgacctggcttggccgaggccggcgggagactgtgccccctcctctgccctccctgcgctgggcccgggcctttcttagctcggacttccctgcccgttaccagcaacggttcttctcacctggggtgggcgttgtaggggaagggaaggaggtgtaaaaagactcagtagccatcttctcccaagccctcgacctcccgcgggtacccccactcatgtgctcgaagctccaaattatcccttagaccccacgacccagggaggcgctgggaggcgccactcaatcccggacctcgggacaggagcgcttctccttcccttccacgccgccctctcacctcatccccatcccaggatcccatatccccaagaggcagggtctcaccgttgagagagggatcgccgggaggcagcagggtgtggttgagcgccgccagcgaggagttgaagcccaagagcagctcgctggagttggagatgtccccggccagagagtccgcgaacaagttcatctgcagcagcgttttcagcaggtagcgcagcatggctcgacccagctgggatcgggactgggggctgggggcccagcccctgggtctgagacccgtgggctgggagccgtaagcccctccacagcctctgcgcgctgcggcagccacggtgccgctctcctgccggtgcgcctgggtacggtcggtgcctcttcgtgccctcctccttccctcgtccttctctccaccccctagtgccggagtcccctgggagctgggcaggcggaaagcaggtgccacgccgatcacggcgtaattaagggattaatccgcctccctccaccctcccacccttacctctacagtcactatccgagcaggagacacgagtagcgtagcgcgcgagttggagtccccgccccgcaccccaagcccagcgttccgttctggacgcggcgagagattttccctgtctcaaagcacccaagatgagggacgaggctctgtcggactctgcccttctgcccaactttagaacaggaatctgtcctctcttttcccgaaccttttggaaactgaggcaaagcgcaagcaatgctccttgctgccaaagttctggtttccattccctcccaagtctaggggtttggcgacggaagggcaggagactggggtggtttgcagcaagagttgggagtaggcagagaattccaagacaggtccacctctctgccctctggtcctttggtctgcagccaggaggccagaggatggagcggcgcgccctgacccgggagtcctgctccaaacgccctaatctaggagttcctgtaggagactgaaagccagggaaacccaggcaactgtcatttatttgaatccttttacattaccctgctttgacattttttattaaattgttttacgtttttgaggagactgaaatggaaccaaggattctaggacaaaaacaaagataatattatttttgtaaaggcatgtgggattgctgcaaaattagtgcaaatctgttcaaatcggatagcagtcgtccttcctggggggggcgaaaagaaaaccatgggcccctactcccacctcccacttccagtcgcggtctgcttctgacttttctggagttctttctacctgaagacccacctcgacaaactcactttcctagacaggagatggctttggggtatcagggaaagagagaggccggggcattcctaacctgaggtaaggccctgctgattgaagagtcagtgccagagttctggctcagccgtcaggttctgggatgagacaactttcatggggcgactgcttctgaccccaaaggggtcgagatcagaggggtgggtgctatacagtcgcagactctggagtaagcagaatcaagaattgaaatatttcaggcagagcttgttcaagggaacccgagacattgtcaaggggtggggggcttgttccaagcctccttcctcagtccaggcgcctggctgtgagcctccaactatgggtgtttaggtgccttccaaccctagcagttctgggcgggacgtagaaaggctggaagcactaggtgtgggggagggggtaggtgggagtgggggtggggccggatggaccccccaccccaccgccacgcagcgccctgggagctgtccttttcagcacctcatctgcaggtgcctgactagggccctggagcccccagggaagacataaatccgagcagaccctgaggctgaggactggggtaggtgggagacgggctagagacacatcctttcaaaagcaagaagataataagagatttgacgcccctcccttcctcgctccagggtggtattcagataagagagaaagtaagggatgtatttcccacccgaaatctatccttcaggaatgaccaacacagaagtgggttctaattctacgtttgccaagtacaagacgtcaccgctttggatctcagttttcccatctgttaaggaggaattggagtgcttgatctactctgacctgtgagattcgaggctccggggccctttgctccgccccctgctgaccgcggtcacctgggttccatcacagcagaggctgaatcgggatagaaaccccacgtcctggtaccaggccctactctggggcggagggggccagaaaccctcccaccatgcggctcctgcccggtcctaatgccctgatttgctc

SEQ ID NO: 915455 - DNA, 4001 bp, Homo sapiens
tggggcttataggccagagtgacagaactgaggcgtggaacatccctcagccagggaggaaccccagggaacccaaactcccagagtctccaggtcttgagcattccgatttctactctagcaggggggaacctcccgctacgtgagacccccagcactttgaccctgaccccacataccttaaccccagcccaaaccagaatacaccaccccaactggagcctgcagcctggctctgattgtagcccacccctgcccttaccctggatggaaacccgggctgcgcggctctccctatgtcctgcgctgttggtggccacacacatgtaggtcccttcgtcactcttctctgctcttgccatcagcagggaccccccggacacctgtcagggccaggttcactgtgaagtctcctatgtggggaggggctctgagctggggggaagtttgaggccccctgctctcccctcctcaaattctaccggaggatgcggggctggacggcaggtcagtccatcagggtgtacccaggtctgcccaggccaggatgaagtgtgggggagggggccacacttactgtgtgccttccgggctggagggccaggggtttcccatctttccaccatgagactgtgggctctgggtggccccagggcggcccacattccagagtaaactgctcacccaccacagccaccatgtcccgaggctggatctggaaatcctcccggaggactgtggggaggatggaaggtgacacggagcagggcccaggcctcttctctctcccttatcactcttgcccccttctgctttgcccaccttcctggcctcccatttagggccagccccgccccagcttgccctcccaagccttccagcccaggcctctgctcacaggtatcccactgacctctcagatgttcccttgaacattcagctcagatgtctccacccaggtttgccccaccctgaagctcccctcccaggcctcaccagccacagacagccgagcgcctctgctgactgccgtgccaagccggttgctggcctcacatgtgtagacacccaggtctgtggacagggcctggccatcgtgggcatgtccccgggcagggggctgtagcagcagaagggtcccatcaggcaggaggtggtgtgggtctgggggcaccatgctcaggggctgcccattcagcaaccagcggatggtgggaggtggctggcctgaggcttggcagctcatcctggcagggccagggccctggaacagctggtcctgggggtggactaggatctggggcggggagtcctgagccatgcctcctgggagggaaagggagcagagcccagtctgatcaccagcaacaccccaaattcctggcccacccctcatctgtcttctcttgtgtgcgagtttgccagaaaacctgtaatctgaactactaaaggttgcctcccaaagaacaagccagctaggaggagagagggccagcatgcacagcatccaggccagggcttgcatagcatgttcgctctctctctctctctctctctcttactttctctctttctttctttctctctcagtctctctttccttctttctctctctggtgtgtgcgcacatgcacaaacacacatacacttacacacactcatcatcatcatcctcatcctcatctctggtccccccactgcaaaagggaagcaggcagtcagcaggccccttctgccctgagcaggccttggatggaggagcatgggccaggagagggagagcaactcacccatgatgagcaggagcagcagaggcagggaacccctgccccccaggaggctgtctcctccagagcccatggctactctcagccctatgtccttgtcccgagcactttgtcctgctgctctgagctcacagtgaagagggaaggaggggcggggtgggccggtggtggttgtttgtgaccgagactctgccccaggagggaagcggctttgaggaaaccgatgcttcctgcctggccctcagtgccttggagaactgggaggagaccagaggcgagaaactctctgacctcgaccatttagctataacccccgaccctaacttcagcgctaagctttatctcatgatctactcggggatttcttacagggtatccttacactaaccaaaactccgatcagagccttaatcctctatttaaatcttatccctggatcccaatccttatccctttgacacctgctagagaagagtgaaaaccccaggagtctcaggacacagcaagaagctgaagacagagggcagtggggctgcaggctggggaggctgagtgaagtggagcaggggtggattgtaacaccctcatccatttccccagtgccagatggaccaggaggtggcgtagggtgggagacaggaaggactcagcatctgggacaagctgggagattaccacagggtgtgtccatattcagctcagagatggatgaaataagcttctgtggagaacttgggcaagtcagtttccttctctgtaaaatggaaataataatagtagttcctaccttgagggataaagtaatgatgaaacacataaagcataaaaccactggcatccagtgcctgactcattatgagtgatccgtaaagctgagccaacattgtgtatttctttttaggcccatcccatcactgaaactattggaggatcctcggcaggagtatttttcaggccctggaaaggtggttggagtaaaagaccttttaagagtctttccagtcccaagagcctgtgtccatatatgtagcagacaggccttgcaggttttgagcctacaatgtcagctcttgcccgctgcctcctttcccccacaacctagacagaggccacactcccctgtcagatcccagctcatgtttactggcctcttccttccaaatctggaatctcagccatttcctggagctgttcccggaaggccaaggccaggctctggggctcagcggaagagtatccagcctttgttcccaattgttcctggccagcttctctgcagggcccctaacccagctgacgccctcccttcctcccccttcccatcctggcttcggtgccagccacagactaacagcctgccaagtagaagtctccttcactcctcctctttcctctcaaactcagaccaatactgacaaagacagaactggagcaaggaaacaccatggtctctacaaactggggagtttgcagaggctaaagaataggcagagtgaaagtcatggagtggcagagctggaaggataggaattggggccagagaacagaatgtcactacccttggcacctctaattctgaaatcccaaattctgttctctggccccaattcctaccccaaattctgtgggtgtatccttacactaaccataactccaatcagagccttaatcctctatttaaatcttatccctggatcccaatccttatccctttaccacctgctagagaggaatgaaaaccccgggagtctcaggacacagcaagaagctgaggacagagggcagtggggctgcaggctggagaggctgagtgaagtggagcaggggtggattgtaacgccctggtccatttccccaggggcagatggaccactaggtggagtagggtgggagacaagaaggactcagagcgtctgggataagctgggagattcccacaggatgtgtccatattcagctcagagatggatgaaatcagcttctgtggagaccttgggcaaatctgtaaaatggaaatagtaatagtagttctctgtaaaatggaaatagtaatagtagttcctaccttgagggataaagtaatgatgaaatacataaagcataaaaccactggcatccagtgcctgatgcattatgagtgatccgtaaagctgagctaacgtgtatttattgtggggcaggcagaatggagtcgagtttatggggtcaaggatc

SEQ ID NO: 915456 - DNA, 4001 bp, Homo sapiens
tcagcatatctttcagcccactgggaaagagatagccctgggtctctcctcccgcatcaatgacccctccaagcccctccagtgctgtttgcaggtaccgcaggccaaggagcaccagagcctgtgggggaagcaaggggaaagagtcagggagagtcagcggttccaagaggcccagggttggaggcagggaggagtcccgggtgggaggaggtgtcagatgctttgctgactcacctgcagtaggaaggtgacagccagcatgctacccagtgtgcctgccaagtcctgcaagtgctccagcagcacctcatggcacccttgggcccagaggttttggttgggttgtcggggatcgaacagggggtgggcgtaggagtctgaaagacggttttgcaggcaaggccggggtgagtgggggttgcaacaggagaaagggaccccatcagtcaggtataggccttctacattgctctggatccggctgcaaagggagggacagaggggttaggatgtctggagatagaggcctgggggagggactgaagggcacaggtgttcagaagggaaaaagaatagtaaaacatttactgactgctgtactatgtgccagccaagcataattcacatcttcacaacaactctatcagataagtactattatttccattttacaggtgaaggaatgggcccagggtggtttggtaacatgccctgggtttcacagctaataaatggcagagctgtaaccagtctctcagccactatgttctacttattgcccctctgagcgaggtggggattcaaggcagcaggagggagcctgtccagggaggaggaggaggaggaagggagacgcaaatcactcactcagccacatcccggtcaccgggatccaggtaacggctgctgacccactggaccccaaaccaatccttgtacccgtggcgcccgcagcagtggtacctcagttgcagctcatccaccagccttttggcctgacagtgcccaggcacctctgtgtccttgtagtgagccaaggcagtcaccaggccctcctccagcgcctcatccagactcccaggcaaagccagggctagcccgaggccgacgaccaggagcccccccccaccagccgtgccagccaccagcagcgggcccaggacccctcgccagggagggtatagagctgcattcagacttgcccggctggctcctacacccactagtcctgtgcccagagccaccgcgcccgctgccagggcagcctggggcaggacagggaactgacaggagggagccaggaaggtgccaaggtgccttagctggaccaggaggtgcccactacagaggaggatgacgccaccagccagcgccagcagccaggagaggagccagagcccttgtgccaggcggatgcggggctgcaggggcagcaccaggggcaacaccggcgccatctcccatctctgcccaagggaatgcagaggtgtcagggatggaagctggctggggcaggatgctgagtcagcccggcccggcttgagctgggctaatgccaccctgaccccaataccctgagcatcctcccatcctcagccctaataacccgcccccctgtcagccccaatacaagatgccttggccttgccccttacgagaaactccgcccctaggccgagggcccgttttgtgaccccgcccctgcccctcgcggaagtggtggggttggtccgctcaaccctgaggggttaggggctggggggcggagatatcggggcgggcgctcccttccccgtcccctgggaatccgggggcggggatccgggaagggcctggagccggaggccgggagtaggccagggggtcagccggctagccccgcccccgtactgagcggcgaggcccggacagggaggggttaccaagcggcccggccccccctcgggcccgccccccctcccgcgcttcctggcggctccgcgtccggcgcctgtttgtgctgcggcgctgtggcaccggacggccctgccaccccacccccgggagccgagagcggccccgggagagtccgagggcccgggggggtctggagactgcggccccgggcccacagcgccccctccaggccccttccccgcgcccgacagcgccccctcggggtggtggtacggcgcccttcgcgcgcgccccggggtgcttccccttcccctctccccggccgtggcccccgcggcttagacgcctcctccgccgccgccgctcggagcaacccgggggccggatggacggggccgcggggcccggtgagtacggggcggggcgggcggcgtgccccttcccggagcgcccggctcgtcgggttatgccagagctggacggctgtctggaggcgtccccgcgtgctcctccgccccaggggctccgagcatcctccacagttcctccggtcgccctccctagttgcttgggtcttgctgtcacttcgggcttccccagcgtcattctacgccccacgtaactccgggcccctcgatgtttccctgccccctgcgttactccgggcctcttctcgtggtatttcaggtctttttccttctgatccccactgccccctgagaccttcactgtgactctgctcaccactcacactctctcctgtcactctggatctcttttcttgtactctgggtcctcagtatgactccattcccgcaccccgttctctctcctggtgttcccccggctcagttactcagctttcgctggagacctgagcttgctgggggcgcgtggggagggctgcggtccctgccctcaccagtgcggcgcctctctctgtggctcccacgttcctcggcagtactccatatttcccccccggtactccatggtactcccagtctttgcggaggctgagacggcagcaggaagggagctttgccaggtttctcgcctgccctgccagaaggaggcccttgatcctttaccaccgtctcctcccctctggacgagcattcaagcctggggctgcctgaaaggggcagtcctaccggacacatgtaaagttgtggggagacagaatcccctctacgctttcttcaggtgatgggtacattctgagtacctcttgcccttttcccaggtgacggccctgctcgggaggccctccagtctctgagccagcggcttcgggtgcaggagcaggagatggaactggtaaaggcagccctggcagaagcccttcgcctgctgcggctgcaggtgcccccttcctccctgcagggctctggcacaccagctcctccgggggacaggtatgcatgtcatcacaccccatttttcctcctccttggggcctctggggcttcaggttaattcaacatctctccagcagtcttgcagcccccccaggactgccacccacgtgcaccccttccttggtgagccgaggcacccagacggagacagaggtggagctcaagtcatcccctggaccccctggcctgagcaatggacccccagcccctcagggggccagcgaagagcctagcgggacccaatctgaaggagggggcagcagcagcagtggtgctggctcccctggccccccggggatcctcaggcccttgcagcccccacagcgtgctgacacgtaggtgtcctgtggccctgtggcggaagctgggaggggtggtaggattgcagagtacagttggagggaatgaccttcactatgcccccaccaggccgcgaagaaattcttcctcctcctcatccccctcagagcggcctcggcagaagctctccaggaaggcaatctcctccgccaacctgttagtgcggtccgggagcacagagaggtgggtgaggcttcccctcaacccaccccgccccaggcgcaggctctcgactttccatatccctcacctcacatccctggttggggtggggggacctgattgcccaacaggaataaagaaacaaacacttctggggcg

SEQ ID NO: 915457 - DNA, 4001 bp, Homo sapiens
cactctatggaaaatctacatactcctataataaacgtcttctgaatagccaaaatttatcatccactagtttgtgggtaggtgaatgtgaagcatgtctctaacctggtgactgactgtgccataaggcccacagccagtgaataaggtcagcagttactcttcgaggactctagcacactcaggcaatagccgatacccaagcgtgactctagcctcgatgacaggttctcagttcacaccaagtgttaacttggtaaaaaacagcaataggcaaggcttgcttctaaactttttgtttaagccagccctctctctgcccctacctcccaagctgtgtcaataaaagcagtccaaggacacttactatttgtcgaagttgatccggtggtgatgcagaccaccagcattaccgcggccgccggggtgcttccggtgcttgcctgcaggaatacaaagctacgtggggccggtgtgatggctcatgcctgtaatcccagcattttaggaggacgagggggggtagatcacctgaggtcaggagttcgagaccagcctggccaacacggagaaacccccgactctactaaaaatagaaaaagaattagccgggcgtcgtggcgcacacctgtaatatcagctactcgggaggctgaggcaggagaatcgcttgagcccggcaggcaggggttgcagtgagccgagatttcgccactgcactccagcctgggcgacagtgatcagtctcacacacacacaaaaaagctacatgcaccacacagccttctcatgcatctcaatacttcctcgcacaaaagcagagtgtttcccagacttctgtgtcccgcttacgctgttcccaccctaccgatgccggttttcagcaatgcgattactttaggattccgggtgaaacatcttttcaggttccacatcacagcattcccacagtactccatgtcttcaactaacccaataccgtgcctgctcaattcctattaccccactgatgtgaaattccttagaactggaatactagaggatcgtcagaaaaaaatcaacagctgtgcaacttgaccacaaaaaggtcttattctaacccacttataggctaccgatctccagactagctaagcacccgaagagagcccaaggcccaccccgaggggaagccggcacttacctatgcggccgtggccgtggctcacgtggcccctaagtttccgggtcttcctcagtctggatggctgtgtggaaaaagcttggtggtaaggcctaaggaattaggggcagggggcgatgcccgccagccgagatggtcctgtaagcctgtgggtcaaagacctaacttctggagcgtttgggaaagctgagggtaccgatccgctcagggccgtgaggtctcaccacggtagcgcaggggcccgcgtgtcctagagatccgaaccgcgggcctaacacacggctccgggagccccgccccgggcccgcgccggccaccctgccccgcaggcggccatgcgcagcctggaagccccgaccatggtagggagtggatgactaggggcaatgggaatacagcttaggggtctccgccggcaaggaagaggaggcaagaaacgaaacacctaccatgttggcagcccagacgaaaaaggaaggccttcgccaagtctcgcgaggtatcggccacgggggcggggcaaaacgcctcacttccggtcacagaggccgggcttcgggcggggcctcctggtctcgcgggattgcgcgcctgctagtcgcttcctctttctgagggtggtgatcccccatcacggagtgtcctggtggcggtgtacggtttcggtgaggctcgttgtgctaggctcggagggcgagaactgttgaagaatcggggctaggtgtgctgtactgcacgccgcccgtgcttgcttgagccaggcccttttctggcgccttggtcagggaaccgcctaagccgaccctaagggcctcgttgtctgagctcctcaccaaatgcgccagccctgagccgccccgcgcacctccacagttcttagtggtctgcccggggctggtgatagtggctactggtttgtctcccggccgcagtgcggaaccgcgaggccctctttaatcctcagtgtgcccacctggtgtctcgctcggtttcctgaagctcgggcggctcccgaaatgccttctcccgctctcacacttctgagtgggcactgcagcttcctttctcttttgcccttttgctatcatttggttgtcctctcaagtttgagcaacttaaattgcttcagggacttagatgcctggttgctttatggtccttttaatgcagatgttgtaaatactttttctaaatgccacatttaggccaggcgcggtggctcacacctgtagtcccaacactttgggaggtcgaggcgggaggatttcttgaggcgagtagttcaacaccagcctgggcaacatagtgagaccctcgtctccacatacaaaagtaaataagtaaaaataaatgctatttttgaattttctccagaatctacataacacgcctgtgaccctttcctggacacaatgcagacagttgctcgcttccccacctgtaccaccacacaatctagtataacccttatgtaatttattgacctacgtttgtcttccctactagacctaattccttatgtggtcaaggactgttttttttaatccacactcaactagtgattgttgagtgaataaatgaacttaccctcacctccctgtcttcgctaatagcagcatgtcttcgctcttaagtcggttccttcaaccagtgttcaagatcccatcccctcgctagtctattaatagatcccatgggaaaaatgaaataaatttttaaaatcccatcccctcagttattctctgtgtgtatgtgtgagcgtgtatttatttatttttctttgtcttgcccccttcagctaaaatatattttagctaaaatatccaaaattctggccgggcgtggtggcttacttctgtaatcccagcactttggaaggccgaggcgggcggatcacgaggtcaggagatcgagaccatcctggctaacacggtgaaaccccgtctctactaaaaatacaaaaaattagatgggcgtggtggtgggcgcctgtagtcccagctactcgggaggctgaggcaggagaatggcgtgaacccgggaggcggagcttgtagtgaaccgagatcgcgccactgcactgcagcctgggcgacagaacgagactccgtctcaaaaaaaaaaaaaaaaattccaaaattctcccatgtccttgcccttacagccaagctccccaaaagagtagtctacaaatcctgcccatttgcaccttcccatccattgttcactgcggtctagctcacagcctgtgacttcagtgaaattgctcttactaatgtcattaatgaacgaattgccaaattggactcttcctattcttcatatcacttgttctttctgttgtactttaatctgttggcgtctttttctagaaaaagtcttgccttcctcctactctttggtcacttttcagtcttcttttcaggttcttccatccagcgttgtccaccatttgaatgttgatgttcctcagccttctgtccttgtccttatcttttcacagtacatggtcttcttgggtggcttcaattcacatccttattgctgagctccacacccatatggtcacttaattactggttagtattccttggacattctacagacaaagtaaacatatccaaagaactcaatctgcactgctcactggtgccttctcctttattctctgtcttggtgagtggcaccattgtccacctagataatgaaaattgtccccaagccttctcttcttctactacactgtcaccctatccttttgtttctgtatctccccaatgtgcttcctctgtttaagccttagtgccctgccttcatt

SEQ ID NO: 915458 - DNA, 4001 bp, Homo sapiens
acaccaagcttcagacaaatcctggggaatggcctcagggctaggagcagtcaggcttaagaggcagggccacctaaacgtctgctgagaacacagggtgccccctgctgccctgctcctgagagtgtctagaagtgcccatgacgtgagcccactggagccctgctcactcctcgggtgaggcttctagggtgctctggtccacaagcgaaacctggcaggccacagatggaccggcagggattaggatggaccatgaaaacaaacgaaagcccgtccacatcaactcaccctgggcaatgacgtcttcaatgttttttccattcagctcactgataacctgaagcagacaatcacagggctgttaccaggaatgtacgattgtatccccggccctctccctcccagagtcacagcaggactgggttccccacatgggaataggccctgaagtttccagaactgcactgcccaaagggagccaccagcctcacttgggaagtgatataaaaataaatggacactagctttcttagacttaggactgacaaaaggacacagggcatctcactacttatgttgactactcataggtatcttcaacactggcaaaataaactggcaatgaaattgactttgacttcaggctggagtgcagtggtaggatctcactgcagccttgacctcccgggctcaagtgactatcccacctcagtctgggactacaggcatgagcaaccaagcctggctaattttttattgtattttagagacgaggcctggttctgttagactgcagtggcacaatcactactcagtgcagccttgacctctaaggctcaaatgattctcccgcatcagcctcatgagtagctgagactacagatgtgcaccactgcctccaaccatttttttttttttttttttttgtggagaccgggtcttgcaatgttttccagaccagtctcgaacttcaaggctccaataatccactcgccatggcctcccaaagccgggtgagccatgcgccaggactgcttttttttttttttaacgcaatcttacgcagctcactggtattaaacttccaaagcttgttaatcacgattttgcctcgtacccaccctgcttttttttttttttttccttttgagacagggtctccttctgccacccagactggagtacagtggcacgatccgtgcaacctccatctcccgggttcgagcgattttcctgcctcagcctcccaagtagggggactacaggcacccaccaccacgcccggctaatttttgtatttttagtagggatggggtttcgacatgtttaccaggctggtctcgaacccctgacctcaggtgatccgcctgcctcgtcctcccaaagtactgggactacaggcgtgagccaccgcgcccgacctccgcccggcttacttctctatccaagaaatcgccaactagactgaaacgagcctctccccgaaccctccagcatgtggccggatcaggcagaagaatcgcctgtatgggacactggggccccacggcggctgcggggcaagggcggccgctaccttgttgagccggtcgtcgtccgcctcgatacccacgctgtccaagatcttcttgatgtccttggcgctgggggaggagttgccccctagggcagccagcaggtaggaggcgacgtagcgcatcctgaggcgggcggagaggacgcgacggcggagttaccccggcggcctcctgccggcccatcccggggccgccgggcgaggccgcgcgtggctcggcccgtaggcctccgtcccaaaaataccccgccgcccaccccgcatccccacggactccgcgtccccagccggcaccccgggcccggtcaccacactcacgcggcggcgtctgcggcggaggcggcggagaagtctcacgcgtgcgacctcggtggcgacagggaggaaaaggaaggcgccgacgcaagaggcggggttaaaccgctacccagaaggctctgggacccgtgcgcggcgccgcatgaggcgcctcagagtgacgtcacgaggcgctcagccaatgacgacggggagggagtcgttgactccttccccctcccccttcccagcccccgtcaggcacttttcgcggcaaaggcgaagggcagcagttccggaagtgactgctcttatagcgtggggcgaagggccaccgaaactcgtgggggcgttggacgaagcgagtccaaagggacggcatctgccttcggtacctagcacccccagcatgccacgcggcgcctacagctcccaacatggagcgcggccgccacgcccgggactcaacctttgccagcgaactgcaagtcccatggtgcaccgctgccggaagtggcctgcgccgcgggcctacccggaacggcgcgtgggcccgggcagaagctgctggcggtaggctcgccttgactccttggtggttccctggccgcggcgaccggtggtcccacgtccagccgggctcagtgaggtgagccagccgcctcggacttagcgactgcggccctatctgggaggccgcccccgcactgcggtgtcagggcatcctgtcagaggacgagcgcgggccttggagggcaggacaatgacgtgaggcagcgtcgcccgctcacccctgcgaggagtgaggtctgagtggtcagcccctgcgctggccgctttggcccggaactgacctcggtgtccatgtggacatcagcacctcagggaccccgctacattctcgggtcctgggagggaacagggttggccctgcctcctaaggacttgagttcttgtgcgaggacgcaggaggtgaatagggaggcgatccgaaggacagggacagagggagacttggtcctctgggcagcctgagaaagcttgagctgagagatgagaaggagccatccctgccaatatcccgggcgagcaccaggaacagggtcagatgcaggtatctaccgtgttagcaggcagcgccagctcccgttgggctctaacagcagtgcaaaccctggggtgtgtatacgtcaagcactggaactcgacttcacagtcgccttctgtggcctcgttatcattacccccattttatagatgaggcagttgggtacagaaaggtttttttgctcagggtcacacatctggggtaaaggcgggaaaccatcttgggaacaatgggacttttcttattttgtaatttttgagactgggccccattctgtcgcccagcctggagtgcagtggctcgatcacagctcgctgcagcctcaacttcctgggctcaggtgatcctcccacctcagcctcctagcggagaccacaggcgtgtgccaccacacccggctaaaattttttggtagagacagcgttgtccaacatgggctcaagcgatcctcccacctgggcctcccaaagtgctgggattacaggcgtgagctaccgcgcccggccccaacttttttttttctttttttctgaggagtcccactgttccccaggttggagtgcactggtgagatcttggctcactgcaacctctgcctcctgggttcaagcgattctcctgcctcagtctcctgagtagctgggattacaggcacccactaccatgcccggctaatttttgtatttttagtacagacggggtttcaccatgttggccaggctggtctcaaactcctgacttcaagtgatcttcccacttccgcctcccaaagtgctgggattacaggcacgagccactgtgcccagccccatctcactttttttttattatcccaaacaaactctgtacctattaaagtccctattccctgctcccccacccttgataaacacattctactttctcttcctatgattttgacaactgtagcaccccgtaagactgaaataatacagtattttgccttttgtgtctggcttttttcattcagtgtattttcagatttcaagtacctac

SEQ ID NO: 915459 - DNA, 4001 bp, Homo sapiens
atgtgatgatgtcaaggctcagaaatcagggcatagtttcctatctgtaagatgggggtatacttttatacatcacagaaaccaacgtgagaatgcacataaagctcactcagacatccaaggaaggtttacccaacactaaggaaaacctttctggtggaaactgcgaatgttggaaaaccatcatcacagtgagcttgctggaatacagatgaccaaagggattaatgagattccacagctaacatttactgagaactctggtcagatattcttctaaaaactttacacgttatttcttttaaacctctaatgagctctgactacttacaatctatgacatattttcttttgatgtgtcatacctccaattagactacaagctccaggagtacagatattttgcacccccctcccccttttaagaggtgggatcaggtggtgtggctcacgcctgtaatcccagcactttgggaggccgaggcagtggatcatctgaggtcaggagtctgagaccagcctggccaacatggtgaaacctcgtctctactaaaaatacaaaaattagccgggcgtggtggtgcggcctgtagtctcagctactccagaggcagaggcaggagaattgcttgcttgaacccaggaggcggaggttgcagtgagccgagatcataccactgcactccagcctgggtgacaaagtgagaatcggtctcaaacaaaaacacacaaattagctgggcctgctggcgggcgcctgtaatcccacctattcgggaggctgaggcaggagaatcgcttgaatccaggaggtggaggttgcagtgagctgagatcgcgccactgcactccagactgggcgacaagagcaagactgtctcaaaaaaaaaaaaaaaaagaggtggggtctctctgtcacccaggagtgcagtggcttcatcatagctcactgcagcctgggacttctaggctctggtgatcctctcacctctgcatcccaagtatctgggactacaggcacattgcggctggcttttttgggcgggggagtcggagagtagtatgttctcaggccccagaaccatgttcagcacatagaaggtaaacatttgctgaatgaagccacttgcacgaagtcacacgcagctgagattcaaaccacacctaactgtgaggaactgtgtcaggcactctgcttagccaattccaactcctccacttgacagctgtgtgatttggggctggttagtatccagcggcagtgtgcctctgcttcctcaactgtaaactggggtgaaagccatgaagatttatttcaaagtattgtggtcagaattaaacgaaatcagtacatgtgaagtgcttacaatgatgcctctagcacggtggcgagaccagagttttggctatttttaaaataactttaccacctactagatcctacaagtcacacgaggacaggcgaaataggctatgttagacacaaacactcaccgatctgtgaaggagtaaggcccttcttggccagtttgtaaatctgctccttcacgtcgtcagatgtcaacttcaaccactgttatggaatagaaagcagccttaggatgagaacccaggaatggcgccgcagaacagcggtctctccttccgcaaaaccgcgctcctcatacacgcaagttcctcaccctggcgtcgcttcacccgagacaaatgccaaccccctccccggattctccccggtcccagcgcgctacttacagtggggacgctgcgtcgatagggtaaagccgactgggacaggcccttcctggggagagaagcagtctcgaggtgaggtggcggctagtgccagagcagcccagaacatcatcccctcggcccgctgcccacactccctgtcttcctcccaccccccgcccagcaatccggcttgatgccccgagctcacccgggagcatgcatgcgacccatgatggcggcgatcaggcaacgaaaggagagcgagagtggaaacgccgcaggaagccacccaacacgcaggaagtgacctcacacgtccccgcttcctctcacgcaggaggcggagctacgctgcgcagccaccgcccgtctgtgtgactacatctcccgaaatgcatttcagcgtcgcaagagatcgtcaatccagcctcatcccggcatgcatcggtctttggtcagccttgttgccagagcgggaatttgaggctgacgccagcttgcgtcgaaattccctgtggacgccgagatcacaaagattcgaatgctgcgctgggggtgggtatggagcaggtagggctggaagaagcagccatacacaggtgtttgctcattcaccagtgcctggctttgtcctggcactagatccctcagagtcggccctgcgcctaataaattaacagatacaatagcatgtgatgaggaccacacgggaagccatggcagcggctaccgcccagccagcgcttccatttctcatttctaaatcctaccctaatctgtcaggggagagtcgctgacggtgaagaaccggtctaaggagttgaaccaggtccccacggatgcctgccgccctccgcactcgaattcccctgcgcagggctctggggcgctgggctcgccggggagaagggttgggcagaggcttacggagctatgttcccaagtgagagagttggcgggcagggaagagccttgggagcaagactgcaaaggccaagaggatgagggataaaatgaagcatttgaatttcatgggaaaagggaaccgtcaaggaagaagcttttttttttttttgagacggagtttcgctcttgattcgcaggctggagtgcaatggcgcgatctcggcttgccgcaccctccgcctcccggcttcaagcgattctcctgcctcagcctcctgaatagctgggatcacaggcatgcgccaccacttccagctaattttgtatttttagtagagacgggtttttccatgttggtcaggctggtcttaaattcccgacctcaggtgatccgcccgcctcggcctcccaaagtgctgggattacaggcgtgagccaccgcgcctggccggaagaagctcttttaagacagacctagcctgggcaacatggcgaaaccccctctctataaatacaaagaattagccgggcgtgctcgctcgtgcctttggttccagctacgaaggaggctgaggtggagaatctctggagccgggaaggacattgcggtgagccgagatagcaccactgcgcgccagcctgggcaacagagcaagactctgtcttaaaaaaaaaaaaaaaaaaggaaagaaagaaaaagactgactcagtgccggtacacaacaatgcgttgaaagaatgggcaaatgaagcagcttcttaaaattttaaaaagtaagcatagctctaggaaggagggaggtcagtgaaatcaaactcctgtcgacaagcttaaagtaactggcaagacgctgggaaactagatactgaaacatccgctcttaacttttaacctgtcactatttgaaataaagttatcagggatagccgggcgcggtggctcacgcctgtaatcccagcactttgggaggctgaggcgggcggatcacgagatcaagagatcgagaccatcctggctaacacggtgaaaccccgtctctactaaaaatacaaaaaaattagacgggcgtggtggcgggcgcctgtagtcccagctactcaggaggctgaggcaggagaatggcgtgaacccgggaggcggagcttgcagtaagccacgatcgcaccactgcactccagcctaggtggcagagcgagactccgtctcaaaaaaaaagtatcagggataaagagagaaccctttataacaacaaacgggtcagttctccaagaaaacaacacccctcccccccaaaaaagccataatctgtcactatttgattaataacttttcccaaagcattaggaattttagtcaa

SEQ ID NO: 915460 - DNA, 4001 bp, Homo sapiens
ctcttgagcccaggagaccagcctgggcaacatggcaaaaccgcatctctatttaaagaaaaggaaaacaaaaagacagagttctctcagaggtgcccagaatggtcttaaaactccttggctcaaatgatcctcctgctttggcctcccaagtagctagaaatacaagggtaccactgcacctggctccagaattgcttaatctgacgttcggtaaccgagaatcctagtttttaacgatcatctatccttacttttcctttaaattagggctccattatcttccaccccccccccctttctgagacagtcttttgctgtcactaaggctggagtgcagtggtgtcatctcggctcactgccacctccatctcctgggttcaagggatcctcatgcctcagcatcctgagtagctgggattacagacgtgtgcccccacgtccagctaactttcagtagagcaggttttcaccatattggccaggctggtctttaactcctgacctccgttgattcacccgccttggcctcccaaagtgctagaattatagacgttcagtcactatagttagctgagccttattattgtggaattatggtaatcagaccatactactgagtagaccgtactaaatttctggttttaaaatttaatacatcaacaaaatatttaccataaaggttttaaacattttcaaagttgtttcaaaatagtaatctaattatttcaaaaacggttgtccctgtaattctatgcatccatttactcgaaacataaaagatccttgggcttcactaaactgccacagggtccacggcacaaaagtggctaagaaccctgagaattcatctcaggatcaggagtaagacgtcagaattacattactaacagccaatggtcaagccacgctttttttttttaattctgcttttccagcaaaaccactgaagatgcttaacatggtcaagacaatttaacctacaaaaacacacatgtaggatacacccctcacctttactaaggagctcctgaagggctgccctggccagggagcctcgaatcttcagtctctcagagaccacagctggggttataagtttatagttgggaacttccttacagagtttatcataggtagctttgtcaaacaagactaagttattgagcttgtcccgaactttgcctttggaccacttctgctcaccaaaacaaaacagaaacaagttagtatttctggcagaagcaccctttccctctcgagtaatctgcgtcagagaaatctgttccaccgttatcaaggataaattacacattactaaaacaaaaacaaaaaaaaaacaccgacacgtttttggccttcaaacaggggccgagccccactagatcagttaaaaataacacagcaggcacagcggcagacacttcgcacaacagacccattttcatgatcctaatgggaaaaagaacgagtggtgacgggaagataaactctcacattttgactctagaaatctacacctgaaaaaccacttactatacaagttacctattactagaggattacgagagagttacccctagtctctttcagagaggtcttatttctaccttctttttggccttgcccccggatttgttcactgggtctttgtctttcttggccgactttccagcgtccttcttcttcttgtcgtccttaggcggctgtaggagggcagcgggaatgcaaccaggtcctcaaatagcgccaaagtcccctaatactgcgccctcagcccccgcaaactccaccaccagagcacatgggccaagcaataaccgcgcccgccctgcaaccgaggccggcaggccaaggagcgctcccgccgaaggctctccccactgagtcctcaaacccaagaacgccggcgacttcacacccctgaagcttaccattgcgaagctcggagaatagcagcagacaccgcagcctcgtcaagatgtcggacaaaaaggaagcgctgctcagaaacgggcccaaaaaccaccgtccgctgtgagtacttccggggcaaaaggcggagccaggcagaagaagtcccacggcgaagcgctcgccctctagcctgaggcggaagacaggaagtggattctagttcccaagccgcaccgcctaaatactgccggagtctgcgctagttgtgacgcatactatagcgctgttttcctgcactgataaacgaaaagcaatccaccaggtctcggcagctaactttccggcactacttatgcccgagcgtgtcgctcccagtgcgcaagtgcagcaggtggctgcacggggggcgcgggaggaggaggaggaggaggaggaggctggggtggggccggcggcaagtgctgtgatgcggttccggggaggggccgtcgggtagaggctgaataccagtttccgagcggcaaggcagcgatggcgatttttagtgtgtatgtggtgaacaaagctggcggcttgatttaccagttggacagctacgcgccacgggctgaggctgagaaaactttcagttatccgctggatctgctgctcaagctacacgatgagcgtgtgttggttgctttcggccagcgggacggcatccgaggtgggctaggctcgggcccgtggcgggtgcgggggtgggagggccccagtgctgtagaagtgggctggttgtaggtgcggggttgggggaaaaggggttgtgtcgggtcccttgtcccctcggcggaatccccgggctgcaccttcgctgaccgttagcttcacctctgcagtgggtcatgcagtgctggccatcaatggcatggacgtgaatggcaggtacacggccgacgggaaagaggtgctggagtatctgggtaaccctgctaattacccggtgtccattcgatttggccggccccgcctcacttctaatgagaagcttatgctggcctccatgttccactcgtaagtcccccgtctcctgaacggcagcgcttgtaatttgtctaccttttcttaaatcgtcgttctggtgttatgaaaaacgcaaccgatccagatctagattttaggtaataacggcagtggtgtcatctttttttgctgggtggggaggggccgcggagttacccaggctggagcgcagtggcgggatctcggctcactgcagcctctgcctcccaggttcaagcgattctcctgcctcagcctcccgagtagctgggattacaggcgcgtgccaccacgaccagctaatttttgtatttttagtagagaggggttttgccatgttggccaggctggtctcaaactcctgacctcaggtgatccacctgcctcggcttcccaaagtgctgggattacaggagtgagccaccgcgcccggccgaggtgtcatcttacttaaagtcaacttctcttctctgagccttagtttcttcatatttaaagaaagccagtttaactaaatgacctttaaactttttctgctctcaattgtgatatcagatgtgccggcctttgcttaaacacaagcttagtaagcgtggcacatattcctagagtattcattttacccaaagttttagatgtaaaatgtcttgtaacaaagtatgaatgtaaaatattcacagaattcaaatgaacttagaaattttgacactactgccagtcagttcacactacttctcctgactgtcccaggctgtaatgtgaactcctcagcaaatagggacacttcagtggaagtttgagaagcactccttccttagagcaactttgcctcctttgcatataggctctttgccatcggctcccagctgtctcctgaacagggaagctcaggcattgagatgctggagacagacacattcaaattgcactgctaccagacactgacaggtatgcatctccacggaggccagaggagtgtgatggagaaggtggggaagagatactgataagtttgcatctccaggtgggccagaggagtgtgg

SEQ ID NO: 915461 - DNA, 4001 bp, Homo sapiens
ttgagacagggtctcactctgtcacccaggctggatcacaccaatggctcactgcagcctgaacctcttgagctcaagccatcgcctgcttcagcctctggaataggtgggaccacatgcatgcaccaccacacccttttttattttttgtagagcgggggtttccccatgttgccccggctgatcttgaattcctgagcttaagtgatcctacgcctggccttaaaatctagcttttaagaagcaattacattcactaagcccagattcactgttccgtctgtccccttaagttcataaaggataaacctgccgggcgcggtggctcacgcctgtaatcccagcactttgggaggctgaggcaggcggatcacgaggtcaggagatccagaccgtcctggctaacacggtgaaaccccaactctactaaaaacacaaaaaattagcaaggtatggtggcgggcgcctatagtcccagctactcgggaggctgacgcaggagaatggcgtgaacccgggaggcggagcttgcagtgagccgagatcgcgccactgcactccagctttggggacagagcaagactccgtctcaaaaaaataaataaataaataaaccaacttagcatttataacaattataggtgatggccagtcaaatgagttttacctggtggctaagataatgatttctgtcctggttggtgtaactcgcacctcaactccagagtagccatcttcagccagctcccgagtaagaaactcattcagttcagctttgaagatgccatcagcgacaaactaatccaaacaaagcaaagttcaaaattaggagatcggtgtaggctcactttcgcctgagccagtctagtcttattagtcaatgcatccctcaccaaaactaaatacctccaaccaatggttccaaacccttgttccaacaggagtgcagcaacccttctcagacaaatgcctctaagtcatctttaggaaattacttcaaccagggctctttaaactgtgccacagaacgcagcacagagtaggccacctgggcaaagagaacatccccaagtcagactcgtcatcatctcttcatcgaagggtttaaaacagttccacatgcaaaacaagaaactgctctaatggcctatttacacttcattcagcacagcaaagacactgtacttgtcactgttaaggaatagatagtagacttaacatataagctctctcacttgtagacacaacctgcaccgtctaaagaatcccagccatgttatttggctttacggtaccaacagagctggcaaatcctaactctcgagaagttgtggatttaattttgacatcgaagtgtatatacgaaatgacaaactgtctatttttaaagctaatgatttttacacagttctatcccatgtaatgacaaggcgttaaatccgaggcagcttcctcccggggtccccagacggagcaagcaaccgtcagcaacccttcaagttgaggtcctggggccagcggactgtacccagaaacgaccagttaaggcaagaatacactgctgccttctcttcccaaaaccacgggataagacatgagggaaatgacacacgccctcaaaataccacgtttactaattccgttgaccgacaaatgctcacaaacgccttctccgggacagaaggggcgcctggtgcccatctctctgcgcttcacttggaacccggccacacagcgccctcctggctggggcctctcactcaatccaccgccatccgcggcccgcaggaacgccaggaagcctaggccgcttccagggcaggccacggagctgcaggcctcgcggtggcaccccgagaagccctcgacccgcgcggcgccgtcgttctccgaacccagtccccagaggctcaccttcctcttcttggatatttgcactgccatcttgccgccgcgctccgctgaaaggaaaggaagtggctcgcgggcggaagtgagtataaagggcgcgagcgacgacggagggctgcgctgcgtgcacgcctgtgggtgctcatgggaaatgtagtttttacgtaagtaaggcgtccagggaaagaagaatgtaggcaggaacaggaaaggggcttcatccagcaggacttctaaacttcaggggaccttagagttcaattctcatagtttcaaaacaagcaatgtgaggtgcagaggtggaaattacaggtataagttcacacagcaagagagattaaccagcgtggaactctggcccctacactttcagggtggacactgtaatgaaaatctgctgaaatccctcagtgaaactcatttaagactcctctttgggaggccaaggcgggcggattacttgaggtcaggagttcgagattagcctggcgaacatggtgaaaccccgtctctactaaaaatagaaaaattagctgggagtggtgtcgggcacctgtaatcccagctactcgggaggctgaggtgggaggattgcttggacctgggagatggaggttgcagtgggccaagatcctaccactgcactctagcctggaccacagagtgagactctgtctcaaacaaacaaacaaacaaacaaacaaaacaactcatgtcccccagtctgtacccatttcctccattccaaatgataataataaaacctgatacttactaagtgtcctagggactgcgttctgtgtcctttatgttgttctcatttaccccaccttactttcatcaagtccattacaatttgtaacagaagtcccagaaggtcccatgggcccgcccttccttccttccttccttccttcctctctctttctctctctctttctctcctttctttcttttctctccggttgcccaagctggagtgcagtagtacgatctcagctccctgcaacctccacttcccaggttcaagtgattcttctgccttggcctcctgagtagctgggattacaggtgcacaccaccacacccagctaatttttgtatttttagtagagatgaagtttcactatgttggccaggctggtcttgaactcctgacctcaagtgatccacctgccttagcctcccagagtgctgggattacaggcatgagccaccgtgcctggccttctttttcaattaaaaaaaattctagccaggtgcagtggctcaggcctgtaatcttagcactttgggaggccaaggcaagtggatagcttgaggccagaagtttgagaccagtctgggcaacagaatgagacaccctcatctctatgaaaagtgaaaaaagaaaattatccaggtgtggtggtgtgtgcctgtagtcccagctactctggagggagatgtgagaggattgcttgagtacaggaggtctaggctgcagtgagccgtgattgtgccactgcactcagcccgggcaacagagtgagactcagtctaaaaaaaataaaaaattaaaaatgtcccttcattttttaatgaagcttacagaacagttgaaaaaactgtacgtgtatgcatcaccaagctgagggggaattgagaatgatgctacaattaatattttgctgttgctttatcgtggatctactcatccctgtagccacccaccaatacatcttttgaggcatttcaaagtaagttgcagacattggtaaactttacccctaaacacttcaataacagttttattttatttatttatttatttttgagacgaagtcttactctgttgcctaagctggagtgcagtggtgcgatcgccgctcaccgtaacctccacctcccgggttcaagcgattctcctgcctcagcctcctgagtagctgggactacaggcaagcaccgccatgtccagctaattttcatatttttagtagagatagggtttcactatgttggccaggcttgtcttgaactcctaaccttgtgatccgcccacctcggcctccaaaagtgctgggattacaggcgtgagccaccgcacc

SEQ ID NO: 915462 - DNA, 4001 bp, Homo sapiens
tctcggtaaatgatgccgagctggtaggagcaagaggggtgctgaggcttcctccccgaaaccctccccagctcctccagctcctggccctgctcaggataaggagaccccccagagaaagtcatctgcctgtagagggggtctccagggcagagccactgaataagaaaggccatttaagatataaaacaaagaaggagggccccgtggatcaggccccaaggtcccagagagaggaaagtctgtgtgaagagctccatttcaaggaggccttaggagccaggccgtgaggtttccatttgaggaagttctgtgaacgcagccccgagttccctgaaagaggaaagccccttcgaggaggtgccaggggaggggaccccaccaggcaacgttgaggcttcctgcaaggggtccaggggaagcagctccaattcccacccagctcaccactggccccccaggaagcccagggggaagcctgaggctgccctgcgtgcagattccttccaaggcacagacccagtttccatagcaacagcctgcggccaggtcttcacccaccttgtgcaggtgttccagggccagcacgatctcacccccatacacgcgcacctcagcctccttgaagtactggcgctggtagaggtgggtgaacatctccccgccgctcacatagtctgggaggtgcagtggaagtcaggaagcagccccgtcaggtggcctcgcctgcccccagccaccccaaccccgttgggatgtggtgtgcgctcacccaggatgaggtgcagcttggcatccgtctggaaagcgtagtgcagcgtgaccaggaagggcgcctggcgcaccagctccagcaccgagcgctcggtgcgcgtgtgctcttgcgtcttggcgcgctgcaccagcgccgccttgcgcagcaccttcatggcgtacagcttccccgcgtcgtgcccgcccgccttccgcaccaggaacaccttgccgtaggctgtgggagcagcgagtgggtggagggtgggctgtgagcgggagattggtgcaggcttggggggtgggggcgatgccaacccaggagggtgtgcaaatgaggcgaaggagctggggcaacaggcaggtgtgcaaaaagctggcagagccttctaaggaaagggtgtgcacaccccgggagggtgcccagcaaaaccagggaaaggatgtgcaaaccaggctggggagcatgcatctccagggggcctgctgcgaggcatgggggcggggcatatgcaaacctgcgagagatcagatggatgtgaaaagatgccagtgcaaggaagggaggcagaggtgtgcacctggctggggaagggatgcgcaaaccagcgctggggcatttgcaaaatgtgggagggggatcccatattggaagaaagggaggagctatgcaaatcacttgagaggggcgccagtccccctccccagggtgttggcaaatccaggggggtatgcacgcacaggaccgtggagggaggagtgatgtcaatgtggagtgccctggaagtgggcatgcaaactctggcgaggcagggcggggcaggcaaggcaggctgtgccgggaaagggtggggggcctgctcagtggcctggcccaggcccaagagtgagcaggcaggaggtcaggggcaccgcgcctgggacgcctgcccggtggatgggggtcctcacctcccgtgcccagcaccttgagcagctcgaagttctccacgctcaccttctcctcgtgcccggtcaggttggctgtgggcacagggggcgaatgagcccagccggtccatgacccgtcccggcctgccccgggcagccgcagtcaggccccacacccaccttctgtgatccgcagctccacggcgcagctctcatcgtcgtcctcgtcccccatggcgggcgggtcgctggggcccgcgcggctcgggctccgggcggcgccggttacatggcggctccggccggggcgggcgcttcctggtgccgcctccggggccgaggcgggcgccggcaccgcctcccggctccccgccctgcgcggcctgagtcaggcggctggaacgtgacagcgccgggctgccggtgggcggccggctggggccgccctgtctcccgagcccccaggccaggcctcagggccgtgcgctccgggaccttactcgactctcccgggaactggaaacaccccgtgggagccatccctgagcccgtgggtaacctggagcctctggggcattagtccccaagccaggaatctgcccgggaatgccggctgcagccagtggctggaggacattaggagtctgtgccccaaggtgggggacgaggtgcctggtgctgggcaggctgagagggggtctggatcctggaagtcacccaactctcaggcagtggagcccaccccactccatcgtcctgggggtggccagcagggcccctctccccagaggactggcctttgcaaggaggagcctcatcaccaagagggggctggagcccggcctgggaccccatggcaaggagaggagtggccagttttctgaccagctttctgtcgggggtgcctgcagaagcacttcagcccccagtcaccgtgcagagcccaccaggtgccatgcgcacctcacgtgttctgctcctgttgtctcctagcctggtgcagtacccagcttagagccctgagcaggcctcaagaagagatgtcagtgccacacggggctgccccctctccccatgaggcccagggcccctgctgactggtcctcctgagcccctgctccgtcttcttcctgcctttcccttcctgaccaccaatggggccacctagcagagtgggacagccatgaggccccacaccctgaggccggtgggaggggctctcagctcctctgccagctggagaggccagggtgtccaccccacgcccctgtcctgtgaagccctggctgagaggaggaggaactcaagctgctgcaggtcacacctgggaggccggacggaccgtccctcccagctctgcaccccccaagttcaggctgccttatctcagccctgggcagctccaccctcccctgggtggccccaggtaccctgactcacatcctgcaccccagccgaattgccccgcctctcaggcatcaggctagaggccctggtcagagagccagcgtccctcccacctctcctggcaacccctggcattaagtgatgccccgccaggctgagaactccctggggagggggctcaacctcaaggagggaggggagatgagtaggaggaggatgtgaacagagagaagacagtgccctgggagagggtgggggcggggcaacaggggcttcactgccccacacccctgagcccagatcttagaccccaatccctgctggctacccaggatgtcatcccctctccacctcaccaggacatccgggctttggccggccggactggccaagaccctggagaaaggcctgtgctgccctgtccaggcaggggccctctgcccacagacccccaccaaccagcaggactggggcggcatgtgtcctggtgccctgaggtacccagtgcggccaacagacagagcaagactcaggaggctgcagttcagctttattctcatgcccctcatgtccagttaaggctcaagatcagcccaggccacagtcccccagcactgggactcagcttcccacctggacagggcagggggttctcttgccaactcctgccagcctccttcagctgggggatcccccagagaccgctgcctcagcgggagccacctggaagaaccagaactccagcctggagctgctcgtgggggccagccatcccccctgtccacacactcgtcccagctccatctccgggccccggcgctgaccgtggaggatctcagggcccaggcctccttgtccaaggactccccttggggtccctggctccctgagctcttgggctgcctggggcc

SEQ ID NO: 915463 - DNA, 4001 bp, Homo sapiens
aaaaaaaattagccaggagtggtggttcacgcctgtaatcccagctactcaggaggctgaggcaggagaatcacttcaccctgggaggtggaggttgccagtgagccgagatcgcaccactgcactccagcctgagtgacagagtgagactccgtctcaaaataagtaggtaaacaaatagaaatacaaagattagccaggtgtggtggcacaagcctgtagtcccaactactcaggaggctgaggtaagagaattacctgaacccgggaggcagaggttgcagtgagcagagagtgcactactgcactccagtctggggaacaaagcaagactccatccaaaaaaaaaaaaaagctagggacggtggctcatgcctgtaatcccagctcccagcacgttggaggccaaggcgggcagatcacctgagattaggagttagagaccagccaggcgaaaccccacctctacaaaaaagtacaaaaattagctgggtgtggtggcaagcgcctgtaatcccagctactccggagtctaaggcacgagaatcgcttgaacctgggagacagaggtggcagtgagccaaaatcgcgtcactgcactccagcctgggtgacagagcaagactccgtcttaaaaaaaaataaaataaaatagtgtccagacactgttgtcaaatgtctgctgggagtcaaaattgcccccattgagaattactgcaagacaatacacatcacaacagacaataaaccagcaaacgccaaagtcagggatcctcctccactgtgttccctgctgtcttcccaaagcctggtacagcatgttgggaatggcagccacacagtattcgttggctgaacgagtgactcaccttccttaggactttcatggcatatattttgcccaagttggtgccttgcacctttcgcacctggaacacctgtagggcaggggagacaggatcaacttccctctccacatcctatcttcaagaagccccaccctgaagctctggctttgggatcaggaggcctaggccctgccaagggtggggcagtgaagatttcaagtccgattggagaggatttggccttccctcctttatgtttctggctctgaatcccattagaggccctgctgattcacaagtctaatttgttttgagaaccctttgctgcctccagatggaggctgtgaggccaggaggagggtgcgcccgcccctaccttgccatagccccccttgcccagcacacgcagcagctcaaagcagtggggcccgatgcgctctgggccaacgttcacgctggtctcagtcagctccacctcttcatagtgtcccacaggcctacggacacaaggagttaatgaggacaaggctccagtgctccccagttccccttccccactccattcccccctcccccaacacgaccctcactcactctaggccagctgccctcaactcggcaaggggacatgcgtcctgtgagaaaccgaggggtaagagccaaggaaggtgccaggatacctccccgctcccgttcaggttggactgcgtggcccaggagagaagggtgtcagggatggcagctagtaggggatgggtaagaattgggaagaaaccgaaggcaggaaagggagaatcgggagaaaaggctggggttctggaagagaggtcggggtgagggtgggatcagaacttaatagagaccgggatctgagaaggatctgggtctgcaaagagtcggagcccgctctgggcgtgcggagccgccgctccggcctcggctgggtgacaggatcggctccaggatccagtcgcgccagggcagggcactcaccgcggggctgagctctggctcgccctcgccctcgctgccttcctccgtctccaaatccaaatcaaacacggccgccatggcggcgccggccccgcgggcccgtcggcccgtacctggccgcgcactgactgacagtcccggacctaaacatcatctctccgcgacggcagctgcgcgcgccggtgacgcaagggatcttactccccctccggaaaatcgcttagcctggtggggaacaaagatggcttccgtcgcaaggcctctcgggaattgtagtcctagagtggcgaggcgcctagccttcagcctgcagaatcctttccgcaggaccctcggtcttcccagcaaggctttctgggagcccgttttggttctacggtgttttgagtttggatggagcagggtcggaagtgtatgcaggtgtgaatgtaaatgcaatccccagccctgttggagacgggtactgccaggccggctgcgtgatgaaaggcaggtcgcgttgctttcggttcactccagaaagggaggcggctgcatcagggtctcctcaaagtgcctctggctcgaggaccctgcaaatcggagcatttactgagtggccagctcactgccaggctatgttgccaggttcccgccttaaatagggttttgggggtcagtgatagacctgtaaatatgggattttgttggcgtttactcccttcttaatttaagcacatttaggcacctggtacagaatagacacttcaaaaaacgttgttgaggccggacacgatgcctcacgcctgtaatcgtagcactttgggaagccaagttgggaggatcacttgaggccaggagttcaaggttacagtgagctatgatggtgccactgcactccaggctgggtgacacagtgagatcctgtctcaaaaaaacaaacaggccggaggcggtggctcacacctgtaatctcaacactttcggaggccgaggtgggtggatcacttgaggtcagaagttggagaccagcctggccaacatgatgaaactctgcctctactataaatacaaaaaattagacgggtgtggtggcgcgcacctgtactcccagatactcgggaggttgaggcaggagaatcgcttgaactcgggcgatagaggttgcagtgagccaagattgcaccactgcgctccaggctgggcggcagagtgagaccaagtctcaaacagataaaacccgaaaacctggctggtcacggtggctcacacctgtaatcccagcactttgggaggccgagccaggcggatcacctgaggtcgggagttcaggaccagcctgaccaacatggagaaaccccgtctctactaaaaacacaaaattagctgggcatggtggtgcatgcttgtaatcccagctactcgggaaggctgaggcaggcgaatcacttgaacctgggaagcggaggttgcggtgagccaagatcatgccattgtactccagcctgggcaacaagagcgagactccatcttaaaaaaaaaaaaaaaaaaaaaaaaaaaaaaaaaaaaaactttatggtttttttttctttgttttgtttagtttttcagacaggatcttactctgtcacccaggctggagtacagtggcaagatcgtggctcattgcagccttgacttcttgggttccagtgattctcccacctcaaatcccaagtaactggaatgacataatcacataatcttttttcttttctttctttctttctttttttttttttttagaggggaggtcttgttttgttgcccaggaggctggtcttgaacttctggactcaagtgatcctcctgccttggccttccaaagtgctgtgattacaggcatgagccactacacccagcaaaaaccaaaaacgctgttgacagaatgaacttaggccaggcagggtcgctcatgcctgcgatcccagcaatttgggaggccaaggcgggtggatcacttgaggtcaggagttcaagaccagcttaaccaacatagtgaaaacctgtctctactaaaaatacaaaaattagccgggagtggtggtgcatgcctatagtcccagctacttgggaggctgaggtaggaaaatcgcttgaacctgggaggcagaggttgcagtgaatcaagatcacgccatt

SEQ ID NO: 915464 - DNA, 4001 bp, Homo sapiens
cagtgatgcagagctggaccccagggccacctaagaaggaaaaagccaaaggtttgagcggccaggaaaagatctcgccaaagaactctccttgggagaaaagcccttaatggataaactgtcaatattttctagagccttactactgaagtgtggtccagagactagcaacaatggcatgtctagggagcttattagaagtgaatctcaggctctcaacctagactactcagtcagaatctgcattttacaagctgcccaagtgattcagaagcatattaaagtttgagaaacaccattctagagcatgtggcttcctctcagacatactttgaaaaaccatgaggccttcgagaagcattaaataagagtgattaggaggatagacttcggggttagacattcctggggttctactctactcttcttactagccatttttttgaccttggacacattacttctctttccaactttgctttctcgttataaaatgtaaatatctggaaaacaacttcattggggaatggaaaggcaaaaaactgttgcgaaaataaagagagaaaaaaattatacaaacacttggtgatgtgatttaattccttgtctttgtgaacaactatctccgtatctccccaaaaagcattaccttcttctagctaaaatgggccttttccctctttcacaaatgcattttttaaatcaatctttcctgattcacttcagctgtccctgacaactacatgcaacatctgttgaaagacatttgaaggtccactaaattccagtcactctggggttgtatgttacatatactccaacatacatacacacacacacacacacacacacacacacccccttttttcttatgtatcattttctcattcccagttctgatggaagataacctttagtctagaaccacacagcctttgtatatctctacagcgatccctgtagtctgcacacagcgtattctacgaattgcttactgtcagatgtttagaaagggaggactgtcttatttatttatttctgtgttctcggtggttccttatattggacggtagtttacaaaagtttaattaatttgaatgcaaggctttagagtgcaccacaagtaacgtctcagttttcctcggttgtagcagaaagcagctgcaggttcctccacctttcccgcgtggtccttaccatgcacagggagaccgtagggcttattgatgaccacaaggttcttgtcctggtggagaattcctcgggtcagtgccttagcaagcacgttggggtggactcgctgcagctgccgtgtgaaccgcactatttcttgcactctccgctgaacagcgtttgtggacacctagggagaaagaaggagccgtggggaatgcctggtgcggaagccgtggagaagaccttccataaaggtctgggtgagaatctgagtagggaatgactatctttgcatcagacccgcgccgccttcgactaatttgagagcagagatacccatctgtctaacctgcgtaccgacgcagtggttaggactgagcctgacagtagccaaagatccagctcacgggaaaacaccgtacccttactgacccctcccctccgccttctccccattctcccaccttgcgtccgggctattgactcacacgctttcactcagaggaccctcctacctactccccgtctgggaaaccaatgagcgcactgcctctagggagttctggtccctttggactcaccggctccttctttgtgtcttgttcccgtttctgggctcggagcttctccgctaatctctgggcatttatggccgtagaggcagcggcagcggcacaaaatggctttgagacgagagtgaagagactcccgcaaccttggccgtttccccggatccaggggcccgacgcgctccacctgggcgccgccatcttacaaggaagggcggggcgagccaagaccacgtggagaagggcgactacaatgaggcgggagtgggtgggccctgcaggtcacgtggtgcggggtggggcctgggcgagtcacgtggggacggtgcgcgctcagtgcggctgcgccggccggtagctgcagctggagcagtggcgtttggaggagactcggtgagtgtgtagggaagccgggctggggctgggaaatgccggtgcctcaacggtttaacgttttctgcgtccccgggatttccgttcaagaagagcactggtctgagaaacgtttctccttttggtacacgatcccactcaaaaactcctccccgcccccgcgcccccttaggagcgatgtcccataaacgctcgccccagagccctcctaggcaccgacgccgtccctcttagccactgaatctccggtgatccgccagtcccctgcgggacgcgtcggggaccctcttgatcggatgcccggatctctgtagtctctccacccttcatcttccaactcccagcctctttgtttcgcgttgtaacctgtacccttctcctaaggatgacggccccttcccttatccagggcccccagcacctatttcctacttaggaagcactgtgagtgttttttctgcccttcctcaagaattcatttcttgggggtctcctccctaccttccctactcctcctaaagaaaaagctgaaagaacggagcacagaccttcacttttcctgtttcctttatttttcctctccatagtttgcaaccacaccatacctcctctcacgagatgcgatgttgggattcccttgcccgaactgcaggcgactccctctgatttcactcaggggtggctgggaagataaacatctgtttgggatggtagtgttaaaaataacttgggatatacctgccatttgttaagaggaaagcttatgctgagttcagaaagaatgtcctgaaaactaatggatctgtgacgatagaaggaacaattttttaagactgcttggaatgaaggctgcctgaggagttattagagaataggtagttgaattagatttgggttctacacctcctaaagggtttggcagaagggagccgtaccaacaagaaacaaagttgatcaggtggagctactcatagaagactcaagttgaagagtttgaactagaggtgatacgtagtgaggagtctttgaagcttttcgagtagggcagagagactccttgaaagtggaattctggaaatgaatctggcagttgaatgcaggacagatggggaaggaaagggtttgatagtggggaaggaaagggtttgatagtaggaaaactagttacaatctaggtggtcagtgatgaggtctggtcttttccccctacactgtaactcctttgagtttgaattaattgagttatgcaggtcaaggcgtactcttggcagctgctgttgatctgtgagtccctggaagaatttttttttttaatccactcacctggcacatagtaaactcgatatctgttagatggctgaagtgcatcataaatgtatgctaggtgtgtctgaacattttgaattgtcttatttctgtcaatgtttggcctgaagaatgaaggtagaggaagatgtatttgtaaagtgggaaagaagcaaggcttgtgtacgtttctcttataaggcaggtgtaaatgcagatccagatacaaatgcaaagatttccaagggagattgggaaacatctgtttctcctgttccccacccaccccctgcaaatttaccagtaagacagaggtctataaaagttgagaaattccaccctaaaagaattattaccttccatgctccagacctaggttctaatttcacttgaacatcacatattacttagatacttgaagctcaattttccaaggaccctgaagttttgacatcgggacttaaattcatatcattacattaattaaaaacttgttttgggtacaggacttttatggttttgtgtcggggatgggagaggctgtttctaccctaacct

SEQ ID NO: 915465 - DNA, 4001 bp, Homo sapiens
attttactggcgagaaaactgaggctcagagaggctgagtattttggccatgttctcacagccgataaatgacagagctttaaaagacacacatgctcaagtctgtaagactcaaggttcatactctttatgtacacatatgtcttcctcatacatacctgcttcctttacttctttaatatcatctagagcatccaggtactatactattcacagtggaggtatttcttcaacaaatgattctataaattattaggaaaacggcaattaatgcttttttttttttttttttgaggcagagtctcgctctgttgcccaggcacaatctcggctcactacaatctccgcctcccgggttcaagcgattctactgcctcagcctccagagtagctgggactacaggcgcgcgccaccatgcccggctaatttttgtatttttagtagagacggggtttcactatattggccaggctggtctggaactcctgacctcgtgattcacccgcctcggcctcccaaagtgctgggattacaggtgtgagccacgacgccaggcccaattaccgctttcttaatggtttaataccattacttccccaaaacaaaaaggcccaacaccttaattaattaacatgggctcaaataattcagatggccccttcctcaaaaaaacgtaaatatttgtggttcaaatcttttaaataacactaccaatattgtaacccaagattattctcccactcctagacttctcctccacttatcccctcacccccaccctccctcagccatcagactagtccccaaagggttagctataaattgttttgctttgccattagatacgtacaatctctctgcgccctagggaaatagcaacctgacagcatccctgattctgtagcctgctaaacttaaaccaatctcaccccttactcagtgatttttttaacccactaataagcatactgtaaatgctcattacataaaacatcctttcttcctggattcaaaggttttagcagcagtaatccagggaatattatagcagcaattattgctcatttactcaatgtgaaaggtgacaatcacatttgttacagtactcaatattttaatgtcactataaacactaagtgaaataagctattcaggtatcccaattaatgacaaatgggtgaaaaggaaaccagacaaaaatatttcaccgttcatactctagatactgtgaaaaatatccttgtttcctgttataacagggtaccttcgttctctcccagcatatgccacaccttttaggttgacaaaagcagaaagacatcggggctttgtgttttaaaaatcccaaaaaagactactcaaacctctccccaagagcaaattctaagaaggaagaataccacctcccttttctttaccacaaacccctgacttaccgtctctagcaaccagagagggctgggggtaggggagagggtggttagaaaacagaacgcacgactcggtcatatcctagcccggcccatcccaaacttcacctaggcacggcgagaagcaggacggcatcaggaattcctaggaaatggtctcaccccatcagagaacatttttaacttcctagaagccaccatttccccggggcattatcacacactcccacccggacatattacctaagagagtacttataaaaagagcgtaacacacacacaaagaaatacacagtacttgaagcgggcagctccggctcaggcggcgcggggaagcccggagaccacgcggagccgcggccaagttgccaccgctatcgccccgacggtgaaggcgcggccgcaggcggctggaaaagcagcgcgcggggctccagctccagccccacgcccggaccctcggagcagtaaagcccggctcggtggcccagcctctcccggaggtctctggcctcggccagagcaataaggtggatcggtgcttcccacccttccagctccgccctcccgaccacattcctgagaagccctactcccgcgacgccgcgcccgggaggaggcaggagcgcgacgctgcggccgcagggcaggagcgtagtcggccccgcgccctcccgccccctggccccggcccgggcccgcgaggcgcctctggggcgaggtcgcggcggccgccccgccacaggtagcgccagcccccgcccgccgccgctccggcgccccgggcaggcccgctccaggtacctggatgaactggatggtgagcgccgacttgcccacgccgcccccgccgaccaccacgagccggtacttctcctggccggagccgtcccgccagccggccgcggccatggggacgctacagagcccagcctgactgcgccgagccgccgctgccgcccgccctaggcccggctccggggacgtgtgcggccggcgggctgcgggcgagcggccgggctggggtcccgggtaccgggaggcgtctggagggccggtcagcgcggtagcgcggcgctggggactggctgggtaccgcccgaggcgcggagaagcggggtgacggcacgggccaggggcggcagcggccggggggcgcgctcctctacgcgtctccgcagcgcctgccgaacgcagcctccagcgccgccacaaatggccgtctgggggccgggctgccaggctgaggtgctgcatatgcatgagggggcggggaggggcggggccgcgccgcttggggctgaggttcgggaggtaacccgggcttcagacccccacggacacaccgctctaatccctagccagtgagcgagtgcgtgagagtgtgggagtgggtgtcagttgggagtgggacgaaggcagaaagagtgtgtcaccctaattgtctatgtaagggattgtgtggatgaaaaatacaatatgtgacggcgtgtgcgaaaaatagggctgttggcatattaactcaattttataggagagtacataccctgctttaagagtacagatggtgaccatatttgtgtgaaaaacagtatgtgacagtgattgaggattagagctgtgtcacagtaattgagtgtgtgatgggctggtggttgtgacagtgtgaagaatgggacagtggctgagcatggagaataagtcagtgattgagcttgcatgggcaagacggaatgtgacagattttgtatgtgtcagtacagtgtcatagtggctatgtttatgtgtgacaaatgtgcagtaattggatatgaggagtgtgagtgcgaggggttgaactcctggcctcaagcaatcctcccgcctcggcctcccaaagtgctggaattacaggtgtgagtcactgcacccggcctcatggggtttttaataagaattaaatgagcacataaaacagtgctgctacacaggaagcatttacagcaatcttggaacatgactgcaagttcttggacttcacttggtaactcatttggaaccagtagaatgcagcagaagagatgctgcctaatttcccaggctagatcagaagaggccatgcagctgttctcttggtattctcactccgggaggaacaaagtcagaagtttgactatcataagactgccatgctaaagaggctacatgtaggcatgccagtcgaagtctgattgatggccaggagcaacatgccatttaaaaaaaaaaaaaaaaagtcccactgagctcccaccagatcaccagcatcacctgccagccatctaagtgagacatcttggacactcagcctaatcgagccttccaatgacggcatcccctgttagcatctgaatgcaactgcgtgagagaccccaagcaaaaatacccatccaggccagcccatcctgaattccttttttaaaaatcttttttttttcttttttgagacaagatccctctgtcacccaggctgaagtgtagtggcacaatcatggcccactgcaacctccaacttctggactcaagtgatccttccacctcagcctccctag

SEQ ID NO: 915466 - DNA, 4001 bp, Homo sapiens
cacaggagaatatgggagaggaagaactagttgtcactcaagccaattaaaggtgaattttcaacttaatctgaaaagtttccttttcaagtagctgacagataataagtacatacattttcatgaaaaagaatgatctagaaccttggaaagaacaatagagatcatcccccttactttatagaaagaaatcctgtgacaagggagagaatttctttcccaatgtcacctagcaagttgttagcagggattaggaaacaggtctcctgactcccctgctcagagcactttgctccatgccaagctgggtgttatccagaaccccggagagcctcacatcgcagaagcagtgtgatgctgccagtcaagagagctgttgactgcatcattttgacttaaatcaagcttttgtttggctaaagtgttgtcaagagatttcaacaggcagattcagagccagatctagccagcgcatatgttttggcctacaattcaaattttttgtgtaaattttgaattggttgccgatatttaaaaatagggtatgtcacaaataaatcagtatttctaactcttcttggaaaaattaagtggaatatctagcaacactggactggcgttatctggcaacaactagctaaagctaaatactgactgcgttttagaaaacttaagatcctcctgttcatcagggtcaccagcactcttctatcacacaccacccatttgttacctgcctggctttagtgggctttaagagcttgcaaatcctactatgacaatgttctccacgaaggatgtgcttccaaatcccctgtagtgtattttatttatttatttttttcctattcaaacataaaaggcagcctgtagtgtcttttaaaatgaagaaactgggctcctccccagacctgctaaatgagaacctctgaggacacggacttagaatctgaatttgtatattaaatatctaaagtgatggccgggcgcagtggctcacgcttgtaatcccagcactttgggaggccgaggcaggtggatcacctgaggtcaggagttcaagaccagcctggccaacatggcgaaaccctgtctctactaaaagtacaaaaaaattagctgggcatggtggtgtgtgcctgtaatcctagctacctgggaggctgaggcaggagaatcactcgaaccggggaggcggaggttgcagtgagcagagatcgtgccactgcactccagtctgggcaacagagcaggactccgtctcaaaaaataaaataaaataggccaggcatggtggctcatgcctgtaatcccagaactttgggaggccgaggcaggtggatcacctgcggttgggagtttgagaccagcctgaccaacatggagaaaccccatctctactaaaaatacaaaattagctgggcatggtggcacatgcctgtaatcccagctactcgggaggctaaggcagtagaatcgcttgaacccgggaggcggaggttgcagtgagccgaaatcacaccattgcactccagcctgggcaacaagagcgaaactctgtctaaaaataaaataaaataaagtgaccctgagacaccaccacagcaagaactcttagaggagggtgctcatccctgtccactctttatttcaggacaaacaatgaccatctcatctggactgttggttattcataatctttacaaaccaatattgaccaaacagcatccctggcccatcccagagacaggatctgagggtagagtggagagggagatgctagaatcaagattcctctaacctcatctgtagctacaacagacagagccaagacctgttggccaaagaaggccaagcccccagatcagagcctgcaatacttaccatgggtgatggaggagcatcatccacttatttccttaatgggccattgcttttaatgtgaatgaatggctggcagagaatgaaaccgcccagcaggagctgcatgcatctgagatgagacataagcacaaatctattccttgtttaaagatcacattgctaagaatagaaattgaaacacacgctcaagcgtgtgcacacacacacaaccctgaggaaggccgtaatggtgctggagaaatccgcagcttagtagaggatgatctgagaatcattgagccttagaacagaaaagccatcttgagttcattccctctaaagctctcctttcacagatggggaaacaaaggcccacagagagaagagcaatccccagcatcacctggaaatagagcagaagcatgactggaactcggatttctgtctcccaccttgagatccatctcaatgtagcacactgtcttaggaacccaagagcccagaaggctgagcagggccaaaaatcatacctctcttcttctgcatggctaccagaaagaatcaaacggaggtatccaccattgcattttttttttatttttttgagacagagtctcactctgtcacccaggctggggtgcagtggcgtgatcttggctcactgcaacttctgcctcctgggttgaagcaattctcgtgcctcagcctccagagcagctgggactacaggtgcaccacaccatgcccagctaatttttgtatttttagtagagacagggttttgccatgttggccaggctagtctcaaactcctgacctcaggttatccacccgccttgacctcccaaactgctggtattacaggtgtgagccaccacacctggtcttaccatagaattttttaaataatgaaaaattgaaaaatccctaaatattcaacaacggggacttggttaaatcaatgatgcaatggccactatgtggccattaaaaataatttttacttatatgggaaaatgagaaggataagtgctatggtctaatcccccctaccaaaattcatatgttaaaactcaatactaaatgtaataacattaaaaggtggggcctttaggaggttattagggctctgcccccatgaatgggattagtgcctctattactcaagcttctctagagggacagaattaatgaaatagatatatagatatttattaatctataattaatgaaatagaaatacataaaggagagtttattaactattaactcacacgatcacaaggtcccacaataggccacctgcaggctgaggagcaaggagagccagtccgagttccaaaattgaagaacttgggagtccaatgttcaagggcaggaaccatccagcaagagagaaagatgtaggctgggaggctaggccagtctttcttttcacatttttctgcctgcttatattctagcctccctggcagctgattcgattgtgcccatctagtttaagggtgggtgtgcctttcccagcccactgactcagaatgttaatctcctttggcaacaccctcacagacacacccaggatcaatactttgtatccttcaatccaatcaagctgacagtcagtattaaccatcacaatgcccttataaaagaggcttgaggaagactgtttgcctcttctgccacatggggacccataaaaggcaccatctgtaaagcagagagccctcaccagacgtgaaatctgctagcattttgatctggacttcccagcctccagaactgtgagaaatacatttatgttgcttatccattactcagtctaagacatatttatttttatccactggccagttactagaaataagatattttgggccgggcatggtgtctcatgcctgtaattccagcactttgggaggccgaggcgggcagatcacctgaggtcgggagttcaagaccagcctggccaacatggagaaaccccatctctactaaaaatacaaaattagcagggtgtggtggcgcatgcctataatcccagctacttgggaggctgaggcaggagaatcccttgaacttgggggttggaggttgcagtgagccgagatcgcaccattgcactccagcctgggcaa

SEQ ID NO: 915467 - DNA, 4001 bp, Homo sapiens
catctttgtcataaaagttataaagaatgtgtaatcagacccattttactggcgagaaaactgaggctcagagaggctgagtattttggccatgttctcacagccgataaatgacagagctttaaaagacacacatgctcaagtctgtaagactcaaggttcatactctttatgtacacatatgtcttcctcatacatacctgcttcctttacttctttaatatcatctagagcatccaggtactatactattcacagtggaggtatttcttcaacaaatgattctataaattattaggaaaacggcaattaatgcttttttttttttttttttgaggcagagtctcgctctgttgcccaggcacaatctcggctcactacaatctccgcctcccgggttcaagcgattctactgcctcagcctccagagtagctgggactacaggcgcgcgccaccatgcccggctaatttttgtatttttagtagagacggggtttcactatattggccaggctggtctggaactcctgacctcgtgattcacccgcctcggcctcccaaagtgctgggattacaggtgtgagccacgacgccaggcccaattaccgctttcttaatggtttaataccattacttccccaaaacaaaaaggcccaacaccttaattaattaacatgggctcaaataattcagatggccccttcctcaaaaaaacgtaaatatttgtggttcaaatcttttaaataacactaccaatattgtaacccaagattattctcccactcctagacttctcctccacttatcccctcacccccaccctccctcagccatcagactagtccccaaagggttagctataaattgttttgctttgccattagatacgtacaatctctctgcgccctagggaaatagcaacctgacagcatccctgattctgtagcctgctaaacttaaaccaatctcaccccttactcagtgatttttttaacccactaataagcatactgtaaatgctcattacataaaacatcctttcttcctggattcaaaggttttagcagcagtaatccagggaatattatagcagcaattattgctcatttactcaatgtgaaaggtgacaatcacatttgttacagtactcaatattttaatgtcactataaacactaagtgaaataagctattcaggtatcccaattaatgacaaatgggtgaaaaggaaaccagacaaaaatatttcaccgttcatactctagatactgtgaaaaatatccttgtttcctgttataacagggtaccttcgttctctcccagcatatgccacaccttttaggttgacaaaagcagaaagacatcggggctttgtgttttaaaaatcccaaaaaagactactcaaacctctccccaagagcaaattctaagaaggaagaataccacctcccttttctttaccacaaacccctgacttaccgtctctagcaaccagagagggctgggggtaggggagagggtggttagaaaacagaacgcacgactcggtcatatcctagcccggcccatcccaaacttcacctaggcacggcgagaagcaggacggcatcaggaattcctaggaaatggtctcaccccatcagagaacatttttaacttcctagaagccaccatttccccggggcattatcacacactcccacccggacatattacctaagagagtacttataaaaagagcgtaacacacacacaaagaaatacacagtacttgaagcgggcagctccggctcaggcggcgcggggaagcccggagaccacgcggagccgcggccaagttgccaccgctatcgccccgacggtgaaggcgcggccgcaggcggctggaaaagcagcgcgcggggctccagctccagccccacgcccggaccctcggagcagtaaagcccggctcggtggcccagcctctcccggaggtctctggcctcggccagagcaataaggtggatcggtgcttcccacccttccagctccgccctcccgaccacattcctgagaagccctactcccgcgacgccgcgcccgggaggaggcaggagcgcgacgctgcggccgcagggcaggagcgtagtcggccccgcgccctcccgccccctggccccggcccgggcccgcgaggcgcctctggggcgaggtcgcggcggccgccccgccacaggtagcgccagcccccgcccgccgccgctccggcgccccgggcaggcccgctccaggtacctggatgaactggatggtgagcgccgacttgcccacgccgcccccgccgaccaccacgagccggtacttctcctggccggagccgtcccgccagccggccgcggccatggggacgctacagagcccagcctgactgcgccgagccgccgctgccgcccgccctaggcccggctccggggacgtgtgcggccggcgggctgcgggcgagcggccgggctggggtcccgggtaccgggaggcgtctggagggccggtcagcgcggtagcgcggcgctggggactggctgggtaccgcccgaggcgcggagaagcggggtgacggcacgggccaggggcggcagcggccggggggcgcgctcctctacgcgtctccgcagcgcctgccgaacgcagcctccagcgccgccacaaatggccgtctgggggccgggctgccaggctgaggtgctgcatatgcatgagggggcggggaggggcggggccgcgccgcttggggctgaggttcgggaggtaacccgggcttcagacccccacggacacaccgctctaatccctagccagtgagcgagtgcgtgagagtgtgggagtgggtgtcagttgggagtgggacgaaggcagaaagagtgtgtcaccctaattgtctatgtaagggattgtgtggatgaaaaatacaatatgtgacggcgtgtgcgaaaaatagggctgttggcatattaactcaattttataggagagtacataccctgctttaagagtacagatggtgaccatatttgtgtgaaaaacagtatgtgacagtgattgaggattagagctgtgtcacagtaattgagtgtgtgatgggctggtggttgtgacagtgtgaagaatgggacagtggctgagcatggagaataagtcagtgattgagcttgcatgggcaagacggaatgtgacagattttgtatgtgtcagtacagtgtcatagtggctatgtttatgtgtgacaaatgtgcagtaattggatatgaggagtgtgagtgcgaggggttgaactcctggcctcaagcaatcctcccgcctcggcctcccaaagtgctggaattacaggtgtgagtcactgcacccggcctcatggggtttttaataagaattaaatgagcacataaaacagtgctgctacacaggaagcatttacagcaatcttggaacatgactgcaagttcttggacttcacttggtaactcatttggaaccagtagaatgcagcagaagagatgctgcctaatttcccaggctagatcagaagaggccatgcagctgttctcttggtattctcactccgggaggaacaaagtcagaagtttgactatcataagactgccatgctaaagaggctacatgtaggcatgccagtcgaagtctgattgatggccaggagcaacatgccatttaaaaaaaaaaaaaaaaagtcccactgagctcccaccagatcaccagcatcacctgccagccatctaagtgagacatcttggacactcagcctaatcgagccttccaatgacggcatcccctgttagcatctgaatgcaactgcgtgagagaccccaagcaaaaatacccatccaggccagcccatcctgaattccttttttaaaaatcttttttttttcttttttgagacaagatccctctgtcacccaggctgaagtgtagtggcacaatcatggcccactgcaacctcc

SEQ ID NO: 915468 - DNA, 4001 bp, Homo sapiens
cccttcctcaaaaaaacgtaaatatttgtggttcaaatcttttaaataacactaccaatattgtaacccaagattattctcccactcctagacttctcctccacttatcccctcacccccaccctccctcagccatcagactagtccccaaagggttagctataaattgttttgctttgccattagatacgtacaatctctctgcgccctagggaaatagcaacctgacagcatccctgattctgtagcctgctaaacttaaaccaatctcaccccttactcagtgatttttttaacccactaataagcatactgtaaatgctcattacataaaacatcctttcttcctggattcaaaggttttagcagcagtaatccagggaatattatagcagcaattattgctcatttactcaatgtgaaaggtgacaatcacatttgttacagtactcaatattttaatgtcactataaacactaagtgaaataagctattcaggtatcccaattaatgacaaatgggtgaaaaggaaaccagacaaaaatatttcaccgttcatactctagatactgtgaaaaatatccttgtttcctgttataacagggtaccttcgttctctcccagcatatgccacaccttttaggttgacaaaagcagaaagacatcggggctttgtgttttaaaaatcccaaaaaagactactcaaacctctccccaagagcaaattctaagaaggaagaataccacctcccttttctttaccacaaacccctgacttaccgtctctagcaaccagagagggctgggggtaggggagagggtggttagaaaacagaacgcacgactcggtcatatcctagcccggcccatcccaaacttcacctaggcacggcgagaagcaggacggcatcaggaattcctaggaaatggtctcaccccatcagagaacatttttaacttcctagaagccaccatttccccggggcattatcacacactcccacccggacatattacctaagagagtacttataaaaagagcgtaacacacacacaaagaaatacacagtacttgaagcgggcagctccggctcaggcggcgcggggaagcccggagaccacgcggagccgcggccaagttgccaccgctatcgccccgacggtgaaggcgcggccgcaggcggctggaaaagcagcgcgcggggctccagctccagccccacgcccggaccctcggagcagtaaagcccggctcggtggcccagcctctcccggaggtctctggcctcggccagagcaataaggtggatcggtgcttcccacccttccagctccgccctcccgaccacattcctgagaagccctactcccgcgacgccgcgcccgggaggaggcaggagcgcgacgctgcggccgcagggcaggagcgtagtcggccccgcgccctcccgccccctggccccggcccgggcccgcgaggcgcctctggggcgaggtcgcggcggccgccccgccacaggtagcgccagcccccgcccgccgccgctccggcgccccgggcaggcccgctccaggtacctggatgaactggatggtgagcgccgacttgcccacgccgcccccgccgaccaccacgagccggtacttctcctggccggagccgtcccgccagccggccgcggccatggggacgctacagagcccagcctgactgcgccgagccgccgctgccgcccgccctaggcccggctccggggacgtgtgcggccggcgggctgcgggcgagcggccgggctggggtcccgggtaccgggaggcgtctggagggccggtcagcgcggtagcgcggcgctggggactggctgggtaccgcccgaggcgcggagaagcggggtgacggcacgggccaggggcggcagcggccggggggcgcgctcctctacgcgtctccgcagcgcctgccgaacgcagcctccagcgccgccacaaatggccgtctgggggccgggctgccaggctgaggtgctgcatatgcatgagggggcggggaggggcggggccgcgccgcttggggctgaggttcgggaggtaacccgggcttcagacccccacggacacaccgctctaatccctagccagtgagcgagtgcgtgagagtgtgggagtgggtgtcagttgggagtgggacgaaggcagaaagagtgtgtcaccctaattgtctatgtaagggattgtgtggatgaaaaatacaatatgtgacggcgtgtgcgaaaaatagggctgttggcatattaactcaattttataggagagtacataccctgctttaagagtacagatggtgaccatatttgtgtgaaaaacagtatgtgacagtgattgaggattagagctgtgtcacagtaattgagtgtgtgatgggctggtggttgtgacagtgtgaagaatgggacagtggctgagcatggagaataagtcagtgattgagcttgcatgggcaagacggaatgtgacagattttgtatgtgtcagtacagtgtcatagtggctatgtttatgtgtgacaaatgtgcagtaattggatatgaggagtgtgagtgcgaggggttgaactcctggcctcaagcaatcctcccgcctcggcctcccaaagtgctggaattacaggtgtgagtcactgcacccggcctcatggggtttttaataagaattaaatgagcacataaaacagtgctgctacacaggaagcatttacagcaatcttggaacatgactgcaagttcttggacttcacttggtaactcatttggaaccagtagaatgcagcagaagagatgctgcctaatttcccaggctagatcagaagaggccatgcagctgttctcttggtattctcactccgggaggaacaaagtcagaagtttgactatcataagactgccatgctaaagaggctacatgtaggcatgccagtcgaagtctgattgatggccaggagcaacatgccatttaaaaaaaaaaaaaaaaagtcccactgagctcccaccagatcaccagcatcacctgccagccatctaagtgagacatcttggacactcagcctaatcgagccttccaatgacggcatcccctgttagcatctgaatgcaactgcgtgagagaccccaagcaaaaatacccatccaggccagcccatcctgaattccttttttaaaaatcttttttttttcttttttgagacaagatccctctgtcacccaggctgaagtgtagtggcacaatcatggcccactgcaacctccaacttctggactcaagtgatccttccacctcagcctccctagcagctgggactacaggcacatgccatcaagatcaggtaatttttttttttttaagagacaaggtctctctatgttacccaggctagtctcgaactcccaaagtgctgggatggctgggcgcaatggctcatgcctgtaatcccagcactttggaaggccaaggcgggcggatcgcttgagcccaggagttccagaccaacctggccaacatggctaaacgcatctctactaaaaatacaaaaattagtccggagtggtggcgtgcacttgtactctccgctactccggaggctgaggtgggaggatcacttgagcctgggacgcggaagtgacagtgagccaagttcacgccactgcacccacgcctgggcgacaatgcgggctcaaaaaaaaaaaaaaaaagtgctgggattacaggcatgaaccatcactcccggcccttcttgaatatttgacccacaaaatcatgagcaaaataaaattgtagtggctcacgcctgtaatcccaacacttcgggaggccgagggaggcggattgctcgcttgagcccaggagttccagaccagcctggccaacatgccaaaacccgtctctacaaaaaattacaaaaattagctgggcgtggtacacgcctatagtcccagccactccggagg

SEQ ID NO: 915469 - DNA, 4001 bp, Homo sapiens
tccttctctaaaaaaatacaaataaataataatgtaaaaaaataaaaatacaaaaatagatgctcagctctcactcttatgaatggatcaataaaagtgcactatgttattttgctctttggtcagctaaaatgtgagctaggaaaattcacagaatgatgttctcaagataccaaaaacaagaaaggccactactgtccacctttccaactcttgtctgtagttaaaccaatctggacattggctgtagttaaaccaaatcaactacctgcttattcacagcattcatcgtgtcctacattttgatacaactattttcattcattctttaagaatctgttcatgtcaggtcctgtgctaaacgtgaacagaaaagtctccatcttgcttgtattcccagcactttgggaagccaaggaagggaggatggtttgaggccaggaattcaaggccagactgggaaacacagcaagactcctttactaccagaaatttttaaaaattagccactcatggtggtgcatgcctatagtcccagctacttgagaggctgaggcaagagcatcgcttgagcccaggacttcaaggttacagtaagctatgattacaccactgcattccatcctgggtgacagagcaagactctgtctcaaacaagtctccatctttgaaatgttcacagcctagaggacaaaatagaaacaaccagtcgattaaccagtatttactaagtgcctacaattttgaaatcattgtattgctttaacaaaggcaagtaggttcaactcaaaacttgttcatacgtatctcatgcggttgttaaaagtatgttgctcttgtttttccaacccgatgaagcctgttcccaaggcagggactgtctcctcctacaatctcacaaagccaagcaaagggctgggcacaaagcgggcacttggcaagtctaatgaaaaagaactgttgagaaagaatacgagttcctgactcttcccagtccccatcttgtcagaagatgtctcagccacccttctctgattcagcatctcttcccatgaagggaaaggaactcgagggtgctgtctgtctgggatctgttttttccacgccacactcctatcctcaccccacaaaagagatcagtaaactgacaagtgcctacggagggtagagaggccccctccttctttcctagctgccccccgaccctgtgcctaagacagctcaccaaccccacggttttcaaatcaaaccgtattgtcacctatgggtgactttgggtcagtcggcgacacctcgctctgagcgtcagtttcctcatctgtaataagctaatcatctctcagaggcttgcagggaggaataaaatagtgcctggcaagtgctcggcgtacgcagtcactactcgatacggggtaagtgttatccttttgaaaggcggcaggatgacaaagccgagggggcgcagcctgaaggcccgaaggaggttcggggcaggctgactgaagacagaaggccgagcgggctgacagggcggaaggccgcggcgggaaatgcgggaaaggcgggaagcagcgaaggcgggcgggcggtctgggcatcagctccggcggcggcagcccgcatcccctcaccttccttctcgcccacctcgtccccccctcacctcgcttgatcacatgcatcgcagctagtggctgaggctctgaaggatccaagactggactgcggctctaaagcgccggcgggatcgagaaggtgacagagtgggaagggttaggttccaggcgctgctcaggggaaagaactggagttggagccagacagcactttcttcagagcagaggcgcaacaatccaaatccccttcccgcgcccgccacccgtgacgcacaaaggggcgcgacggggttcgaatgacgttactcgacgctgcggcccacgcccggggtaggcttcacagactgacaggcgacgtgtagccgccatgttgagtctgggcaagacccagaagactacgcctctcccatgggccccattggatatggacatgcccggcggaaatgctgctctcctgctaccatgttttgtgtgggcaagccgagttcgggaccctcggggccctggcgtagcacctagagcccgctgggtcaggcgccgccctctcacctgcgcgtctccgccggaggaaaggcggttaatttatttttgaaataacaaaacctaaccggcgggaacgtttttcttgctctgacatttattataataatactaacactgccgtccgctgtgggctccagcccaggctccacagccgtgggcagcttggagccccagggcttttagatcggccagaggactgacactctggaactggaagaaaaccgcgcaaggccgatggcgtttggattttatcctgacgcaaatcagagccctgagagaattttaagcagggcagggtcagtacccatttgcttttagggttcttcagtggatggtggcagagacagggtatttgccttgtggaggtaggatggacttggtgacttagagtggagaataagaatagatgagaaccgtaatatgtaaggctggtgtagaagcttctgatttgggctacccaaagcgatctttatgaaatttcatctgtggcatcttttccctaaagccttttcgttggtttctcactgccctccagaagctgcccaggctccctgtgaagtaatttcaaaaatcatggaaagtcgtaagtgagcctgtaattgcagcattttgggaggctaaggcgggagcatcatgtgaggccaggtgttgagataagcctgggcaacatagtgagaccccatttctacaaaaaatagaaaaagtaggccagcgcggtgcttcactcctgtaatcccagcactatgggaggccaaggcgggcagatcacgaggtcaggagttcgagaccagcctaaccaacgtggtgaaacccccccgctgctaaaaatacaaaaagtagccaggcatggtagcacgcgcctgtaatcccagctactcaggaggctgaggcagaagaatcgcttgaacgctggaggcagaggttgcagtgagccaagatcgcgccattgcaccctagcctaggcaagagagtgagacgccgtctcaaaaaaaacaaaaaaaaagaaagaaaaattaaatagatatgttttttaaaagtcgtaagtgaagttataggatagatagggtcaagtttacccagacatagggtttcccaatttagcaaataaaaatgtgtcccagatactgcatgagagaaaattatactttaaaaactgtttatctgaaattcacatttaactggtcatcctgcatttatctggtaaccctgcccacagagcttctgggcatgtgcattcaagtttcattttccctgggcaaaggaaagattgtctctttatcccatcatgccacagcacagagaacacaatgagagtcaaagccagcagtggttaaaatctcctacatgctttattggacttcaaagaattttatgaaataacacagaaaaccccatttgagggtgtccagggagtacaaggcagtctgcagcctagcaccctcctaagaccagccccaggtatacccaccccaggcccaaaataggatcccaggataaaggtatggcagggagtggggcagaggaaaaatacctttacagccatagcaaaaacaggtaagggagagagttgtctagagggtgggaagggtgggggaaagtggtcacacagccgccttcacctataccatcttccttagccaccccttccccaaactggttgtgtcctttttgagcctctggccaaggctacaaagtaacatgaaaatgggatctaacaaggggaatatgcagcgtaggcacttgggaaattcagattactttttttccttttaacctgtttgtcttttggttcaaaaaatgacagcatccttgcccaacaactccagggctccataagagccc

SEQ ID NO: 915470 - DNA, 4001 bp, Homo sapiens
ttcggagtcacggcaagtcatcccagccatacctctgtctttgagatcgtgactgtggcctgcagagaagtacttcttattgcctgagtacaccattagccccaatcctaatggcagtggataatcactcttgtatgtagaaccagctgaccccccgacacacacacaccaacacacacacatatacacatccaatggtacctgtttggtcaacattgtccaggtgctgggctgaatttataggggcatgtttctggcatttcctctttcttttctcatcttcagcagagtcactgccaacaagagcctgtttgtggcatttcttcttcctttctacttcttcctcagagtcactgcaaggtgggccctgtttttgacatttcttcttccctttcttccctacttcagcagaggcactggcaaatgatgcctttttggggcatttcttcttcctttcctcctcctcctcctcagagtcacttatacataggctggggggatgctgggaaagagatgctgcctctagggcccgtaatgtggccaagagctggcggcgcttggagccctggaggaaaacaggggatgacagtgggcctaaagagaatggatgaggcctggagaacaagaagggagagatgtggacctgattcagactggcagaagcatctgaattcttcccagtcaagcctgccagaacccagaagaacttttatgtcaccaccccaacttctgggaagctggagagcagagaaaccacctatcccactttcttcaatgtgtaaatgagctaatggaggtttccccaaaggaaaatgcaaaggccacaagcaacaagaccaaggccagagaccaggaattccaacccttcaccttgagcttttgcctagagctgatacatttctgtaagaggtaaggaggcttctgaacacaggagacacatgatcacacacgtatattaaatatttaacatgtctctagctgcagtgtagaaaacaaactgaaggggagaaattgcagacagagaggccagcggcttggacaatggtaatggggctaggggatgaaaaaggaggaaacaaagcaggccgattccatgttggaggcagactgaagggtaagaaaagcctgaggaagcagggccctcacatctgcagaggctcaaaggagaagatgtattgtcgggaaggctgattctgtgttgcagtcctaccaggtaatcctaggccaggcacttaccctgattctaagtttcccacaccctcctttgaacaatgatactgacaactcttactgtctccaatccatcctccacactgtaaccgacgaccctttcaaaatacaaatctgaagaaataattccattgcttaaaacctttcattggcttctattctcaatatacgcaaaacttctacctcttgaacttgaacagcatatatgcccctttcatttactatgtatttcaaccacaaggaccacttgtgtttgtgactctgacagaacatgctctcttgtcccagggcccttgtacgtactttttcctgtctgaagaaccctcttcgcttcaccaacttctactcaacaactctctctgacccaacgtcagtttcttttggaagttctcggatcttcagatcaggactcgcccttaacggtgccacaggtgtccctccccgcaatacacacagcgctgggatccaccaatgtccgcttcgcggcctgaaacagctcccattgctcccgcgagtcactcaccttgttttgcgaggaggccgcaggcggaggtcgtgagattacgggcccaaggcccgcggctactggggccgcctcggcccactcaggctcttcgaacatgagggtcgggagggcagggtcgccgagtccccgctcttctccacgtgcacagcgctcctctggaagtcggagcgctcagacctgccagaaccgacccggaaaccaaagcgtgacagccaggggttgctagagcggccggcgcggcgcagcgaaccatcgagtttagccaggcgcggctagaagggcagggaggcggtgggaggggagggacggaggcccgcgctgcccaagagcgccacgggcggggcggggccggcggcgggctgcgggcgcggccggacgggagttccccggagaaggatcctgcagcccgagtcccggtgagtgcgagaggacccgcgccccctgtcacccctcacttctcctgagtcccaagtaaggaacggagccaaccctggggaggacccccggtcccctctcccagagtatacggagcctgaacctccccacttcccccaactctgttcgcggatagggtctagttgcctgctctcggacatccgttcagcagacactacctcttcgtcaccccctgcccaccctgacccgcctttacctcgcgtctagaggacacagccagggatcatcccgcagccccgaactccttcacagacccccactagccggggacgcagctcaggccccctacccccaacacaaacacttctctcctgtagaggataaagcttggggttcatcctccttccctggatcactccacagtcctcaggcttccccaatccaggggactcggcgccgggacgctgctatggacgacattttcactcagtgccgggagggcaacgcagtcgccgttcgcctgtggctggacaacacggagaacgacctcaaccaggggtgagctgaaacggttggtggatgagaggaaggctagagatctcctggctacgtggagtggagtgctcatgtctggtggtggcggctgcctttgctagccagtgtaatgagtgctaagcatagcctgtggggggcagagggttttcacagaggacgcagtttgagctgaatcttgactgcagaataagagtttcacaggcagaggctacagagagctttccagcctcagtagactgcatggccaaaggctagggggcaaggcacagagcagagagaacaggaaattgtctggagttccatatggctggaggatagatgatctctgtgggtcggagcattgggtacaagaggaaaagaacaggacataagactgtagaggtctccaaggatcagccagatcatgcaagcatatttaggctataagaaggtctttattttaaaagcaaggttttaaagctgtatagtgacataatgagattgtccatttttcagtatcgtcttggatgctttgtgaagagcaggtggaaaggaggcaattgcctagttcatcgtagaagtaatgatgtcttggactagaattagggtgagtgaaaaagagaagtgatcaaattccagaagtctttaggacgaagaattgtggaacttggtgtggggagtgagtaagggcaaagatgaggaccagggttctggcttgggaacttggttgtttttactgagatggagaaaactggaggatgaggcattttattttggacatgttaaagttaaggtgacaatacagcaaggtggaaatgttgagtgtgttgttggttatgcagatttgcaattcaggggaggaatctgacttggagacacagatttgagagctatcagcatatagatagcatatatatatcatatatatagatgatacttgaagacgtggttgtgaaggagaacgtctcaggagagtggaaggcaagaggtcaggggacaggaagcctgcacgacagaaaaggagcaaccgcaagttgaaaaagaaataggaaaatgtgtgagtaaagcttacagaagagaatgttttaatgaaggggaggtagtcaacggcagtacaggctactgagagatcaaagaacattaatattttaaagtagccattgaatttacagttgggttttttttttttaagttaaggggtacatgtgcaggtttgttggatgggtaaactcaggtcatggaggtttgttgtgcagatcatttcatcacccaggtattaagccgtggcacccattagttatttttcctgatccct

SEQ ID NO: 915471 - DNA, 4001 bp, Homo sapiens
aaattactacaatgggagcttaatttttaaacaaattctgtgagaagcctttatataatgtaattagtcaccctcctattttgtactattttttaaattagccttttgtaagccagtttgttacaggtagagggaatgtggacaggtaagaacagattactaggcttatattataactgctgtattaatttgagtcttcggtagccataacatcatacagattctttataggtaatattctgaagaacttcatacttggcgcttcctagcaatgcaaataaattcagttaacagaaacttcttcatttacatagagaatagaagagcgaccctgctttcttggaaaggaaacagctatctgtcttgtacaataaccaatccactttggccagctaatatggacaaaaaaagagacctatttggaaaacgtttcttctccagccaagggctgtttccagataaaggcaatgctcagagtataacaaaaaagccttctctgaggaaagaaaagtgccagaaaaggagaggcagggatcgggaataaatgggggtgagtataagcactcagtgtgaaggctggaggcagcaggcgcagcgctgagatgctccagcaaaagaaccagcagcagcagcaggaagtttcaatggggccgggcagagcatgcgccctgcacccgcgcggtggccttatgtggaaggagcaccacttgcgaacaccaataatagaccagcggcaccagagagagaaacatgagcaacaagcaccttcttcaactgtttccccctccgtcagagcccctcctccagcttacatactaaccaccccaccctaccgtgcaaatgggagggagacgacttcttcgcctaagcccggctgccaagatgaagggggaagggattggaaaagtggggagatgctcgcctattattttgggggaggtggggagaggaaggagaactatggaggaggaattaaccctctcctctccacagtggagctgaaccgacttcgcccccctaccgagaatggagaagaaccccctcccgtgggggaggagcagacctccccacttcaaggaaggagttttaggggttaaagcagccctcgaggggaagggaaaagggacaaatctctcaggggagttcccaacagagggagggagagttgagtgtccgctggcccccgcccacccaggtgaagggagataaggaggtgtccggagcagccgagcccagccttccccgagatggtcgggaagactggtgggaggaggggagggagtaagggtggggaggaggagaaaagcgcaaagctggccggaacctgcgctccccttcccccgccgccaagggggagacggggtggggggccgccctccgccgcggagaagcagtccccggggctgccgaccggcacaatgacccctccccgcctccagcccacacctagcccgcaacgcctccacctcagctccccgcccggccgagtggccctagggggcctccgccccgcctccccactgcccaagaccccgggggctgggcggagaagaccagcccggcggagttgcgtcccagggggaagacagagccgcggaggcccgagccgcgaagaaccggggcgcctgtgaagagcggagagtagcagagcgccagggccgcttcccgccgggcgttcgggcccctcgcttaccttctccgttgccgacgtccggcggcggcgcctgcagcacccgctccagctcagggaacggcaactcaggcaggtctagcagcggcccgtagcgctccaagaaggagcagactacggcgaagttggggcacgaacccgggcagcccggaggagccatcaccgccgccgctgccgccgccgtcgccattttgaactggaggatggaggaggaggcgatgggggggcgggggaagttgtggtgccgagggatggcaaggcaaccttacagacgacaggaggcgctctcaagtgggctcctctgcggatcccagcgtctcagggacggctccgcgatcccacaatacatcggcggcccggagcagtcgagaaccgagtcagacgggagacagagcggccctcggcgcctttcactttccgccctctttccgcccccttctctcctccccttcgggcttgccactgcctcgtgtgacagggggaatgaaaacaagggaagcggggcggggaggcgggctggaagcgggaggggcgggacttctcgagaacaatggccaatggacgcagagggggcggggcctcgggcgctgttcaactgcagggcgtattcccggagggcagttggggagcgcagatcccgaagcagcgctgggagcgtaagtgcgggcagagcactgcgccgtttgggaacgcaactttgaggagacagtgcggtgggtgagtttgcgggggaatcctgaaactgggccacgagatggtggagaggttgaggagaattaataaacagaaaaagggaatagggcgggggaaagcacagttgtgggagaaggttgggaaggggaaaggtagaggtgtgcccttaattaggggctgggctgggacctcggtaagatgtctctgtggaagtttgccgacggggtattgctctctgctggggtacaggaatcgcagctttgctggaaaagcaggatctgagggaacggaactctgggggaatcgtcggagtgaggagttggggccctgctgggagaagaggatctgaggagaccaggctctgctagggggccatggtgtgaggggaaggggctctgttcagggaccagaatcggagtgtgggctgggactccattgagaggcggaacatgacaggagacggtggagcagcgaaaagtttgttagaagacagggttccacttcggggcggggcgggggcagtgaacattcccacaaagaacgccagagagaaactaccaataatgtaaaatagaatgtgcagcctgagaagcagcagtacacgttatgcttagaagcctgagctttggattcagccaggcctgagtcctagcggggctacttcatgacactgtggaggtttctttatttctttgaactccttagagtggggtgataatagtacctacatcatacggtattactagataaatcacagtaaagtgattagcacagtgccgtagcacatagtgagtactttaaaaatattagttatcaaaaaaggagttcctataatttagactgaattccgctatatttatttagtctataatttattactttgagaattttctgagtgcatttaaaactcaatgtagtacctaattcctaaaaagaatttggccgggcgcggtggctcatgcctgtaatcccaacactttgggaaaccgaggtgggtgcatcacctgagctctgcagttccagaccagcctgggcaacatggtgaaaccccgtctctagtaaaaataacgaaaattagccgggaatccttgggaggctgatgcaggagaaccccttgaaccggggaggcgaaggttgcagtgagtcgaggtcgcgccactgcactccagcctgagcgacagagcaagactccacctcaaaaaaaaaaaaaaaaaaaaagaatttgaagcaaggtacaacacaaaccatgtaaaaaagagaaatctgtaattatagaaagataagaaatagatgggcaaataattatatgagtaacagggaaaatggtcacacaaacaccgaatttttttcttcatttccaggttttaaaaaggggaaaaaccataagggtgtgtattattcccattatctaaagaaagaatactcaatttatcaagagaaaaattctatattgtaagaagaatttattgccttgaatagtgattcatagtcttgagtggtatacaaaccgtttttaaaggaaaaaagttcttttgaaacttggcaaatacttttgaaaatttcactgtaagaaatactgatgtaagaaatcaaagtctaaagaacactgtaaatgtac

SEQ ID NO: 915472 - DNA, 4001 bp, Homo sapiens
cttacagagccaaatttctaaaacttaggtctgaatcaaaaatgaaaaatcaagaaaacccaaaaggtaagtacaaaagggcctaccaaacagtaagcaatgacaagtgattaaagcaaaaagatcaagttgctaagttataaggaagtcgctgttcatctggaccttagcccagaacacaaaaatttggagaaaaggctggtggtttaaaggagacagggttctaaatttgctgcctcattcttttatctgcaaaagcttcctgatactgcctgtttctactgaaatggccataaccacactgaaaaaatccaacagggctccaaagctctcagacaggtgaaaattcactgctagaaaaacacgtagagaataatacatttaaggttaagatcagaaattttttctttagaacccaagattctgccaaaggagacaacgaagcattaaaaaaaaatgatcaaaatcctttaacataactaaatagagagcaaaattatctctactctcccgaatttacggccctgcctttgacaaaaggcattttttttcccttcaaagactccgttcctttgagaactaccacctgcccatggtggtttttttttccccccttaagaaggcatctgcactgcagatttctgcataaggggagcttgccaggcagctcttaccagcaggcagacgcgtatacaatgcaaactaaaggaggtctgcagcttcgttcttagtctttcacagagatgggagaaggggactcaaccagcccttgctttgtctgaatgttctccccctccccctttctgcaataaacacccccctttgttatacttcgatcaatagtagcccacagaaaacatgaaatcaaaacatgttgatagcttagcatgactctattttctagaatataagcgactgattgcgtgtccccacccccacgcagcgccagggaagagcaggctgttgcagatgcagccacggatccatcttggaccattagcagctccctcccaaatcttccctgagctattctcatcacgcctccttctacctcggagcctcagaaaaatccggcattcatggagtctagccgaaaacagtaaaaacaaaacaaacaaacaaaaaaaacaggctacaatgcttccattaaacttcctcatccttcccatgggcagccaaaaatattttggaggactatcatgaatgcttgattatgtcaacacctgtctgcaaacctgcaatgcaaccctttcaccaccatcccctcaaaaatagtaacaaattgtttctcccaccacccacctgcccgtatcctttcaatctctctaatcctcactaaatcacccaggttcaccatatgcatcgagcaactctccattttatcccacgagctggtatttttccccacctgcccagtcttggcgttaacgcccactggactatctccccgcccccaacctgttttcctcacaccccgctatttcctcaccgcctgcacaaccttacgttccccttcccctttgcccattttccaaacgctcgtccccggggggctgaagccgtcagtagtcgagggtaattcgtcctcctcccgcctcgcctcctaatccccccagcccccaggctcccgctcgccctctttcccagggcgggggctccccgcgcgccttacccgcacaggaggagctgcagctcttcgtccccagggcggggcaggctcctgggctcccgccgccgccgggcgcggacggctcggctccgaaggacgacgaggagatggaatgggactgagtggccgccgacggctccgccatggctacgcgagcgagggtgggagaagggtgaaaagagatacggggcgggagagagggaggggaaatagaataatccggcaactggctcgctcaagtccctttactccgcctgctccgaggacagactccgacagactgactgactcagccgagcgcagctagagggcgggagcgcgagcgcgcatgcgcacaaagggccccaagcgggtgccaaagcgcgcagcggcgcagggcgcaggcgcaagaaccgctcctctgcgctcttgcagggaaggaggggcaaagccggcctcacgcggcgcctcgcgcgccgagggttggggagcgtcccttggggaccagacgcaaaaggcgtatccaagccccaatccccgcccacgactgcggctaatcgtggagctgcgggatagtattccctcctgcctctttatgtgaatgttttagggtcggcagattatgtattttaacggtagaaatgtctttgggcttccattatggaaactctctttcccgtacattccagagcctatatcttttgtttgatgcattcccacctgtgactccaataaaaactgaaaaccagagtgtagagtaggcccactctgcaaggtgctttgtgaatctcactggctgtgtcgtaatatctcctcaccgagaggcagagatggcacggccccccatttggtaggtggagaaagatgctatacagaatgaaaaacgattactcattccaatcacattgcaatgcagtcgcagaacctgcttcgtattcttatctcgttactgttgccagagaagggtccaccttgggtcttaaggttctcttttcctccgaatagactgtcagatagagacgacatattttagagagggaaaaaaaatgctgagctgatgaagaagagccaggagataagaaaatgttggctgtgattatgggggatgataaaattagatattaaaaattcagaataaggccgcagtcagtggcagaggcccgtagtctctgctacggcagagaagggaggatcacttgagcccaggagttggagtccagcctgggccacacagcgagaaccttcctgccttaaaaaaaaaaaaaaaagtaaaaaaaatcagaataaggcacaaaatacacataattgaattttattcatagactaaaagaggtccttagcagaacatgtatttaaaaccagatttctagcctatattggattttgttcattttttgcttttcctgggctggattgccaaattcgaagccttctccctacatctggtcaaaatattggaaaggtgcatagtctttgttaaaggaggactgttggctgggcgcggtggctcacacctgtaatcccagcactttgggaggccgaggcaggtggatcatctgatgtcaggagttcaagaacagcctggccaatgtggtgaaaccctgtctctactaaaaatacaaaaattagctgggggtagtggcgggcgcctgtaatcccaactactcgggaggctgaggcaggagaattgcttgaactcgggaggcagaggttgcagtgagcagagatctcaccattgcactccagcttgggtgaaagagcaaatctccgtcaaataaaaaaaaaaaaaggaggactgtatcctggaaataataaaaatcaaggctgtcgactgttactgctaaagcagcaatcgatgacccaaagtacaattgcaggatcagcagatcctgtaaagatgcagcctcatgaagcgggaggtggtcagccaagctgccactgaggggaaaggcgatctgaccagtggaaatcttctagaacaagctgtgtactacatctgcccttgagtttttaaggtcaggtaaagccccagggggtgggaggatgactcctggcctttgcaatgctctgaaaaaggcatagaaaaatatttcccaaaataactttgtggctaataccttaccctggcacttactgcatcagctgataatgcagcaaactgtctcttggatggcaaagggaaataatagcagatcggataaccaagccagttatctacccattctgatacgtgcatatgtttttttaaaaatcgcattattaggggagctgttttcttcttccttccttctttcttgtctattaaacgctctgctccttaaaacaaaacaaacaaacaaaaatctacattatt

SEQ ID NO: 915473 - DNA, 4001 bp, Homo sapiens
cacagggcagagtcgctggtgcagagtggtcccaggaaaggatgctccctggaaaggcagcagaggcctctcgctctggaaggaggggcacagggtcccagacgagaagcaagggctccacacccaacgggctgcttcagggaagggctggggcctgcgggcagatgctgagggggcaggggctgaggaggtgggagctgaggagtgggatggaggtggtggtgatgccagtgacgcaggggcctggggaggcactgacgcgggtgacggaggtttagagctgctgcaaacagcttctcactctgccagaatgtaacaccccaaaataagcagccaccgtggtggcggcagcggctgcagaatccaacgtccaggccggataaataaatggcagcacaggagccagcctgtttgcccaccctcggaggctgtcactccccttccaaagtcctcaccctctgtccctcacagccacccccagggccctgagctcaaagcaccccccatctggcccaccagccactccctgagagaagaaatgtggcaggcaggcgctttgggaatggagggcttcccacgtggaagtggttaccagaagcctctttgtctcatccctgggcagcacccccaatccccagtccctctctctcagcctttctcttcctcctcctcttccctcctctccagcccctctcccatccatggttccctgtctccaaccctcttcgccggttcctgataccccttctctagtcaccatccccatccttctctggtttctgatctttccattctccttttccattccagtccccagggtcccagtcctgattctctttcccgctacctccatcccaggattctgggtccctgtccatagtcttcttcccatccctcccctgatctggtctttcctctccttccctcttccttggtcttcacctgggtcccacttccctccacgcttttcccatctaacctttattccttctccccctcccccgctccatctccctcctcctttgagcttccctcaccactttctccatctttgagttctccttcctatccctctccccctgacccctccccaccccacccccagtctctggcccacacccttatctgtcactcaatcagtagaactatcctctttctagcgccctccatctctcctaccagagagggccacttggatttccctctgcgcctcctacctccccagacagccccctacccacatctcctgtcttcccaggtggccagaaagtgctgaggcaccgggcaggaggagttgctgagtcggcgcttccccagccggcccgagtcctcagcgtcccccggagcaggtggagcggggacagcggaacctgagcctccctccccgctccgggccgggtccacctgccccctgcgtcccacctcggtcacgagctcctcgcacgcgcccgcgggctcccagccaagtgccctcctgctgagaacagccctggcggcgggggcgcggccccagcgctgagcttttccccttccccaggttaccccacctccccaactgccccaccctcaatccctgaaagaggggacgccctgcttctctccccaggatgccctccgctctcccgccgctggcgttcttaccttgcagcaggcgcctgagcccgggcagcatcttgtctcgatgctcgggggagggggcagcggggggagggcgctcccactcgctccctgagcccgccggatgcacggcggggaccccgcggggctccgggagggcccgggagtccccgggctgcgtggccgggccgcggcgctctaccctgcgccgcccgggctgcgggcctcgggaggagccatcggccccgacgggacggggcggggcgcgacggggcggggaaggctggggctggccgtcgacgcccagcgcccgcgccccgctagctgcgctgtccgctcgagagtccgtcagtccgtctgtccgtgtgcccaggctgctagccgagggagagtggggacagcgaggaagctcttcccaaccacccccactccttcccgcactcgctggctcctccctcgtttgctggcttgccgacttaaccctttctcgaccactaggaggcgggagcggctttctaaccccctccaccccgcccccctcccccccgcttaagcgacccggaggactgtgttcgatcgtcctcgcggcgccactcttctagagaaatcccttcttgggggaatgcggtagtttagaggaacgccgtggacttgtcctgttcccccctcccaactttccaggagaagatgagcttctgggtcaccccctcccccgcccccagccgcgtccctcgcgccagtgtcccagcctccagcatttctgtcccctgggacagctccaagattccacttttccttccactcccagacctcaagcccagtgtgcgactataagaatagtatatgcaagagtttgtgcgtgcaagatcgagtgcatatgagcgtgcacgtgcgcgcaaggatgcttgtgcaggtgtgactcaggatgcttgcccgttaccctttgtacgggcttggggaagcgggggggggggcacgtgagtgtgcacacgggtgagccgctgaaagtccgccagcgtgcatgtctgagctggtgggaaacgtgaggctgtgcgaggttttgcgcttgcgatcttggggatgggtggaaagaaatatgtgcccggtgtgtgtatgccccttagtgcatttacaagcgggtgcgagatgggcgcgcgtgcgagtgtgtgcgtttttttgtgtatgtatgatgtgtccgggaggggagaccttatctcccgcgggggtgcaggagaggacccaaagctggggagaagactgttggcttcgcgtgaacttcctctacccccttttaaagaggggcggattatggtctcactggagcccctctggcccttcatggcctggtcacaggcggtatcagcagacccatcacctaggcacttccctacaaaggctgcagggcggttgacccaggtcttgactcggcccggcgcgtccgcggagccgccccggcgtaggataggctcggggccctcgggggagccgcttcgggtacggtggccaggcagcgctggcggggttggggctgctggagcctcaggtgcggcggtgccggggctgctgagccccctgggctgccgctcccgcgagcacagaagcccctcgccccgctgcccgcgccgcggctcctcctttcctatccgtgccagggtccaatgcagtgcctggcatacagtcggctcttgataaatgttggtcttattcttcccattcattctctgctccctccacggtctctcgttcttctcgcgttctcattcgatttctctggttttctcccccgactcttactcatatttcgtggtctctgtctctctgttccctccctccctcactctctctcggaccttttctgtctctactcgtctgtttccctgcccggtcttctgtctttctcactgtctctctgtgtcttcgtctctctcctcctccccgcggggctccctgcgtctctgtctctcgtctctgtgtgtctcggtgtctctgcctccctttctctccccctcttccccagtttcattcccaggctcccggcccgtgggcacctcggctctcgggtgccccctgctggttccattttcggaccttctcggccccccagctcctctctgtgcccctaaatttcctttcccgcccctctcgttttcggatcaggtagaaacagaaagaaaagtctctggggctcccgtcttccctcacccagggctccccctatttccaggaggcaggacaggaccctgcgtttccccaggacccaccccgactagggcctgcgcctggggggagggcctggaggcggcggcggggagggagtgttgggggtagcagggtggggtttggcgtccttccccggaatgagccgcggcacaatctgtcgctgg

SEQ ID NO: 915474 - DNA, 4001 bp, Homo sapiens
tagctgggattacaggtgcctgccaccacgcctggctacattttagtatttttagtagagacggggtttcaccatgttggccaggctgctccggaactcatgacctcaagtgattcatccaccttggcctcccaaagtgctggaattacaggcgtgagccttggctgcactttctaatcacccagagagaaactgaaagtcccagtgcccaggccacaccccaggccagtttctgcagactctgctggggagttgaaggcatgggtatttcaggtgatgccaaggtgtgcctgagattcataaccatcaacctctaggaggtggtcagtgatgcgtctacctggcaagagccctgacctcaagcacagccgggctcaaacctctgccctgccacctgctgactggcagtaagtccctgggcattggcttcagctgctctaagtctcagctttctcaccttccaagatcagctttctcaccttccaagagaggaagattgcgtcacagagtcattctgaaactaaatgagaaaatgctgtggtccttgtgggggcttgaggcacgttagttcccagctcttgtcaagaaggctggagaaggaagaatggaaacagaacaaaccaggaagggagcccctgacagagcgaggctaaagagccctgtacattatccaactaggaaatcgaaggaggaaggagaaagaagacagaagagtcaacagccttagtcatactcctatgcgatttatgctgagggacattttatacccattgcaggccttattttgcatcttctacgcaaaacaaacagctcaggtgctcctggaaaggatgattgttctttctctgagtaactgacaacaatcctcgactctctaatctgtttagcagctccccaggcacattgggcagcacaacctaaggcagcggctcaaatcttaaggaagcccaaaaataccccgtgtgcgttgttactggatgccccgtcccttacggctcaggagatgtgtttttgatacaccttgcagcggcttctgaaatgtgatccatccacttaacacatcctgagaagctgcactacggggaaaggggatattcccagcagctctgaaagactcgagacaggcaacccagcaaaccctagttcctggcaggcctcagcaacgcagacactagcaactctgtggttcaaaagcagccttccgaaagcatcattttccccagtttatcaggtccagggtgatgtttctcttcagaaatcctgcaaaccttctgaagccttaccatcaaaagcctcgccaaggaacgaaaagaagcttcggctgctgacacccaggaccaaggagcagaaaaccaggcccgtgagaagcttcatggtgctgaaatgaaaggagaagtcaggcagtcgcccacaagactggcacagcttcccttgggacttatattccgacgagagcctggttatttccactggatcttattagagtctcagtggctcatctaggaaaccttgcagcaggacctcactcagagccagaagccctcggttctgaacccatcagccctgaagcctgactgcataagaggatgccaacgtggcactgatggaggaaggcaggagttaccaccagactgtcactccctcaagtagcctataattccccataacgcatttaccgtgtgttccctctgccccgcacagaactcaacatgggataaacacaaagcaggatcattattttttattcttaaagcctttagcacctggtattcccaggtgttctcccatccaagtactaccaggcccgaccctgcttacctctctagatcagaggagataagacaccttcagaatggtatggctgtatgccccaggataactattttttttaaaggaaatgataatcttgttgggaaagagaaaacagagtaagttttaaaaatcactccttggtgtgctcctcacctgatctgtgctgtagctgagctgcgggtccctgcctgccagggagcggtggctgctatttatactgagccttccctgctggtttcttgggagcgaagaaaagctggatgtggtccctggggaaagtccctgcaggtcatttcccctacaaaacggtctaagacaagttcctggatgccagtggtttcttcatcccgggtcatttatcccagttgtgcaacctgagggaacaagatgtgcctggcagctgtcagggcaggagaccagctctgctcctcagcattgagggggctgaggctgcggagttgagagtgggagccccgtgatggcggcacctgggctgctggaaggtgtgaagtgagggcagctttgaagccagctcctgactctaccagtcatttcctcaggatgggctctgctgggccacatggcagatgcctctgaaatgaagtccctctgagttcatatctaaagcttcaaagctgacagactaggtccagcacagtggctcactcctataatcccaatgcttttggaggccaaggcaggaggatcacttggggtcaagagtttaagatcactctgtgcaaaactgtaagatcttgtctctacgaaatataaaaataaatggaccgggtgtggtagtgtgcacctgcagtcccagctactcaagaggctgaagcggaaggattgtgggagacccaggaggtcaaggctgcagtgagctataatcacgccactgcactccagcctggttaacagagcaagaccctgtgtctaaaagaaaacaaaataaaactagcagcctacccctgccatgtctcatgtgtgccctggaaggctccttccacccctcagtctagatatccagagatttacctcctcagcacagaaaagccctgctcagctggcctagtcaattaggaaattaggaaggaaggaagtggtcagtaccagagcccagcagggctgaggccaggacatgcagagaggctggtggatatagcagcaactgtggtttcttcttctccagtccgttttcactcttttattttttctttctttccttccttccttcatttcttccttcctctctctttctccttccttccttccttactccctctctgtcttcctccttccttcttctctcttcctccttccttcctctctctcttccttccttctttccctcctttcttcctctttccctccctcccttccctccctccctccttccttccttcttttcttcctcccttcttctcttcctcccttccttcctctctctttctccttccttcctctctctttctccttccttccttcctctctctttctttcctcttttcttttctttctttcagaatgctatgaatataggcctcaggataactactttttaaaggaaatgacaatcttgttgggaaagagaaaacagtaagtcttaaaaacactccttggcatactcctcacctgatcctcctctcctcccctcccctcccctcccctcccctcccctctctcctcccctctcccctcccctctcccttcccctcccctcccctcccctgccctcccctcccctcctctcttctcctctcctctcaagacagggtcttgctctgttgcctgagctggagtgcagtggtgcaatcatggctcactgcagcctcagcctcccaggtttaagtgatccttgcatctcaacctcccaagtagctgggactgcagttgtttgccaatatgtttgagtaatttttaaaatttttagtacagtgggagtttcaccatgttgcccaggctggtctcaaattcctaacctgcagtcctcctgccttggcctcccaaagtgctgagattataggcatgagctaccatgcccagccagaagttcatatctgattgcttctatttttcagtgaaataggaagcaaagttgtcaactgagaagagaatgaacgaggagttgtgggaagtttcagaagagaagagaagtagaaagcagacatctaggaaaggaagaatgtgactga

SEQ ID NO: 915475 - DNA, 4001 bp, Homo sapiens
gtgcctgccaccacgcctggctacattttcatatttttagtagacacagggtttcaccatgttggccaggctgctccggaactcatgacctcaagtgattcatccaccttggcctcccaaagtgctggaattacaggcgtgagccttggctgcactttctaatcacccagagagaaactgaaagtcccagtgcccaggccacaccccaggccagtttctgcagactctgctggggagttgaaggcatgggtagttcaggtgatgccaaggtgtgtctgagattcataaccatcaacctctgggaggtggtcagtgatgcgtctacctggcaagagccctgacctcaagcacagccgggctcaaacctctgccctgccacctgctgactggcagtaagtccctgggcattggcctcagctgctctaagtctcagctttctcaccttcacagaagggatgcctgcctcacagagtcattctgaaactagatgagaaaatgctgtggtccttgtgggggcttgaggcacgttagttcccagctcttgtcaagaaggctggagaaggaagaatggaaacagaacaaaccaggaagggagcccctgacagagcgaggctaaagagccctgtacattatccaactaggaaatcgaaggaggaaggagaaagaagacagaagagtcaacagccttagtcatactcctatgcgatttatgctgagggacattttataccaattgcaggccttattttgcatcttctactcaaaacaaacagctcaggtgctcctggaaaggatgattgttctttctctgagtaactgacaacaatcctcgactctctaatctgtttagcagctccccaggcacattgggcagcacaacctaaggcagcggctcaaatcttaaggaagcccaaaaataccccgtgtgcgttgttactggatgccccgtcccttacggctcaggagatgtgtttttgatacaccttgcagcggcttctgaaatgtgatccatccacttaacacatcctgagaagctgcactacggggaaaggggatattcccagcagctctgaaagactcgagacaggcaacccagcaaaccctagttcctggcaggcctcagcaacgcagacactagcaactctgtggttcaaaagcagccttccgaaagcatcattttccccagtttatcaggtccagggcgatgtttctcttcagaaatcctgcaaaccttctgaagccttaccatcaaaagcctcgccaaggaacgaaaagaagcttcggctgctgacactcaggaccaaggagcagaaaaccaggcccgtgagaagcttcatggtgctgaaatgaaaggagaagtcaggcagtcgcccacaagactggcacagcttcccttgggacttatattccgacgagagcctggttatttccactggatcttattagagtctcagtggctcatctaggaaaccttgcagcaggacctcactcagagccagaagccctcggttctgaacccatcagccctgaagcctgactgcataagaggatgccaatgtggcactgatggaggaaggcaggagttaccaccagactgtcactccctcaagtagcctataattccccataacgcatttaccgtgtgttccctctgccccgcacagaactcaacatgggataaacacaaagcaggatcattattttttattcttaaagcctttagcacctggtattcccaggtgttctcccatccaagtactaccaggcccgaccctgcttacctctctagatcagaggagataagacaccttcagaatggtatggctgtatgccccaggataactattttttttaaaggaaatgataatcttgttgggaaagagaaaacagagtaagttttaaaaatcactccttggtgtgctcctcacctgatctgtgctgtagctgagctgcgggtccctgtctgccagggagaggtggctgctatttatagtgagccttgctggtctcttgggagggaagaaaagctggatgtggtccctggggaaagtccctgcaggtcatttcccctacaaactggtctaagacaagttcctggatgccggtggtttcttcatcccgggtcatttatcccagttgtgtaacctatgggaacaagagaggtttgctgtgccttggcaatggacagggtgctagatcagctctgctcctcagcattgggggaagtgcagctgcagagatgccagtgggagccccgtgatggcggcacctgggctgctggaaggtgtggagtgagggcagctcttcagccagctcctgactataccggtcatttcctcaggatgggccctgctgggccacatggcagatgaccctgactgaaatccctgtgagttcatgtctaaagctttaagctttaaaacggacagcctacccctgccacatctcatgtgtgccctggaagcctccttccacccctctggatgtcctgatatttctcagcacagaaaatctctgctccgctggcttagccaatttggaaatgctttttctaagttggctcctgagccaaggacaatgtagagagggggactttctgctgccccagcctagtcctggagccccaccttgggagaatgagagtgtggtgcgttaaataggcagcccagctggggacgtgcccagcatccaggcagggaagggtgggagagctcttggtctgctgtattatcacggaggggtgcagggggcatgcagatcactctctcatgagaacatcaacagggtcagattagctctgcagaggcttatggaggagcatggtggccagagatgggtcagtaccagagcccaggggggctgaggccaggacatgcagagaggctggtggacatagcagcaactctggtttcttcttctccagtccatgttcataccctgagggctaggcatttgtaataacaaacaaacaagcaatttagaaatgggccaggcatggtggcatgtgcctatagtcccagctacttgggaggccaaggcaggaggcctgcttgaacccagaaatttgaggccagcctgggcaacacagcaagattatcttaaaaaattttttttaatctctgagaaatgggtagggccaggaagtaaaggatggccaaatactccataagcagcaaatgcgtggctccaatgtgaacaatgatattatagactctgttctgagacctatgcattgacacctccacctcccccactacatcttgccaccttaaaaccactgagagtggtacctgctggaatgggtccacacacacagtcacacatattttaggcagggtagttgacatccccagggaaaaagagctcacagagagaggctgaatgtttccaactgggtagcagtaatagtacatcatgctgtacatggtacagcacagatcaggtgaaaataatagcacatcgtgattaaccagggcttattccagggagtcaagaagagtttcatatcagaaaaatctatctttgtaattcactataccagtaatcaaagaaaaggattgtacatttattttactagatgcagaaaatgaatttcataattgtcaacatctactgatgataaggaaaatgtataacaaaataaagagaccatttctgacttgagaaaggataaataccaatatgttatagcaacagttctcaaactgttttccagggaaccctaagaatccctccttagggaggctttgatctcaaaattatttttagaatagtgctaacacactattttcatgtttcagtctcattttctcatgagtacacacaatatgacaagttagttgatatgagtgtggatttccacatggtaactgacttttcagaagctaccacttgttgagtttggtataatatagaatagccacaattatctaaaaataccattaaaatacactcccccatttcaactatatatctgtgtgaggctgaattttcttcatata

SEQ ID NO: 915476 - DNA, 4001 bp, Homo sapiens; identical to SEQ ID NO: 915475

SEQ ID NO: 915477 - DNA, 4001 bp, Homo sapiens
acagttgttctcattggcattgtgcttaaagtaacctggggagtttttcaaatgctattcctagtcccacttcacttctaagattctgactcagtaactatgagaagaggcttcagagtgtacttttaaaacaaacaccggccgatttaaatgctggtggaccatacaacaaattctgaaatacactgacctaagggaaaagatattctctactatgtgcagaaaaacttagtacatgctaccaaaactttttaaaaactatttatagaatatcatttttaaaagcacaaaatgcagaaaaaatgaaaatttataaaatttcaattgaaaaattacaaaaaattcaactacaaaattaataacaacacatgaagttcaaagtattgcataacctgacaaacatagttttcccattttaacagctagtcaataagattcgtttcccatccagaatggcagaagtcagtttcccagccgtatctcagccctcctgtggctaatcagtagaaatttgctctttttatttatggatagaagttagggcttaattttcataagctctgcatcccaagcattggccatttgcttgggtacaggatgggatttctctactctctgctaggcatgtctcagtcttggagtataattgtgaactcagtatattccctgaggtggatgagctaaataaacatcatgccctgagaaatctgccatctgtaaatttccgcagtgggagataaccccctggaagtttttatccttctgcactctacaccaagagtacaggctgggcccaaagcatctttaacctctcgtctggaaaccccaagggagggtgataaatcagaccagcctagaggaagaaacagatacagaaaaccacactcctgctctgacctctgtgtggcttctctaaggagcactcacatccagtgagtatgtggcccctgctcagaatgaatcctgggtatgtgccctccatcctccagagttcttaccttggagagcctccttgaaaaacgaacgccagctttcactggtgactcccatgaccaaggagcagaaaacaatgcctgtgaaaagcctcattgtgctgaagagaaagaaagacaggggcagaggatcataaaaaaaaacacagatctatgttttgaggactgaatttctttcctttttttctttctttttttccttttctttctttctccttcctttctttctttcctccctttctttctttcttttttttttcctattgcccaggctaaagtgcaatgatatgattaaggcttactgcagcctcgaccttctgggctcaagtgatcctcccacctcagcctcctgagtattaaggactacaaacgtgcaccatcacactcagctaatttttttttttttttttttggtagagacaaggtcttggtatgtatgttcggcccaggctagtctcgaactcctggcctcaagcaatcttcctacctcaacctcccaaaggattacaggcatgagccactgtgccagccaaaggactgaatttgaaagactaattccccatttccatttgtttgtatgagaatcataactgcatgaaagattgaaacgggttttaagaagaagcataaacccttaattctcagcccagatctctagaaagaataagaggattccaacgtgttatttggtctgtggtcaatttgtcacccaatacagcagactaaagtcaatcaagaagcatttcctgagttcctactctcctcagcactgaccccgtaatgaggtagaaaacacagtttctctccaattgaaatttgacaattatgtgagaaaaggatctcaaaagagtcaaataagagaaattactccttggaagaaacctcacctgtggacctttctccagatgaaatttcagtaaaggcagagctgctggtatcttctggccgtggagctatagttggtacctctgctggctttggcattaatgggagaacggttttaaatccaacaacctgccttgccaaagtcctttttgctcaattctttgggtattttaaaaattaacatattgggtaatagtgtttccttatctagaagtagttttccaaattgggtcatcaaggtatttattttctggcagtttttcttaattgccacttttccctctttttagtttcctgtatcacagaagagttgtatttgcaaaatccagtgtgggaagacagaggtctttctccactttcttctctttgtgtctttccattcttaactgtttagtaggaggtcttcccaaaaaattgcacatagatattatgctgtaggaagtgatcaatattattagcaaaagagatgtttgcttgtctcttgtgacttctctctaaagaatgtaaggacacagaacaagcaagacttgactgtaccattcatgggatgaggtaatgattctgggagaatacaaggacaggaataacaccagaagatcaagggtgaaggcctttgaggcataaaaactcttttttcatataaatatgtattattctgcactttcttttaaacttactatttattggaagtctttccatgtcgggcttgttgctttttttttttttttttttacagctacacagtattccattgcatggatggaccataatttatacaatattaatggctgttttgacagttattaaccttttgatattacaaataatggtgcatttattaaccttgtacatatgtctcttgcacatgtacaaatatatctctaggataaattcctacagaagaaactccatggtgaaaaagtatcagattttataaattttttgtttgtttgtttgagacagagtctcactctgtcccccaggctggagtgcagtggcatgatctcagctcactgcaacctccacctccggggttcaagagattcccctgcctcggcctcttgagtagctgggattataggcacatgccaccacatcaggctaatttttctatttttaagagagacgggatttcgccatgttggccaggctagtctcgacccacttacctcaaatgatctgcccacctcggcttcccaaagtgctaggattacaggcatgagccaacgtccctggccctagattttataaatttttatatgttgcaaattgccttccatgagggctgtatcaatctctactcccaccagaaatgagtgaaagaacttggttccacattgtctctcacacagtatactctcaaactttttggtctttgaaattgtgagtaaaataaaactcaaagtaattttaatttacatttctcttattatgattttggtttcacatctttccacatgtttaagagctatttctattttctaggaattgtgaattcataccttcatatcaaagtagtcattttttactggtttattgtgtttttatttatcacattagagaaactttttatatacagggaaaatgagtatgttatctaggatatgagttacaaatatttttcccagcttatttatcttctgattatgatggcttatgttctgccaaagaaattatttatgttcttgtctttattaatattttctttagttgtcttctcaatttcatagtatttgaagagctttccctactttgtttttttgtggttttcttaaactcaaatgtttttatttcattcctttttaaaaattttttgtgggtacatagtaggtgtatataattatggggtacatgagatattttggtacagccatgcaatgcgcaataatcacatcatggaaaattgggtatccatcccctcaagcatttatcctttgtgttacaaataatccaattatactcttttggttattttacaatgtacagctaaattattactgactatagtcccccgttgtgctatcaaatactagctcttattcattctaagtatttttttggtactcattaaccatcctcacctcccctcactccccccctccccactacccttcccagcctctg

SEQ ID NO: 915478 - DNA, 4001 bp, Homo sapiens
tagaagtttggtgatgttcttgtgtccagaaatatgccacagggacttaactcttgtttatatcaattagctatggtaaaattggtttcattatcagtaattttgcttacagtcacaatttccaagaacctactgatgttaagtgagcacttactttaatattaacccataatcgtttagaagtcacaaagaggctatcagcaaagtatcttctcttgcaaaaatcttcttttaaaaatgtagtaccttgggtagatctactctttcaacattcacaaagtaaatactgttgctaggcactggggtagatatacaaagacaagtaagatataatcccttacatttaagcttttttttttttttaacttttaggatctagtggggaaagacatgtaaagggatagtcatattagaaaaggcaaagtgattcaactgaattgtggacaaagagttctggtagcaaaaacgatggaccaatgacctattcctaggagaagatggggaaccttcccttaggtgctgatatttaagctaaattttaaaggaagaatagtagtttgtcatgtgaagaaggagagaagtgagtattcagaggaaagcacaagagttcagagttaagaaagggcctagcatgtttggggatggtgaacagttcagagttgatggaacacagtgtatcatgagaagatgaggctggaaaatgtacaaacagccctggattccaaacttcaagaaacatgcatttttctcccaggcaaaaagaactaagagcagtatcatgaatagccctgtctttaaagaagattattctggcagctgtgtagaaaattgactggagaggatagacaataggaggagaggaaccaattagggaaacatggggggaagaaaacacatttactgacagcctcctataagccaaacaccatgctaagcactctgttgccattataatctcacttaacctacacaataaccttatatataatataaatattataatcccattttatagaaattaagggacaaatagaggttctgagccgttaggtgacctgcagctagtgggtaaggaagctgcgttttttgtttttttgagacagggtcttactccgtcccccagcctggagtgcagaagctggatcatagctcactgcagcctccaacttcaggctcaagcgatcctccagcctcagcctcctgagtcgctgggactacaggcgtgcaccgtcacgaccggcttttttttttttttttttttaagtttgtagaaaccaggtctatgttgcccaggctggtctcaaactcctggctcaagcgatccttccgcctcggcctcccaaagtgttgggattacagaggtgagccaccgcgcctggtcagaagccacgtttttaatataaaagttgtataaccctaaagtcaccatttattctattacaacgatagtccatgaaatacataaattaaggacctgggcttcagaaatgacagtggggatggggagcaaaacccgaggaatgcagttacacgatcatgtatttttggagaacttgggaaagcaaaatagaacggcaagtatttcagcatccctaccattatacttccctttgtgtcgagagaccccgagggggcccagatagttttggggtccgcagcggccggcgaaacgcaaggagcaaggtcccgcagcgcacgcctggggaggggtctttgtggggatggcggctcccggggcaggaggattcgccagaggcggagccccggtgcctgggggatgtagggacaccccacgcgtggcgcgagtttccacacctggatgagtccgctgaggacgccgaagagccagtgtttgctgtagaccgtgctccctatgcagtctccaccggccacctcctcctcctcctccttgtcgcgacccggcggcggcggcgaggggttgcggtccatgactttgtcgcgtcccgcgcttgaaggccgtgccggaagctgcggaggagacgaccggcgccctagtgccagagcgcccggcgtacccggtgggactccccctacagcgccatctgctgttcggagcctggccagctgccaaggcggcttgacctcccccaccccatcctatcgaggaccctggcacgaacatactcataattatttgtcaccctcactgaatcaggtgttccatttctccaggagctcttagactgattgaagaaggaagggtggggagcagtgaggaagcctcaggaacagatgtgaatctcaaagctagcggacttattctattcgccttctgatctatgttgcccaggctggtctcgaacttctggctcaagcaatccttctgcctcggcctcccaaagtgttgggattacaaacgtgagccaccgcgcctggtcagaagccactttttttatataaaagttgtataaccctaataatataatcctctgatctctggccactgttgccattcctaaaaatatccgtaggggaagctggatggcttgtgagggattccagggatccaaagtgattcgaaaaactaaagaggcaccatttgtccccattggaatggcaggttttgcagtagttgctgcatacggattatacaaattgaaaagcaggggaaatactaaaatatcacgtcacctgatccacatgcgtgtggcagtccagctttgttgtaggagcaatgactgttggtatgggctattccatgtatccggatttctatgcaaaacttaaaccttagaagaagagatgttgtctttgtcttgttggaggagcttgactcattaatgagtcatctcattattgaagttacatgtttatgttgaacataaattatttgggtaggttcagatgatactacggtattttgaatagtcgcttcctttcgtgtaggcttgatttgcctggtgaccaaattattagtgactagttcactaactagatcattccggggagccaagttaacacacaagaaacacgtcacctaaatgcgcttgatggtgttaaaatgtccaacttcttaaactgttaagatgaaattaatactaaggaagatagcaggccaatcctgaagtactcccagtttgctgcagaatcttgcatgtttcgaatgttaagagtccaatttactccagttaatttaactttttttctgtctgtcttgtggactggttggctcttttagaactctttaaaaaaaagtgcatgaaatataacttgtaaagcctcctacaactgacagtattgtgtgcgtgtgtttaaaccgaatctagaaaccttacaacagacctgcatagtattagtattgattaaagaaccacaattgtaaacatgagaaaaccttaattatggatttcagtttagcacttttgtaattgcagaattacatttttgctgctgttatattagaagaatttttcagtgtcatcttgaaatagaaatgtgtattttaagcacccatgcaaaggtaaatgaaaaacacttctttctccataagaatcgtaaacattaaactaaaaaaattacctatgatggaattgatttacaagtacccactttgatttaatggaattaaatttatagatgatataagctacttccacatgaaatttcaaaaatatcaatataatgaccaaacaggaatggagacatgaaattatttatttatttatttattttatttattttgagacggagtctcgctgtcgcccaggctggagtgcagtggcgcgatctcggctcactgcaggctccgccccttggggttcccgtcattctcctgcctcagccttcagagtagctgggactacaggctcccgccacctcgcccggctaattttttttttgtatttttagtagggacggggtttcaccgtgttagccaggatggtctcgatctcctgacctcgtgatccgcccgcctcggcctaccaaagtgctgggattacaggcgcgggccaccgcgcccggccgaaattatttaaaat

SEQ ID NO: 915479 - DNA, 4001 bp, Homo sapiens
ataattaagccactgtactccagcctgggcaagagtgagaccctgtctcaaaaaacacaaacaggccgggtgcagtgactcacgcctgtaatcccagcactttgggaggcagaggtgagctatcattttgaggtcaggagttcgagaccagcatggccaacatggtgttggcctgtctctactaaatatccaaacactagccgggtgtggtggtgcacgcctgtagtcccagctctttgggaggctgacgcaggcgaatagcctgaacccgggaggcggaggttgcagttaggcaagatcatgccaccgcactccagcctgggcgacagagctagactctgtctcaaaaacaaagaaagaaacaaataataagagtttattggaatgcatcgcccatagaaagtatctctaatgccttaaacttctgtctcaggtatattcgtgggcatatgtgttcttgtttgcttggtaaccctgactgggcggggaggttaaaagagtttgaaaatcagccgggcgcggtggctcacgcctgtaatcccagcactttgtgaggccaaggtgggcggatcacgaggtcaggagttcgagaccagcctgaccaacatggtgaaacccccgtctctactaaatacaaaaattagctgggtgtggtggcgcgcgcctgtgatcccagctactcaggaggctgaggcagaagaatcgcttgacccagggaggcggaggttgcagtgagccgagatcgcgccactgcactccagcctgggcgacagagcgagactcaaaaaaaaaaaagtttgaaaatcactatttagaccaattctccctttccacccttgccccctccacttttattcctgagacaactaagacccagagatgggcccgaggtcccacgtcggggctcggtggatcttgtgctgtcctgggagggggctaatggtgagatgttaaagctaatccttcctttccctacctccactgtcatggtgggctcctgtccccacgctctgcccagccgccaggatcccgactcacccaggttatagagcagaaagaggccctggaaggcgggttggcgggggtgcggcccggcgccccgcgcgtagcagcgccgcagcgagccgaagccctcctgcacctgggcctgcagcagcaccgggtccgcgggtccccgcgccgcgtcgggcccgagccgcgccactacggtcagcagcgtggccagcgccgcctccagcaccacagctgcctcggcgtcgcccgctccctgcagcgccaggtccaggagcacagctcgcaagcggtctgccacgaagctggccacctcggcgcgggcgatgtcggcgctctccgccacctcaccggccaggtagcgcacggtggccagcagcacggagggcggacgcaactggctgggcgggggccggggcttgccggcggcgggtcggctgtactccttcaccgcgcgctgcggatccgcgcggggcgggtcctggcggcaacccggcaccacctccaagcggtgcaggcggtgctccctttcgcgctgggcgcgctcggcggccgggcacatgtccgggcaggtgcccacgggcagctcgcagccgggcatgagggggctgcggggagacggtgggcgctcagcatcccggggacggcagtgctgcgggaaggcacgcgaggccggccggggggtggggagcggcgggtcggggcggggctgaacctgtctgggcccgccttcccgccatgatccccggccttcgggccgcccatcgagccacctctgtcctctcacccagtccagtcgagttggcctcccgagatgcactgcgttgtagtccagctacgcctctgcggctccgcgcgctctagggcggctaacggcccccatcgagcgccaagttcagcttcgcgcgctccccttagtgtttttaacgtgtagcccgggccgctcccatgatacaccggtgtagtccctgccgcaaccaaccgctttgtggtgaggcggggcggggcggggctgaggccacgccttccagcccgctgagcaatcaggatttggctttggggcctctgagacaagtacccgggctttgggttcctctccttcgtcccttccacccaataaaccggctccatcggcttgtcctctatttccctgagactatgctccctattttctagctcaggggccagcaaatgttttctgcaaagggccaggttgtaaatgttttgggatttgcaggcggcaaagactcaactctgcaactgtttcaactgccagtgtagcgcgaaagcagctatcacaatactaaatgaattagcctggttgtgttccaacaaattttatttatggactcttaaatttcatataattttcacttgtcacatataaatttcacctgtcattgtcacagaatattattttgatttttttaatcattaaaaaaagtaaaaaccactctcacagcccttacattaaaaaggaggtgggccagatttggctgcaggtgggagtttgcagaccccagttctagaggggtaaactaatggtttaatgaccacagctgctgctcacacatcaagacagacagacatgggccgggcgtagtgactcatgcctgtaatctcagcactttgggagactgaggcgggtggatcacttgaggtcaggagttcgagaccagcctggccaacatggtgtaaccccgtccctactgaaaatacaaaatattagctgggcgtggtggcatgtgcctgcaatctcagctactggggaggctgagacaggagaactgcttgaacctgggaggtggaggttgcagtgagccgcgatcccaccactgcactccagtctgggcgacacagcgagactccaactcaaaaaaaccccaaaaagacaggcagggtcagaagtgtgagtccttgattccaaggtggcaggtgtaatcagggagctaagaattcattatttttctcattcttggtccagttacctacagaaatggctcctgtaattacaagaccaggaggtagggccaggccctggggagaggagaaggggctggcagtgcaggagcgagagtcccagggaatggcccactccctgttagggtgggagttgagacaggtgcaggcgcaggatctcctctgcccgcttcaggtactcagctgccttcttcttcacaccttcctggcgggcaggcaacgggtcacctgtggagagagaatgctcagctgaggcacctgggcaccactggcctggtcagaacccctggtcgggtcctttacaattcgcagagcatcaccatgtgcttttccctcctctctggggcccagcatccattctcctcagtctacaaataagaaaactgaggccatgctgggcgcggtggctcacgcctgtaatcccagcactttgggaggccgaggtgggtggatcacgaggtcaggggttcgagaccagcctgaccaacatggtgaaagcccatctctactaaaactacaaaaattcgctgggcgtggtggcacgtgcctgtaatcccagctactcaggaggctgaggcaggagaatggcttgaacctgggaggtggaggttgcagtgagccaagattgtgccactgcactccagcctgggcgacagagcgagactctgtctcaaaaaataaaaataaataaataaaaataaataaaaaataaaaattcaaaaattagccaggcatggtggtgggcgcctgtaatcccagctagtcgggaggctgaggcagtagaatcacttgaacctggggggcggaggttgcagtgagccgagattgtgcactccagcctgcaacaagagcaagactctgtctcaaaaaaaaaaaaaaaaaaagaggaagaagaaaactgaggccacaagaggttaaaaacaacaacaacaaaaaaacagaaacaaaaatctgcccaggttacacagctggtcagtgaggagtaaaagggctcctgatccgtgatttgc

SEQ ID NO: 915480 - DNA, 4001 bp, Homo sapiens
gccaagatggtgaaaccccgtctctactaaaaatataaaaattagccaggcacggtggtgcgcacctgtaatcccagatactcgggaggctgaggtaggagaattgcttgaacccaggaggcagagcttgcagtgagctgagatcgtgccactgcactctagcctgggcaatggagcaagactttgtctcaaaaaaacaaaacaaaacaaaaaaaaaactcttcctttcctgcattcccatcctgcatcctaccttctcctttatcttaaaggcttctctctccacctgggccatggatcccaacctctccaggctccccaaggtcaccagcctcctcgtttctaaatctagtgggttcttttcggttctggttttgcttgatctcctgtggtatgtgggactgctgatcgctccctccttctaacaatactctcttcccaaagttcccatgacacaaaggttttcctgcctttttggttactctgtctcctttttttggtaacatctttctctgcctactactaacataagggcatttctcaggttctagtcctgaccccctcttctcatgtcacagtctttcaggggcttcactggccacccagatactgactcccaatggctttatccagtccaaactctggatttccccattaccatcaaccttgacaaccccaaaagtgaactatctccccccacccccgctccaaatctgcttctcttccctactcctcaatttcagtagaaatgacacccactacctatctggctgctcaagccaaaattcaaggagtcatcctccattccttcttcccaccctcatacaagtgctgagttctgttcattcctcctccaaaacacctctccaacctgtccacttctctcaatcccactgctgctgccttggtgcaggccaccatcagccctcccctggcctatagccctcctggtttcctggtctccagtcctgactacctttgactaaattctcaatccagtgatgtttacaaaatacggatctgagcaactcactcctcaactcacatccatggctccctactatcctcaagacaatctacagttcttaacagagactacagtacagggtcctttgtgttcacatccctgtctatcttactccctcatttctctaccatgcgccctacacgattcgtccaataccaggtttttcttgcctctgtatatgctgacactacttcattcactcattcaacatatttattgagaatctgattgtaccagacaactgaggaaaacagaagccctctgtcctcaagcagctgagtggagaaagtcaacctctaatcctaaacaaccgtagaaagacttttttctttttgagacagagtctcgctttgttgcccaggctggagtacactggcgggaccgcagctcactgcagcctctaactcctgggctcaagggatcccgtagaaagactatttaatagagctggtaaacagcttgggggtttcctggcctgaagagcttcgctgacactgcgcgcacacccagacccacgcgttccgggacccccgcccgacccgccccctgcgcaggccccgcctcctcaccggcctcgtagccgtcatcgcgcttctcccgcttcacgcgccgctcggagggctctgcctggctgcgctcccgcccgtgcgtgctgctccgggcctcagcttcggccccgcgccgcccgctcccgcgctcgcccccacgttcccggctccgcttccgtcgttcgccaccgctaccgccactgccgccactccggtgcttgtgttttttgtgttcccggtgccgcggcggctgctcggtggcacccccggtgccggccgccgccgtcgtcccggccgcctccttctctccgcgatgcttcttggacgaccccatagtggcacgtccactccgagcccggctgccgccgagcccagacaacgcaaaatgggaatacttccgggtcgctcggcagccgctgtcgtgttgccggaaactaagagcggctgcttccgtcgctcgccttggagcctgccccagaggctcatgggaaggccgggatcagcgctcgactgcacattcgcgccgtctcgggtcgggtgggttctttgagcgagtggtcccattgcgcatgcgctcctcaagggaagcggaattaacccggaggtgggatcccagaactggaaggacttagagcccattaagtcagtgtcttcgtggctttaagttcctccccggcctccctgcgcttgcacttcaccggcaacggggtgttcactacctcacggtctttccgtagacacctccctcctacaatgggcgctcgcttagtggactcctagggtcgtggctccaacgggtgttgttttcccgagatctccaattccacagcccagcttcagacccgctataaccagtatcgtcagggaacgcttccttcccacgttccctgttttgttttgttttgttttttcccttgagataggatctcactctgttgctcaggctggagtgcagtggcgtgatcacagcgcactgcagcctcgacctcctgggctcaagtgatcctcccacctcagccttcccagtagctgggactacgagagtacgctaccacgcccctttaatttttgtatttttttgtagatggttggtggggagcgggggtagggggtggggtcactatgttggccaggctggtctcgaactcctgagctcaggctatacacccgccttggcctcccaaagtgctgagattacaggcatgcgccactgcgcctggccctggattggatttttaaaacctggccccgtgaactgttaagattgtttaggagctccacatgggcgtcagtgtatccctggaacccctgaaattgaatgcaaaatgtggcacatctgtgtgtatgagtttttttcttgaggagaccagccctaacttaaaactattgggacttaaaaccccagtgcaggccgggcgcggtggctcacgcctgtaatcccagcactttgggaggccaaggcaggcgaatcacgaggtcaagagatcgagaccatcctggcctacatggtaaaaccccgtctctactaaaaatacaaaaattagctgggtgtggtggcgcacacctgtagtcccagctactcaggaggctgaggcaggagaatcgcttgaacctgggaggcagaggttgcagtgagttgagatcacaccattgcactccggcctggtgacagagcgagactctgtcttaaaaaaaaaaaaaaaaagcgcagtgcacacaatcccaatctctcctgaaacccctcccctcacccagtggttgctcagtctgtggctccctgtgtggcacaactcagcatgtgttaggctatgttgtatgcgcccctttaaggatccaccccctctcccactcactgggcgtcctcagaggcaggagtcatttcatcttattcatgcttgaatttataggacccaacatatacattggagatggggtggagaagtcacagctcttgctctttgagatgtccccactcctcaggagcagagaaggggctgtgtgtactgggtggggggaaccaaaagagccaaagctcctggtggggagggggtgcggggacagagctaagcctgctgcccacccacctgccacctccaacttccaacccgtagcttccaccacccccaccaccagaaatctcatactgtgtttgccataaagcctttaattttatctcagggactgcactccgggtccaggctggggttgtagtgcctgtcaggctggctgccggtgggttctgtccttgggggcctctgaggagagtgctccattctcacccccattgacctgtggctccttcaagacacagatagaggcccctgactctgcagctcccacccccatgcccaaggaaaccactgacaatgtggcttcaaaccctgcttcagtgccggcttgctgtgtgatcctgggcaaagtgactc

SEQ ID NO: 915481 - DNA, 4001 bp, Homo sapiens
atttcctgttttggttattacactgtgatcatgtaggagaacattcttgtttgcagaaaatgcacattaaagtattctgggatgacagggcatcaggtcaacagcttcctctcaaattgttggggggcgggtagaattttttgtaccattcttgcaacttttttgcaagtctgttattgtttcaacattgttggccgggcgtggtggctcaagcctgtaatcccagcactttgggaggccgaggccggtggatcacgagatcaggagttcaagaccagcctggccaggatggtgaaatcccgtctctactacaaatacaaaaattagcgggcgtgttggcgggcgcctgtaaatcccagctactccggaggctgaggcagagaattgcttcaacccgggagacagaggttgcagtgagccaagatcgcaccactgcactccagcgtgggcaacagagcaaaactccgtctcaaaaaaaaaaaaaaaaaaaattgtttaaaagtggggagggggggaggcggaacaatgtcactaaaaactaaaggttaaaaaactgatttcccacacttaatcttgatagaaaagaaacatcagactatgccaaattactaggaaataaaattttggatccagaagtttaaacatttaaactttctctttaacaattgacctcaatcaggtcatgactggtgaaagagaaaagaacatgaaaggttcccactaaaggagaggaagttcttaggagaggaataatgaaagagagagtggaccaagagtgggtagaacaatggtattctgagctaccaatggctgtaaccatcaggaaaacacaatctcagcatctctgaaaaatgaaggggctgtagagctgatatctcaaattccttgcaaatgtgggactagaattgccctaaaatagaagtggtttcccagctcaatttgttattacattatgcttagctacatagtaatacaagagaatacaaatacagaaataaacgtgcatgaaccctgaattctcttaagttgtggaagtccgtcaattaaagtgtaaaatacaatgcatttgcccaattgttccttacgacgaaaattctgtgacaaataaaaagaacaatgaaaacacattaaagtgaaacaagatcaccttcagcggtcagctggctgtccttagttaaaagacaagtcatgtcactgtgaagtgaccgtcacatttgtcctgaaagaatagggagcatttcctagaaaggggtaaaagtgcaaagaatcctgtccccttccctggtaccacgcgttccttggggaggtcactaggcccccaacagcacaggggtgagttagcactggactctcagcacttcctttcggagaggacaaccccctgcgtcactggttactcactcaggatgcagggcagaagtttatccccgaggaacttagcacagttggctcccgccctcccagccttgcggtcctgggcccaatctcagggctctctctgccccgggtaccctgcagcctccagcgggagggtcgcgagaccccaactcgcctccggcccgcccagcgggtgcgcccaggggctgggcagacgcggcgtcttccctccccctaccgtcgtgccggcccccccacgcccaccgccaggctcagcccagccgagaaggccggacgccgaccgcccgctcctccgagactcggcctggccctccccgacgcccgtccccgacgcccggccccgcggagcccactggacagcggccggggggcggggaggcccgggggcggtgccgccccacacccttacctggcttctcgtggtcatagcctaccacgatgaagtagtcagccagccgggccatggccgccgccgccgcgctcgggaagcgggtccccgtcgccgccctcgccgccgccgcccacccggcccgggagggctcagcattttccctgcagcggcagtagcggcagcggcagcgcttcagccatgtttgacaaccgaggcgcgctctgcgcttgcgcggcgcctagtgcccgctcctcccccgcccccacccgcgctggctcggctgccccaagcccgggcggcgagcccacctccaccctccgcgggcctcgcggactgctgcgctgggggagtgggcggtcgggcgtgttcccgccacgcgccgccaccgcggcccctggaggtggttcactttgaggcctggatgctgcttcacggccccctctgcctccctatttttcctaaagcagggggtccttccttccgccttctctattctgtttggatttggaagaagggatgtggagagttgaggggtcacttggaaagctggctgcttcctctgctccccaccaccaccaaagatgaaattctcccgccctcggttggaagcaaggaatttgcatcgacagggcttttgctgcacgtttcctgtttatgttgtgtagatgggaattttagaaacatgccaccgagcagacgggggagggagaggcttttacgcaatcctccaaggagcctcgggtttcaatgccgggtgggccgggggcggtcggcctgggcttcccccggagcgcccgggagagccagattccaccgaggaacgcggcatccccgggatcctcccgaactgggctggcctctccctggggagccccgcacgcctcggcttgcttccctcgcagcggtcccagggctctcgcagcccgagcaggtggacttccaacttccctgctcaaacatgcacaaaaatgaatagatggtcccgtccttccgtctcgggattatcaaagtcgcttgcttttttgttgaacctcctattgaccatttcgaatttggctggtgtgacattcaggtgaactcactttgtcatttgttaatatctcacgaagttttagtagaatttgtacaagtggtagaccaaagttttggaaatctccgtggtttagaagttgtctttgtggttgcttatcactgctcactattaattgagggtttgatccttcatatttacacataagacaaggcctcttagcaaagcgtctagtatatagtaggtgcctacaaaatattttaaatgagtaaatgtgcgattttccccaacgaccagcaggaagccgcaatggctccaactctgaactgagagagttgacatctcagctcctgaagatttactctgctgtaatttactatttcccctttctctgccacacttgtttcatctacaaattgggagggttgggctgcactagaactgaaactgaaggaatactttaactccaggacctctatgtcagttgctaatggtaaaactgaatcagctgaatttgcaaacgtggagggaagatagtttgatcctgaaaataattaaaccaaaaaaaaaaaaacctcagtcataccccgtgcagcaatcctctctgtaacttccctgagagctcatcatccaacttgatcactttcagtaaaaagtaatcttacttccttgggaggcagcgcattccactgtttaacagccctattgttagaaagttcttccttattatttcagagttgtcttactgtaacttcccctgattctgctctccggaactatccagaaaaaaaaaatctatcttcatatgatagatttttaaggcagctatcatattccttcccaacttttctaaaaatagggcaaaattcacatattgtaaaattagccacttgaaaatgtagaattcagtggcaattaagtacattcccaatgctgtacaactaccatgtctatctagttacaaaacattttcatcacccaaaagaaaacctcacaaccattaagcagtcattctcattctcccctcccacagcccctggcaatcaccattttgctttctgtctctatggatttacctattatgaatatttcatattcatatcatacaatatgtgggttttttgtgtcttggtttttctcacttagtatattgttctcagcttgtttacgggcagatacagt

SEQ ID NO: 915482 - DNA, 4001 bp, Homo sapiens
ggtaacagctgatgagccaatctacatgttccccacagtgccatgtggccctacttcaatacaatacctagaatagtatcgtgcaaccaaaaagaacacaaacatgtttgattgctgtgaggtttagagactaagtagacttttgacatttgacccaagaaaggtactcaataaaatagcatctatatgattatcactgttaaggccgtcaaaaatgcgtcaaaattacttcaatagaagataaaataggtgccacttgatttttgtttgaaaaataactgacagtagttgatagtaatatttaatatatactaggtaatataaatattttaaatatattaactaattttccctttcaagaagcctcaaaggtaggtactagtattattttatagatgaagaagctgggcacagaaattttaagtaacttgcatagggtcataagagtaaataaatgctggagctaggattcaaatacacacaatctagttgcaaagtacgtgaacttctgccaagttctatagcctcttcaccactacttcaagtcgtcaactcctgaatttttaaaaatgttcagtgcctctacaagctcatataattttaaggggttataagccctgaagttaggggtcccaaggaccctaaattaagtaccactgcttcaaacagaaacttaaatactttgtccttgcagaattaaagaaacttcttcttaaaactcagttataataacaatattaggcttagaacaactcagtctaccattatctttttgccctactttaaaagtatagaaaatgatagctaatatttattgagaaccaggtattatttttgtataacctcatctaatccctatacctctatgagataggtacttctatgctccccactttatagatagggaaactgaggtcagagtatttaaataacttgttcagtagcaagcaacaataacagaaaaaaccagctgggatgtacattccacaacctttctctttgctaccacgttatgttatctctcaagatgttttatatgcagatgagggattctgagtaccaccccatgctaattaattacattacataacgaatggaaaagcactctgtaaatgatcaaggatcagttattatttactaggtatcaatcattagaaactttaaaaaatgatagtgatataaagacaaataacttccagagggtttcctctaaaagtaccgagctgccacaaactttccagtttggaaactctatgtactgaggtcttgttttcttcacttacaccacctccaaatctactctgctgtaacacagggatgtcagtatacattatttttccttttatgatgcaaaaggaacagattatttcccttttcctttcagtctcctcagccccagattgctgtcccttcattctaattacgccgcagcaacagaggcttgcaatggtcaggagttctgataccgaccagttcttcagcctgattcttctggcctttaaaagaaaaaaaccctcccagaacgaagggaaaagtaaagcattcgtgttcagcagccagaccagaattcccttgagtaagagatctgcaacacccaacatcaaacactgcattttctttaagcccgtccacggtcggctccttcaagtccaggcctccctatcggccccgcgatccctcccagcgcgagcggaaggcccctccgcccggactcccaggtggcgcagccctccaggccccgaggtcccccggcccagccctcgccgccagtcttcgggatgccaggctacctgccagcctctcctctcactcggcgcaggactcggatccgtatgctaccgcgatcctaccatccgcccaacgcctagcacccagagggcactcgctaaccaaccgcggcgcggagaaaagccgtgctgcgaggacaccttccgcctcgcccacccgagtcccaggcgctgaagtctctccatcttcttttattccatcgccccccggcccagcccgctcaggtgtattccgcttccttccccgcccacccaccgtccccacctggaggtggtccgccgccgctccgcacgccactgctctgcaaactgtcctagcagctgggcagccagcaagcgggccgggaggctggagcggccagccaatcagcgaccggcgccataagctgatatgacggcagatcgcgcgaagggcctgcgcgcagctctccgcggtcacgtgggcgccgcgcgctcggccacgccccctttgtcctctgactaaggggagggcgggcgccccatccgagtacctttgcggtggaggatgcggtttcgggttttgcgtttgtttctttgctttctttttaaactagctcttgtgtcattcatggtggtaccaggcaggtttacggtgtttatacaaacattcctagaacgggtgccctgcgttgagggaaatagacgacacttcctttgacgcgaatgtctgggtcgttttctccctcaagggaggaggtgcagatgttcccaaacaggtgctcaaggttttaagacgtagtccccccgattttctagcgctgaatggctggaggctccgcgagccggtgtatgtaggggtctaaatggtgacaagatgagggtaaacatggacagaaaccttttcacgatacaagttgttgaaaaccaaggttaacgcagatctaattggctttgatttgctacacatgaatcgagcagctccgatttcctgaaacagagctgagcagaggagggtggcttcacaggcagaagaggacggaggaaagcagaaataaggaaccaaaagatctgtcgtttcagagtgactttccttaaacagagattaaaacagaggggactgacttgtgataccagctcagcaacttcaaagtggcaaactgggccactttacctattacataaataatatggggaatacatgacagaaatgagggatttttaagggaaaaaaataacatgattcgatctgccttcaaaagacttttccggtagttaaacttcaaatgtacataggatactggacaaagttcaaatgaatttaaaatagtgtaggtggtttttttaaaaaagactcattatataaataaaaataaattttaaaaagttttgagtgtctacttcgtttaacacatcgtactgaacaccgggaatggaaagagatgttacaataatgacaaagacatggttcccaaccttaaaaagcttatgtgctgtgggagaaatgggcatgtataaataactatgttgcttattacaaggacaggaaataaacagtaattggtggtataggctgagcacagagacaaaatggctattctgatgagggaaattagggaaggaacattgttttgcccaatgaaatgatttgaatggacactttaaaatgttattgagcatagatgataaaacatttattaaacgaataaaagctcaaaagtgaaatgttataagcaaacatcaaatatcctgaatctctagaattttattgttgaatatgccttagctattacaagtggtctttattcttggtgacttagggattcccaagaaatttgcaatcactcctgacaactcaaagtagtaataagttaacctcaagagaacaatcttgtttaaaaataaatttaagtgtattttttaattattatttaagttctgggatacatgtgcagaacgtgcaggtttgttacataggtatacatgtgccatggtggcttgctgcaccttccaacccgtcatctaggttttaagccctgcatgcattagttatttgtcctaatgttctccctccccttgccctccaccccctgacaggccccggtgtgtgatgtttccctccctgtgtccatgtgttctcattgttcaactcccacagttgaacaactcccacatactcaatgagaatatgtggtgtttggttttttgttctgtgttattttgctgagaatgatggcttccggcttcatccatgtc

SEQ ID NO: 915483 - DNA, 4001 bp, Homo sapiens
attatcactgttaaggccgtcaaaaatgcgtcaaaattacttcaatagaagataaaataggtgccacttgatttttgtttgaaaaataactgacagtagttgatagtaatatttaatatatactaggtaatataaatattttaaatatattaactaattttccctttcaagaagcctcaaaggtaggtactagtattattttatagatgaagaagctgggcacagaaattttaagtaacttgcatagggtcataagagtaaataaatgctggagctaggattcaaatacacacaatctagttgcaaagtacgtgaacttctgccaagttctatagcctcttcaccactacttcaagtcgtcaactcctgaatttttaaaaatgttcagtgcctctacaagctcatataattttaaggggttataagccctgaagttaggggtcccaaggaccctaaattaagtaccactgcttcaaacagaaacttaaatactttgtccttgcagaattaaagaaacttcttcttaaaactcagttataataacaatattaggcttagaacaactcagtctaccattatctttttgccctactttaaaagtatagaaaatgatagctaatatttattgagaaccaggtattatttttgtataacctcatctaatccctatacctctatgagataggtacttctatgctccccactttatagatagggaaactgaggtcagagtatttaaataacttgttcagtagcaagcaacaataacagaaaaaaccagctgggatgtacattccacaacctttctctttgctaccacgttatgttatctctcaagatgttttatatgcagatgagggattctgagtaccaccccatgctaattaattacattacataacgaatggaaaagcactctgtaaatgatcaaggatcagttattatttactaggtatcaatcattagaaactttaaaaaatgatagtgatataaagacaaataacttccagagggtttcctctaaaagtaccgagctgccacaaactttccagtttggaaactctatgtactgaggtcttgttttcttcacttacaccacctccaaatctactctgctgtaacacagggatgtcagtatacattatttttccttttatgatgcaaaaggaacagattatttcccttttcctttcagtctcctcagccccagattgctgtcccttcattctaattacgccgcagcaacagaggcttgcaatggtcaggagttctgataccgaccagttcttcagcctgattcttctggcctttaaaagaaaaaaaccctcccagaacgaagggaaaagtaaagcattcgtgttcagcagccagaccagaattcccttgagtaagagatctgcaacacccaacatcaaacactgcattttctttaagcccgtccacggtcggctccttcaagtccaggcctccctatcggccccgcgatccctcccagcgcgagcggaaggcccctccgcccggactcccaggtggcgcagccctccaggccccgaggtcccccggcccagccctcgccgccagtcttcgggatgccaggctacctgccagcctctcctctcactcggcgcaggactcggatccgtatgctaccgcgatcctaccatccgcccaacgcctagcacccagagggcactcgctaaccaaccgcggcgcggagaaaagccgtgctgcgaggacaccttccgcctcgcccacccgagtcccaggcgctgaagtctctccatcttcttttattccatcgccccccggcccagcccgctcaggtgtattccgcttccttccccgcccacccaccgtccccacctggaggtggtccgccgccgctccgcacgccactgctctgcaaactgtcctagcagctgggcagccagcaagcgggccgggaggctggagcggccagccaatcagcgaccggcgccataagctgatatgacggcagatcgcgcgaagggcctgcgcgcagctctccgcggtcacgtgggcgccgcgcgctcggccacgccccctttgtcctctgactaaggggagggcgggcgccccatccgagtacctttgcggtggaggatgcggtttcgggttttgcgtttgtttctttgctttctttttaaactagctcttgtgtcattcatggtggtaccaggcaggtttacggtgtttatacaaacattcctagaacgggtgccctgcgttgagggaaatagacgacacttcctttgacgcgaatgtctgggtcgttttctccctcaagggaggaggtgcagatgttcccaaacaggtgctcaaggttttaagacgtagtccccccgattttctagcgctgaatggctggaggctccgcgagccggtgtatgtaggggtctaaatggtgacaagatgagggtaaacatggacagaaaccttttcacgatacaagttgttgaaaaccaaggttaacgcagatctaattggctttgatttgctacacatgaatcgagcagctccgatttcctgaaacagagctgagcagaggagggtggcttcacaggcagaagaggacggaggaaagcagaaataaggaaccaaaagatctgtcgtttcagagtgactttccttaaacagagattaaaacagaggggactgacttgtgataccagctcagcaacttcaaagtggcaaactgggccactttacctattacataaataatatggggaatacatgacagaaatgagggatttttaagggaaaaaaataacatgattcgatctgccttcaaaagacttttccggtagttaaacttcaaatgtacataggatactggacaaagttcaaatgaatttaaaatagtgtaggtggtttttttaaaaaagactcattatataaataaaaataaattttaaaaagttttgagtgtctacttcgtttaacacatcgtactgaacaccgggaatggaaagagatgttacaataatgacaaagacatggttcccaaccttaaaaagcttatgtgctgtgggagaaatgggcatgtataaataactatgttgcttattacaaggacaggaaataaacagtaattggtggtataggctgagcacagagacaaaatggctattctgatgagggaaattagggaaggaacattgttttgcccaatgaaatgatttgaatggacactttaaaatgttattgagcatagatgataaaacatttattaaacgaataaaagctcaaaagtgaaatgttataagcaaacatcaaatatcctgaatctctagaattttattgttgaatatgccttagctattacaagtggtctttattcttggtgacttagggattcccaagaaatttgcaatcactcctgacaactcaaagtagtaataagttaacctcaagagaacaatcttgtttaaaaataaatttaagtgtattttttaattattatttaagttctgggatacatgtgcagaacgtgcaggtttgttacataggtatacatgtgccatggtggcttgctgcaccttccaacccgtcatctaggttttaagccctgcatgcattagttatttgtcctaatgttctccctccccttgccctccaccccctgacaggccccggtgtgtgatgtttccctccctgtgtccatgtgttctcattgttcaactcccacagttgaacaactcccacatactcaatgagaatatgtggtgtttggttttttgttctgtgttattttgctgagaatgatggcttccggcttcatccatgtccctgcaaaagacatgaactcattcttttttttatggctgcatagtattccgtggtgtataagtgtattaatagcacatcctggggtgcagcattcctacatgtcttttctatccaggcacactgatggatcagggtaatttatttattcattgtttgcaagggtctatggtaccaaccagccagtacca

SEQ ID NO: 915484 - DNA, 4001 bp, Homo sapiens
tctcatctgtaaaatgggaacaatatccctacttcattttattttttattttttaaattttaatttaatttaaattttatttttatttatttatttgttttcagacggagtctcgctctattgcccaggctggagtgcagtgatgccatctcggctgactgcaacctctgcctcccaggttcaagtgattctcctgcctcggcctcccaagtagctgggactacaggcatgcgccaccatgcctggctaatttttgtatttttaatagagacaaggtttcaccatgttggccaggttggtcctgaactcctgacctcaagtgatctacccacctcggcctcccaaattgctgggattacaggcgtgagccaccgtgcctggcccaatatccctacttcatagggttgttgtaagaataaaaagagaggccaggcatggtggctcacgcctaatcccagcactttgggaggcctaggtgggtggatcacgaggtcaagagatggagaccatcctggccaacatggtgaaaccctgtctctactaaaaatacaaaaattagctgggtgcagtggtgcgtgcctgtaatcccacctacttgggaggctgaggcaggagaatcgcttgaacccgggaggcggaggttgcagtgagctgagatcgcgccactgcactccagcctggcaacagagcgagactctgtctcaaaaaaaaaaaaaaaaaagaatgaaaagagatattatgtgaaagggtgacagtgattggcacattgtgtgaagtaagtgttaaatattgtatgcatgtgcacacaaatagacaaatgcatctctgacccaccccttaacatgttgcagtcctatcttgctcagccacccacctctgtacgcagacagcactgagatcttctaattaatacacatttcagtccaaaatgatgtcattttctctgaaaaacaaataaacctctctgcaaaatagttgttcctactgcttcttggtttgggttttctaactccccagggtcataaaacttatctccatgggtgttgtgaagctttccaagtgaattaattggagtttgtttattaaaaaataacaacagcattttcagatgagaatggaagaggctgacgcagagtgaaaaacagagttagataacccagttccccaaagacgggggatcttggagagagctgtgatccttctttccttcctttctccccctctctccgtctctctttctgcccctcttccccccacagttcttttccttttagtgacagcagcaactactcagagactcctaatcccttttgcagaggacggaaatgtttagaaaacttcactctgggttggcagttccccaaagggaagctctctttctggaatattcctctgtgcccagaatgagagaccttgtcttgggttgggtttcttttggggtcacgagtccctgcagctccccttccagtgacttcagctgccagcatggagtggagaccccagacttggaggctgcaccaaggtctcagcatcttggagtctgtccagatctgggatgagggcctcattattcctatgctggatgtactcatctttatggggtattctccactcctccctccaggctattccattccctgggattctgagggttgttggatatagaagatgggaccctttttaggcttccttacagcctggggctctctccaagtttccaagatgagcttgctcaccagacccagttttctgagactcagcatgcccaggtcctcccagcagctccagagcaggaatgggcagctcactccttcttctgagcagaactggggggtcctgagagttcctaagtccaggagggagggaagggtctctgagcactcaccggagctgcagcagagagccagtgtgaccagggtgagggtgacagcgagtttcatggtggaggagggggatgctctggcccgtctctggttccgtctctgagtctggtgggctagtatgagacatgcccagcaaggtgccttttatatgctctaggcagcagcacccagatggggaagggcagggcaagggctctacataagatactgcactatttacttggcattggcttggtgggataggtaaatattcccttttctcaacccagtttctgtccccactgaaactgagctcacacaatgggccacttgggggtggagggccgagccctgcctggaggcagtgaagggaacccaagtcagaggatgtggaaacccagctgcctgtgtcactcactgaacctgggcactggggcagtccagatcaagagaagcaattgtggagcccacctggagaaactgaggcccaagttccctcacaagtggcagggacaggactaggactaggactcaggaccctgacactccactgggctctttcataggctcccctctgaggagggcgactgaaccttaagccaggaaagacacatggtttggagcattgctgtggtcagacttcgggggcccctggattgaagcatgttgaataaaagggacccttccagaattcccatcagaaacctgagccctgccccaggctgggtctgttcccacccagaagtgctctcaagtcctgtgctcctgatggcccaattggtgggaccttcagtccttatctcacttgacctcccaatggccttgacacctgtgactgcttccttctcgaaccattctctctcttgcgctcccacgcctcagttctttcctgttttccttcttctggccattccttcttgttctctttagatgtttattctttactgttcttaagtgttgatggttcccaggctttggccttctcccctttcttgcctccagttgccatttcctggttcttctccaaagcccgggcctcatagcacctaacctggcctggtcaaaatcccctgactcgacctccctgcctccctgctagctctcctcagccatcctctgaaaggccatcagaatgatcttcctaaaacccactggtcgtgtccttcttcttgaaacccttaaactcttccttttgcctaaagaataaaattcaagtgcaatttacaaggcccttgcccactgacctttgcctaccatttgaacttcatttctcctctcccccacacaacgacttagccctctcttactatttgtggattcgagaatgttccatgttttttcatgcctttctacctatgcacaagctaagcctcatgcctgaatacacatttcctgccttgtccacttcgccaaattctattcgtacttcaagactcaatcaaatattgatccattcattcatccaataaatgctgaccacctatgatgtgccagatgtggtgctaggagtcgggaactggggtagatagacatggagaggcattgcgtggcacttcaagaactcctcaaaaataaataaataaataaaaataaataaacaaataaaaggccagacagggtggctcatgcctgtaatcccaggactttgggaggctgaggcaggtggatcacctaaggtcaggagtttgagaccagcctggctgacatgatgaaaccccgtctctactaaaaatacaaaaattagctggatgtggtggtgggcacctgtaatcccagctacttgggaggctgaggcaggagaattgcttgaatctgggagtcatagattgcggtgagctgagatcacgccattgcactccagcctgggcaacaagagcaaaactccgtctcagaaaaaaaaaaaaaaaagaaggaccccattgtgcctgagggcttcgaaagggttgctgtgcctgcaaagggggcattcaggggccagagcacacaaggcctcgttctaaggcctttacactcagagtgggaagctcttgaaggttttaatcagggagtgacatggtctgatatccctttcctgatgaactgaccctgacttgggcagctgggggaatggggtgttatttcctgacacagagaagactt

SEQ ID NO: 915485 - DNA, 4001 bp, Homo sapiens
ggtcttgcctgtggtgtgcctgctcctgtgtggaccctgtgtgtacctctgtggggactttcacacgtgtgttccttgagtgggatcctctgtatgtgggtctgtgtgtgtggctgtggccctgtgttcctgatgtccccatttgtgtgtacctctgtggggactttcacacgtgtgttccttgagtgggatcctctgtatgtgggtctgtgtgtgtggctgtggccctgtgttcctgatgtccccatttgtgtgtccctctgtgggggactttcgcacgtgtgctccttgagtaggatcctctgtatgtgggtctgtgtgtgtggctgtggccctgtgttcctgatgtccccatttgtgtgtccctctgtggggactttcgcacgtgtgctccttgagtgggatcctctgtatgtgggtctgtgtgtgtggctgtggccccgagtgtgttcctgatgtccccatttgtgtgcccctctgtgggggcagagacaggagcctgagctgcggaagaggctttattgattaaacggtttgaggatacatttccatgtgggaggtggtagtgggcgttgtgtccacggctgcttgtgtggcaggtcctatggctgagccatgtctgaggtccacttaggcaccgtcctgactgcccagcacttgcacctggaaggcagacacatgtggactaagagggctgtgctcaataagtggagagccacagctccatcaggcaagcaaggccctcagtgggggggggtctggcatattgctgcctatctcctcccagcagctgggaggtgtgtgtgcacatgtgatggtgtgcacacatgtatgtgtgtgcatatcccagtgtgagcatgtgggtgtgaacgtgtttatacatgtgtgcacgcagtgtacatttcatgtctgcacctgtgtttggatctctgtgtatgttcacatgtgtgcatggaggagtatcccacagactggggaggaggtctatggagtctgggggctgctcggtggacaggaggtctggggtgtccacctgagctggctgatgcgggtgcaatgtctgtgggtggtggatgtctgtgggtggggtaggctgtgtgggtgctgtgttgggtggtcttggtaaggctgcagatctttagaaaatggggtgcccgccgccctcataccagcagcttgaccagctccgccttgtgcattggctgcaggccatctatacaggacttgagttcagtcattgctgccttggcatcttcgttgacattgtacttgcccaaggtcccctcatagagctcctctggggtccccaccagtagtgtttgcaggaagtccatgaaaaactcatcgttgtcctcccctgtggccatccctgcatcacgagcgagatgatgccaggacaggacagggtgactctggtgcaaccacagccctggacctgccccagggctccaacctccatggtctccagaccttccccttcaatgcccacctctcctccccagggcttcctccacaacacctccaactccaccttgcccgaagacccctccacatcccccttaatcttagctgctccaatttccactcagcattccctgggatcaccagggaaggaaagttaagctcctggtgtgggggaaatttcccctgatgagaggctattatgaccagaggcttgaagggtcaggtcaggctggactgggctggggtaggagacactgggctggtgttgggtcagctgggctttgtccttggttggggtggagtagggtgggcgcgggttctgcagggtccttgcccacttctgtgacagaagcaggtggagtgttcactgcagaggcccgatgccaggattttaccttctcaggtaccccccactcccccccacccctgaatgttctggaaaccccagtggcacagactcacggcagatgcagaacagggtgagggccaccagcaggagggcacggctccccttcatgccagcagtctcaggagctgcctccagccagaatcccgggattttatgcctcaccggacagcacctctcctagagggcggaccggacctgcccattaggacccggcagccagcttagatgaggtttgttcacatccctggcccccagtgggtgccaagcagcaacaggcatggagtggctgtgtgacaggtggttggcaagcggctttagggtgtgtgagagagagaacaggtgtgttaggagggaacactggtgagaggccatgccaactgatcggtgaagaaggcagtgggtcctggccaccaagggcctctagtcatgcctgcccttgaggccgagagtggtgggatctggggttggtcccacgcctttcttttaaggtgcgaatccctcctcttatcagtgtgctgtgtgatctgggtctgcatctgggggtctccaatcaggcaggggccccttactactcagatggggtggccgagtaggggaagggggtgcaggctgcacgagtggacacagctgtaggactacctgggggctgtggatctatggggtggggagaagcccagtgacagtgcctagaagagagaaggtggcctgagagggtctgaggaacatagagctggccatgttggggccaggtctcagcaggaagtgaggaatgggacaggcttgaggtacatcttccatcagtagccaggatagcaaggagggcttggggttgctatcctggggttcaaccccccaggttgaaggccctgggggagatggtcccaggacatattacaatggacacaggaggttgggacacctggagtcaccaaacaaaaccatgccaagagagaccatgagtaggggtgtcccagtccagccctctgactgagctgcattgttcaaatccaaagggcccctgctgccacctagtggctgatggcatccacatggccctgggccacacgcgtttagggtctctgtgaagaccaagatccttgttacattgaacgactcctaaatgagcagagatttccacctattcgaaacaatcacataaaatcccatcctggaaaaagcctgggggatggcactaaggctagggatagggtgggatgaagattatagttacagtaaggggtttagggttagggatcaacgttggttaggagtcagggatacagtagggtcaccggtaagggttaggggttaggggtaggggttagggttagggttagggttaggggttaggggttagggttagggttagggttagggttaggggttaggggttagggttagggttaggttttggggtggcgtattttggtcttatacgctgtgttccactggcaatgaaaagagttcttgtttttccttcagcaatttgtcatttttaaaagagtttagcaattctaacagatatagaccagctgtgctatctcattgtggttttcaattgtaaccacattgtggtttcaatgtgtttacttgccatctgtagatcttctttggtgaggtgtctgttcagatgtgtgtgcatttttagttgggctgtttaacttattgtttagttttaataattttttatatattttgaagacaaattctttctcagatgtgtattttgcaaatattttcttcaatatgtggcttgtctttttgttctcttaacaaggtctcttccagagtataaactttaaatattaagaaatccacactgtcacttcttttgtgtatatctaccttttgtgtcatttgttaaaattcattaccaaacccaaaggcagatagcttttcttctattgtttcttctagaaattgtatagttttgcatttttagtgtaaggatgattttgagtgattatttgtgtaagttgtaaagttttcgtctatatccatatcatttcttatggtttccaattaatcgttccctcactatttttgggaaagacacaggatagtgggctttgttagagtagataggtagctagacatgaacaggagggggcctcctggaaaagggaaa

SEQ ID NO: 915486 - DNA, 4001 bp, Homo sapiens
tttttgtaattagcactcttttctcataggccatcgtatccacgcatttcttcacttccatcttggctgcaacagcttccagaggtgccttaaatttggcaagttggaacttgaacacaggttttccagctaataagaagcctgtgatttcagaaccaagagcttggcagaccactgcatttgctggagcaaaagaataaaaatataatttgtgtaaggaaatcagtgtttctcccatgcctccctgatgtcagaccagacaggaaccccagggttttaggcttctattcaataactatgccaatgacaatgtcagacccaggaggttgtgacttccttgaggtcacacagcaaagggtagagctagaactggagaaccaacttcctgatcactcattcagtctttgttttttttttaaagcacactcattactttccaaagcttctctggatggatggccaacgttctcttttctagatttgaaaataatcacttttctatgccagttaagtgacactttattagtcttggacattggtgaagaggaggctttgagtaatcaaattttgaagtggaatggtagagtcagaatcctatcagaaattagagaaatgagtaaatctggaacagaagaagttaaaattattgaaatgttgaaggtgatgttttgagaacaagttgtagaatttaggcttatgtgattcaatacagacagagctaaaaggtaaacaaattaaaacaaaataaaataatgtgaatcagttttaacacacattagaagcttatacaggaaattgtacttggcccatattctgcagcagcatctagaatatttggagaggatgagaggagggaactgaggctcattcctgctcccactgggaattttggaaagacctggagtaatcattttgcttggtctggaatctccattcacctaagtcttttgcaaacaccatgcatccagaaagcgccccaccatgctcaacatgacccctgactacccgacttcaaactgtggggagaatttggagagggtaggatcggggtgtcacagggaaacagggagaggttcagaaaagaagaggaaagagaaaaatcagagtctggatcggtcctgacaggggaaaggaaagtacccaaatgaactggggaaaaatcagccagaattaattttagaaaaatagaagttctgaggctaaccattgtagtatttctaccaccattacggtaggacccctagaagatatattgagtgctgcttattctaagaattcatttgcaggcttcttattgagagaatcagaaagcaccatctcttcttggactgagagttctccaaggatccttcgagatgtaacattttatgagtctgaatttacaatgtaagaagctgtgagctcaattggcacctaaaggtctggggacgagaatgtctgacagtacagtgattggcttcacatccacagctagacccttggcacaataatcccactccattcccattgccactcccggaagaagctctaagcaccagagataggaggaggcgcggggagggtgagcatcttgcccacggtgaaagggctgagaagtggctgagcccagagtcaccccagacctcacattacatcatctgacacagatcccatccaagagtgaagctcaggcagaattcctaacgttcgcctgcattgattttctgcaaaacttcctaggtactggggatttgatgaaatgaggcccgagctttatgagcagttccttcaacaagcacaggataaggtttggaattttggtttgttccagaccccaaccttaaccttaataggtgacctcgtgctcagagaagggtgtgtcccaagggctggtgctggactcatgactgatgtactcaccccggtagcagcaaagggccagcgtgagcagcaggagacacaccgacagcctcatggtggcttattctgctgtgagctcggctttaaccaatgatgagtgatttagactcagccccgggagcctgtggagccgtggagcccagggctatttgtacctagggagcctggctggtcctgcccacatgggcatctggcaggtgatgaggcctggcttccagccctcccttcctagccagggctgctgccatccatcagtgtcacatccccacacctccctgcatcctgagtggggcggagcacgggagggcagccctgcagaaactctgctctgtgctccaggtgagtgtccaggtgcctctggcaatgttccctggaacctcagtttgcttttgggcttttgaggattatctctctgttctttatgtcagtgcaagggcaaatgtgagttctcatttcaggaggacagaaaccgggggtgcaggaagctaggggctgtggtttggttataggagagcaggcacagaagagaccccactttgacctccactgcatgtctgacaatcagccacacgtgtttcagctgcacatagatcaagtctgaaccagacctatcctcccactcagccccttccatccccaccatcttcaccacataggtacctaaaacatagctgcatacaccccacctttggaggatttccttggggaaaacaaccactccccctgtcctctactctgtctcactccaagatctgtgtctttatttatgggtggagttgtcaacatagcacaggttcaaattttctgtctactaaaagcaagcctccagtgacctctagccacccatatctcctcatagggctgatgggatgattaaattgcccaactttttttacccaaggagctgctggggtgtctggaggcaaacaggcatcagaaatactggtcttcgcttctaggcagggacgataatggaaaggaagagatggatgaacagggtgggtggtcacttccctctaacctctgggctcaagttttccacttctaacccagctctgctgcctgggtcatctcattgttgatggaaagcgaaggccatccccagcaaaagcaatagacacccttctgcccttccactgcagtgccatcatttggtgagtaggaaatcaccagaaatttggctcttaagtgaacacacatttgagaacagtcacagcccaggccagagctttccattctctgctctgcaatcaaatcacttggggctcttaaactatactgactccccgcaggctgcttccctttctggggattttgattcagtagttctagggcgaggtcctcttctgtttaaactgctctggtgggtctgatgggcagcagtactgagaaccacccagaaagacctttatgaaggaagcggaccttatggtctgtgtcatcagagacaccttggcaggtctggctgagtcccagctgagggcgacaatgcctctcacttccatcacccaaaatggtggggaagcccctgatgccacctctgcctccaaccctaaggagtggaaggtccagtggcaaagcccatggctaggagggttcagatccatgtctatgggctattgaaccctctgaaaattagtttatgtaaacacagttttctcgtttgtaaaagtaggttaaaaatggtgcctacatcattgggttgatagatgttcaaatgagtgtgtgtgtgtgtgtgtgtgtgtaaaatttaccaggtctggccaggcgcagtggctcacacttataatcccagcactttgggaggccgaggcgggtggatcacctgaggtcaggaggttgagaccagtctggccaacatggtgaaaccccgtctctactaaaaatacaaaaaattagctgggtgtggtggcatgtgcctatagtcccagctactcaggagactgaggcaggagaatctcttgaacaagggaggcagagttgtggtgagctgagatggcaccactgcactccagcctgggcaacaagagcaaaactccatctcaaaaaagaaaaaaaaattaacaaggtctgacatgtagtaaacgctcaataaatgttga

SEQ ID NO: 915487 - DNA, 4001 bp, Homo sapiens
tgggaattctgcctcagggcccgagcacctctcagtcccgagcctgcagcttccatgagcatttgcagctaaacctcaggacagcaactcagaggcagccaggcagagaggcccctggaaaacctctgatttcttgagaaagacagagtgagaacatcccgcttccatggcactgcaggaggtagactagctagggtcttggacgactggccatggtcaggagagtgtcgtgggtgtggaggggagtatggggtctcaggagctgggaggggctccttcctggctctgcagaagctgcagagaagtccagcctgccagtgctacatctgcaggagcccctgctctatgtccctccctgccttcctctccctgttcaaggctcccatgctccccaggacattccacagtgactgtgtccattacatgagggcagtttggtctcaggaaagctcccagcagcgaggcggccatgcttggccctttaccatttctgcctgggcccaggctcactccccatgtcctcagcacactctggggacatggcatccaggcaggtgacatgagaaggaggaacatgcaggaggctgtgtgcagctgagttgaattctgcaggtgaaatggtggcacccaccctgtggccccaggtgaccttctcaagaggtgaccagcaaggcagctgccccaccacctgtgtccccaacagagcagcaagctgacctcacttcatactgtgcagctgaccagaagccttaacaaataaaggagaaagaagttaccaggacttccgcaatgaggcttcgtttctgaagggacatctgatccgtgcatctcttcactcctaacttggctgcaacagcttccggaggggcatcaaatttggcaagacttaacttgaacagaggttcactaatgaagaagaagtctaacagctcagaaacaagagctgggcagaactcggcattggctgcagcaaaagaataaaaatatagttgatgttaggaaagtcgatttttctctttggctccctgacgttagaccagacaggatcccctgggttatatgttcacatacatttgttgtgctgatgacaatgccagacccttcaggtgtgacttcctcaagctctcacaataaaggaaagcacttcatatcaacagccaaactcttttttttccctttgtcacccaggctggaattcagtagctcaatcatggctcactgcagcctctacctcctgggctcaagcgatatccccatctcagccccctaagtagctgagactactggtgcatgtcaccacgtccagctgatttttcatatttcttttggtaaagctggagtttcgccacgttgcctaggccggactcaaactcctgagctcaagcaattcactctccttgaccttccaaagtgctaggattacaggcatgagccgccatgcttagcccacagctagactcttttgacagtattaatctttcttactccattctcatagcctctcctggcagaagcgctaactaccagtgataggaggaggctcagggagggtgagcattgtgcccaaggtcaaagggctgggaagtggcggatcccagattcaccccagacctcacattacatcatctgacacagatcccacccaggagtgaagctcaggcagaagaattcctaatatttgcctgcactgattttcaataaaacttcgtaggtgctggggagtagaagaaatagctctgaacttgatgaggggcttgttcaacaagcacagaaaaaggtttggaattttggttttgtgcagatcctaaccccagcctgaataggtgacctcgtgcttggaagagggtgcttcccaggggctggagctagactcatgactgatgtactcaccctggtagcagcagagggccagcgtgaccagcaggagacacaccgacagcttcatggtggcttgttttgctgtgagctcagctttcacaaacaatgagtgatttggactccaccccaggagcctgtggagctgcagagcccagggctatttgtacctagggagtctagctggtactggtcatgaggcctggctcccagcccacctctccttcccagggctgttgccatccatctgtgtcacctccccacgcctccctgcactctgactggggcagagcacaggagggtagccctgcaggaactctgctctgtgttccaggtgaatgttcaggcacctctggaaatattcctgggattctgtttccttctgagttttgctgattattttttttctttgtatcagttcaagggcacaggtaaattctgactttggaaggcacaggaagctggaaggctgtgttctggttatgggggagcagggacataaggaaaccctgctttgatccccctgcatgtctgacaaccagtaggcttgtttcagttgcacattgagcaagtctaaacaagacctattcccctcagcccctcccatcaccaccatgttcactgcataggtacctaaaacctagttcaatgcatcttacctttggaggatttcctggggaaaagcaactgctgcacctgttctctagcctgtctcactcccaaacctgagtcttgtttatgagtgcagctataaatatggccaagactcacattttctctctacgaggagcaagctttctgtgatgtgtagccacccacatgttgatgggttgacctgatgattacatagcctaactttttccaagtagcttttggagtgtccagagccaatcatgcatcggacaggtactgagagttctttgctctggggctccaggaggggaagaagatggaaaagaagagacagatgatcagggtgagtggtcacttccccccaacctctaggctcaagttttccacttcaaatctagctgtgcagcctgagccaatcccatttttaatagaaagggaaggaagcacccagacaaagcaatacacaccctcctgccctcctgctgtgatgcctttgtgtggtgtgagcaggaaatcaatcactagaaatttctctctcttttttgttattatactttaagttttagggtacgtgtgcacaacgtgcaggttagctacatatgtatacatgtgccatgttggtgtgctgcaccaattaactcatcatttaacattaggtatatctcctaatgctatccctcccccctccccccaccccacaacagtccctggtgtgtgctgttccccttcctgtgtccatgtgttctcattgttcaattcccacctatgagtgagaacacgcggtgtttgtttttttgtccttgcgatagtttgctgagaatgatggtttccagcttcatccatgtccctacaaaggacatgaactcatcattttttatggctgcatagtattccgtggtgtatatgtgccacatttttttaatccagtctatcattgttggacatttgggttggttccaagactttgctattgtgaatagtgctgcaataaacatacgtgtgcatgcgtctttatagcagcatgatttataatcctttgggtatatacccagtaatgggatcgctgggtcaaatggtatttctagttcaaggtccctgaggaatcgccacactgacttccacaatggttgaactagtttacataatcatgtgattttttcattggttctgtttatatgctggattacatttattgatttacgtatgttgaaccaaccttgcatcccagggatgaagcccaattgatcatggtggataagtttaatgcccacaagagaaagcaggaaaaatctaaaattgacaccctaacatcacaattaaaagaactagagaagcaagagcaaacatattcaaaagctagcagaaggcattgaataactaagatcagagcagaactgaaggagatagagacacaaaaaacccttcaaaaaatcaacgaatccaggagctggttttttgaaaagagcaacaaaattgatagaccactagcaaga

SEQ ID NO: 915488 - DNA, 4001 bp, Homo sapiens
agagtgtcatggatgaggagtggatagtgggccctgaggagctgcaaggggctcctggctctgcagaagctgcacaggagcccagttcaccagcaccctgtctgtgggaggcccagctctaggtcccctcaagcctcctctccctgttcaaatctcccacactccctgggacatcccatagtgaccgtgtccactgcgtgagggtaggttgacctcaggaaagatcccagcagggaggcggccgtgcttggcccttcaccatccctgccttggccctagctcactccccatgtcctcagcacactctggggacacagcatccaggcaggtgacctgacaagaaacatgcaggaggctgtgtgcagctgagttgaattctgcctctgcataaaggagaaagaaattaccaggactttttcaatgagagtcgtttcttaaaagatatctgatcggtgcagtgcttcacttccaacttggctgcaagagcttctggaggtggattaagtttggcaacttggaggtttaccgcagcgtcacttaagaataagaagactgtgatctcagaagcaacagctgggcagacaagagcatgggctgcagcacaaaaataaaaatattgttgatgttaggaaagtcgatttttctctcatggctccctgaggttacaccagacaggatcccctgggttctatgtttctataccattattgtgctgatgacaataccagaaactccaggtgtgactttctccgggtcacacaacaaagggaagagcttcatatcctcagctagacttctttttcttttttttgagataggttcacccagactggaatgcagtggcacaatctcggctcactgcagcctgaatgtcttgggctcaagcgatcctccctcagcccccaaagtagctgagactaccagtgcctgccaccatgcccgcttttgtgtgtgtgtgtgtgtgtgtgtgtgtgtgtgtgtgttttgttttgttttttttttttgtagagatggggtttcgccatgttgcccaggctggtgctgaactcctgagctcaagtgatctgcccactgtggcctcccaaagtgctaagattacaggaatgagacaccatgcctggcccacagcttgactcttgacaaccataaccttacttcattctcatagccactcctggcagaagctttaaccaccagtgataagaggaggctcaaggagggtgagcattgtgcccaagatcaaggggtgggaagtgtcgaagcccaggttcaccccagacctcacattacatcatctgacacagatcccattcagaagtgaagctcaggcagaagaattcctaacatttgcctgaactgatttttctataaaacttcttagatactggggattagaagaaatagctctaagcagccaggcgcagtagctcatgcctgttatcccagcactttaggaggccgaggcgggcagatcatctgaggtcgggagttcgagaccagcctgaccaacatggagaaaccccatctctactaaaaatacaaaattagccagctgtggtggcccatgcctgtaatcccagctgctcaggaaggctgaggcaggagaatcacttgaaccccggaggcagaggttgcagtgagccaagatcatgccactgcactccagcctgggcaacaagagcaaaacttctcaaaaaaaaaaaaaaaaaaaggaagaagaaagaagaaatagctctaacctttatgaatcttattcaacaagcacagaaaagggtttggaattttgtttggttttgtgcagaccccaacccaaagcacaaataggtgatcttgtgctcagaagagggtgcatcccaggggctggtgctggactcatgactgatgtactcaccctggtagcagcaaagggccagcgagaccatcaggagacacactgacagcctcatggtggcttattcggctgtgagctcagctttcacaatgagtgatttggattcgactccaggagcctgtgtagtcatggaggccagggctatttgtacctagggagcctggctggtcctacctaccggggcacctggtaggtcatgaggcctggctcccagcccgcccttccaagccagggctgctgccgtccatcaatgtcacctccttaggaatctctgcatctgagtggggcggagcacaagacagcagccttgtgagaactctgctctgtgctccaggtgagtgttcaggtacatctggaaatgttcctgggatcctcaatttccttatgagcttttgctgattagttctttttatctttgtagcagtgcaggggcacaggtgaattatggcttcacaaggcacaggaagctggaaggctgtgttctctttatgggagagcagggacataaggagaccctgctttgatccccctgcatgtctgacaacaagcaggcttgtttcagttgcacattgggaaagtctaatccttcccctcagccccttccatcaccaccatgttcactgcataggtactgaaaacatagttgaatacatcccacctgtagaagatatgctgaggaaaaacatctgctgcacctgttctctagcctgcctcactcccaaacctgaatcttgtttatacgtgcagttatatatatggccaagattcacattttctatctataaaaagcaagctttctgtgatgtgtagccacccacgtcttatcttagggctgatctgaagattaaataacctaactctttttctcaagagcttttggagtgttcagagccaatcatacatcagtggggctctaggctgggaagataatagaagggaagagacagaggaacagggtgggtggtcacttccccctaacccctaggctcaagttttccacttcaaacctatctgtgctgcctgggccaatcccatttttaagggaaagtgaaggaagcccccagacaaagcaatacacacccgccttccctcccattgccgtgccttcatgtggtgtgagtttaatcaccagaaatttttctcttaaataaacttacatttgagaggagtcacagcccaggccatagctttccattctcagctatgtagtcaaatcacttggagcttttaaaacatactgaccccacaggcttctctctctggcgattttgattcagtagcattggggtgaatccctcctttctgtactgtttaaactgctctggtgtttctcacagacagcagggctgagatccagccaggaaaacctttaagaaggaaggggaccttacgggttttgtcatcaaagacacattgacagatttagttgagtccaagctgagggcaacagtggatctcactttcatcacacaggatgacgacggagtccctgaatcagccctgctgccaccaaggagggggagggttggtggtgaggtttacagctatgagggttcagatcctcatttatgggctcctggaccttaggaaaattattcagtttatgtaaccccagttttctcatttgtcaaagtaggctactaatggtgcctacatcattgggttgatagatgatcaaatgagtgtgttcatgggtgtgtgtgtgtttaaaatataccaagttctggtacatagtagttctcaatgtaaactgccattatcttgtcccatttgtcatatatgtcatggtttgccagtagttcctagtttagagcacagccaaaatccactaaatcacctacttgcagaactacacggacacctagatacaccatttctctttgacataaatggaaaaggaaacccagctcatggtcttggaggctgcaaacccatgaatatgggcttcaggactgaggcctcttttgcagtagacaggtctgtgaagcatccaccctttttgtggatgagagtttatcctcactcaggcttgacattcaccttgtcatctgtacagtccattggggagcatgtgtatctctgacagaggattgtttgcgtatacttttat

SEQ ID NO: 915489 - DNA, 4001 bp, Homo sapiens
ccaaatttagagcccgctggttctgatcagtgattttcaaagggtacataagaagaaacccaaattaccatcatcagtccaaagtttttcagagttctatgtgactggttgaggaaacactgcttgaatttccccatagcctctgcagcggcatcactgtctatgaactcttgaagaagctctttgtattcaggtatagatatgtcggaattgatggtcttttcaaccatgtcctccaggagtttgcagccagaatctggaaaaaaaaaaaaaaaaaaaaaagacacaagaacatgggccattactagaggtgtgattcattctacagatgaattgggaagctggctatcttcgtacctccagggacagaccgaggttcagaaagattttggtgcagtatgcagagttctcaattctgggagtgtaaactcaggctctgcaaattctctctgaccttccaaacccagagaagcccaaccctgtgtattcttggtgaagaggaccctcgagaaatgaggtgttctgactggggggacatagcaaacactacttggactttcttggttcaaagtcatgcaatgcttccctgttatcatgcccagcatcaggtagggtttccaaggatttcagatgaatgggtctaggacattgtccattagttctgttgactctactgcaataaaagggaatgtgtggccaggtatggtggctcacgcctgtaatcccagcacttagggaggccaaggcaggcgaattgcttgagctcaggagtttaagaccagcctggacaacacagggagacctcatctctacaaaaaatttaaaaattagccaggcatagtggtgtccacctgtagtcccagctactcgggaggctgaggcaggagcattacttgagccttcgaggaagaggttgcagtgagctgagactgtgccattgcacaccagtcccagtcccagcctgggtgacagagcaagaccctgtctcaaacacacacacacacacacacacacacacacacacacacacacatgaatgtgaaatagagcttgttcatgaggggatctgaggtcacctcccactgtaagggagaggaacgagctcaggacgtggcttcatgtgagctggttgtgctctggactttgtgattttccagttagttgactgtgagcttgtcacccttctacacatctgcacctaccttggatgccaatacggtagggtttggaatccacctttgtgaactgcacaaggcaggctacctatggaaatattagcgctgattccagcagccggggctttttcctcccactgaatctttagtgctggaaggagactccaggggttgtgagttctcacctgtctgccttgagcctgaagcaactgggagggtaagggcatcccagaaggacccagatcaactctgagaacacagagtgagccacacagggtgagagacactgggtcacactctgcagcctgggccttctgtcctgggaggtttcctatttcgttccatattcaaggagacccatgattatttcctgatttctaggtgtagatgccatctctcccttgccccactgaaatagttcatttcaatatttaatcctgagactcatcctggtttctatggtcaccgtgaccatggtgagacgctgagtgccatgatacactgtgtgcagctccaatgcaggggacagcccatgaggacactgcatgcttgattgtcaggaactcatggggatcctaaggcctatcgcacccaggcccttcacactggggctcgtctgtgctggggattagaggttgggagttcttctacaggggcccaggtgacaattcctagcccagaagcagccctctctgcccagaactcacctgcatagcagtgcaggaggagggccgccagcatgaggaccatcagcagcttcatggcgaggcggctgctgtctgtgttcagtcgtgcgtggcagggatcaaggaagttgctgtggaggtgagtacccagccctgctctatttattccccagggaggcaccttagtccctcccaggaatgaggcaatgtgtcaacctggcatgggaccaggacacaatagtgtacaccaatgggaacacagccagcctgtgctctgtttgtagaaaccaagaaggcagtaatatttggatccctgacaatctggggactacaataatgatacatggcttttagtaaaatggatgtgacagtgttttccaaaatataaagcaaaacccagtggcgtgatcttgtggtctcaacaatgttgttattattgtagttttcttctagtcctccttcccttcttcctcctcctccttctattctttttcttctattcctcttggtctcctcctcttctcgttattcttcaaggtacaaacagtttcataacttgtgtatctgccggtcctggaatcatcaaatatttgggctatgtgcaatacctgcatcttcctatgggaggcagaccttcctaatccatagacatttctttttcagaaaagcgggtttttttgtttttgttttttggggttttgttgctgttgttgttgttgttttgagacagagtctcactctattgcccaggctggagtgcagtggtgcgatcttggctcactgcagcctccgcctcccgggttccagaaattctcctgcctcagcctcctgggtagctgggattacaggcatgcgccaggacacctggctaatttttgtatttttagtagagacagggtttcaccattttggccaggctggtctcgaacttctgacctcaggagatccacctcactcagcctcccaaagtgctgggattacaggcgtgagccaccatgcccagccccgaaaagtgctttaagttttggggaaaacattaatatctaacctctactgaaagcttcttgttattcttgttaagaattacaacactaagttaattcaactttacaaatttattttacaatatatttataatttaatttgtgcttagttctttgttagccttttacggttttctatccactgactgagaggatgctgtgagtgagtggagtaactgactgcttgggcaggcagtgctaggcagtgggtggcaatggggttgggtgatgatgagatttaggtgataagatttgggcaggtgtgggtgtggatcctggaggccacacgtactcatgctgtgtctttgggcaaattacaatgctggtccctctgggcttcctttctgtctttgtgaaacgggtataagtgatgctgaatttttttttttttcgagacagagtcttgccctgttgcccaggctggagttcagtggcacgatcttggctcactgcaacctccgcctcccgagttcaagcgattctcctgcctcaaccttctgagtagctgggattacaggcatgtggcacgaggcccggctaattttcgtatttttagtagagacggagtttctccatgttggccaggctggtctcgaactcctgacctcaggtgatccacccacctcggcctcccaaagtgctgagattacaggtgtgagccaccgtgcccgcctggccgtgaatttttgtaaagatgagagatactctgtaaatttttttttttgagatggagtctcactcttattgcccaggctggagtgcagtggcgtgatctcaactcactgcaacctcagccttcccgggttcaagcgattatcctgcctcagtctcctgagtagctgggattacaggtgtgcaccaccacgcccagctaatttttatttatttatttatttatttatttatttatttatttatttattttgtatttttagtagagatgggggtttcaccatgttggccaggctggtctcaaactcctgacctcgtgatccacccaccttggcctcccaaagtgctgggattataggtttgagccaccgctcccggccgacgctctgtaaatttttaatcacgcagccaagcatgagataatt

SEQ ID NO: 915490 - DNA, 4001 bp, Homo sapiens
cctcaaggttcatccatgttgtagaaagcgtcagggtttcctgaggtgatgttcactttcatcctaatggaggggtttggtatatttctaactttttttttttttttttttttaccagggaaggattaaagaagaatttaacatagggaataaatgctaaagaaaaccctcaacaatatacatgtatagttagaaagaaatacaaaactattggtttttgtttgaggcaattcttcctccatggtggtttcatacccatgatctacagttgcctattggatagtccaaggtttctcatcatttatgctagcaaattatgattgcctggaagtgcattttaaattctttttatttgagatgtatagaatcttgctcaaatggtattttccaaactgttgaaaaatagggcattttttaagaaagaacacttttacttttttttgaagaagagaagttttctctgcagattggtctataggtgcgggtcttctggaaaattgttttttctgtagagagtgaacatatgtttgtatgtgtgtgtctgagtgtgtttgtgtgtgtctctgtgtttctgtggttgtgtggttctgtctgtgtgtttgtgtttgtgtctggatgattgtgtgctggtgtgattgtgtctgtgtctgtgtctgtgtctttgcctgtctgtctatgtttgtgtatgtctgaatgtgtgtgtgtttgtgtgattgtgactgtgtctgtgtgtttgcatgtgtctggatgtgtgtatgtgtgtttctgtgtttgtgtgattgtgtctgtgtttgtgagcatgaattagagagctctggggataggtaagacttctaccgacctttccttttcctctcttgccctattcatttatcatccactgaggattctctgggtagagtgacaacacagggacactggatgtttttcttgatggcaaagtcattagactaaccattcaactaaattaaccaatgtaagaaaaggcttgttcactagtggctttggcattgtcagtgagaaatgaagagcccacttgtccctggtcaggggatttaaaaagcttataggaagaaaatgaaattaccataaacacctcaacattgctcagagtttcatccgtttggttaagaaaacattccttcaattcatctatggcatttgtagtggcattgtcgtctatgaactcttgaagaagttctttgtattcagtcttagacacttgtggattgattgtcttggaaatcacattctccaataaggggcagccagagcctgggaaggatgcacaaggaaacaagcttggtacagaaggcatgaaaggcttggggcagacctattacattcctcatcttcttacagcccaagagaatatagactcaaagataatgatgcagaatctagagttctcaaatctgggagaaaacctcaggctctgggatttcctgtaagccctgcaacttctttctctccactccccagcccagaaaagctaaacctcatgaaacttcatttaatgagaagacttgagaaatgaaacactcggacttggaagtatatcgtgaagattatttggtcttctttggttcaaaatcatacgatgcttcactattaccattcagagcatcacagaagatttccaagtatcttaggccaagtgtggtggctcacacctataatcccagcactttgggaggccgaggtggacagactgcctgagctcaggagttcaagaccagcctgggcaacatggtgagatctgttatacctacagcctttgtactggggctgatctctgctgagaattggggagcaggagttcttccatagaggcccaagtgacaacccctaaccccgaggcagccctccctgcacagaactcacctgcgtagcagtgctgggagagggccgccagcatgaggaccatcagcaacttcatggtgaggctgctgctgtcggtgttcagtcgcgggtggcaaggatcaaggaagccgctgtggaggtgagcacccagccttgctctatttattccccaggtaggcatcttaattccacccatgaacgaggcaatgagtcaacctggcatgggaccagtaaacaggagcatgccccaggggaaacacagccagcctgtatgtagaatcttcctgcttctcttcctctttcttgtattccttctccacttgctccccttccttttcttctctgtctctttctttaaggtgagaatgaaagcatcatgtcccgtgtatctgtgccagcttatcccagcagtgggcctaggtgcaatacctcacacctactcttgggagcaggcttttctcatccactgacatctcattttcagaaagggatgtctgggaaagttttaccttttgtggggaaatttaaggccatccaccctccgctgaaagttatttttacaaggattatctcggttaattataaattaattgataactttgtttagttctttggtaactttttagggttttctttccactgattcaaaggatgctgtgaattagtagcgtaactgatgggctggacaggcagtgctgggtggtgggtggtgatggaatttggaatcagggatgagggtttggaccctggatgcaacttgcagtcctgccatgtccttgctggtctctctgagcatccttccttttcatcacttgaagaaaataaaaggcggaatgggatagcatgcagaatttgtataaggatgcttcatgtaaagattgtttcatggccggtcgcaatggctcatgcctgtaatcccagcactttgggaggctgaggtgggtgaatcacctgaggtcaggagtttgagaccagcttgaccaacatggagaaaccccttctctactaaaaatacaaaattagctgggcatggtggtacgtgcctgtagtccaagctactcaggaggctgaggcaggagaattgcttgaacccaggaggtggaggttgcagtgggccgagatcacaccattgcactccagcctgggcaacaagagtgaaactctgtctcaaaaaaaaaattgtttcacacagcccagtacaaagtagtcatgtataaagacaagatttcatccatgcatgcagccatccatctttaaataactactgagcatcccctatgagctggcagtgagctgcacaccataaattcagttataggcacaatttagaccaagcccttgctctcatggagctgactttccaataagggaggtaacaagcatcctgccacataagagagatatgagaaagtagtaatcactgcaaagaactcaaaatatccacaacagcaaaatgatgtcatggactgactactgagaggaggaggccatgccatttcagctgacatttggatgagtggacgacactgtctagtgacagatccagggaagatgcagttccatgcagagggaatgacaagatcagagaccagagggcagatggcacttggccaggtaaggaaggcaaggaacatggccacatgggatcaggaggacaggacagcctcatgtgacagaaaacccaccctcgtttaattaggggcatggtgaaggtcatgggaacaagaaatacaaagctggcttgggttttttataaaagaggccgggcgtgatggctcatgcctgtaatcccagcactttgggaggccaaggtaggcagatcatgaagtcaggagattgagaccatgcttgctaacatgatgaaaccccatctcgattcaaaatacaaaaaattagatgggcgtggtggtgcatgcctgtagtcccaggtactcgggaggctgaggcaagagaaccacttgaacctcgcaggcgaaggttgcagtgagccaagatcacgccactgcactccagtctgggtgacagagtgagaccccatctcaaaagaaaaaaagaagatacggatgagagagccaaagagatgagtcggttcttcacttcccgtggatgcattatttgctgtccggattacccatgac

SEQ ID NO: 915491 - DNA, 4001 bp, Homo sapiens
tgcatcctctcccactcagctttgcagaagctttagcttcctcccactaccatctccccaccccaaacactcagacctcttcatcgcagactccctcttcctcaccctagcccagagctctgggtcctggtcactgagccccctttctatctttacttagccatggctctcaccaggcggcttctctcctgcacgaagtgcttcctaactcctgaggaaagggtcctgtcctccagctgggcctccttacaacaggccactcacccaactccccttctttcagcctgtcctgagactctgatcaattaggtactgttaatatagcagtgccatttcttgaacattggggagtggaatccaacgtttaagagaatgtgctgaagtcagacacagggagttcaaatttcagctcccgttaccatagtcatctgtttcctccctgtaacctgagtataatagaatctacctccgattgctgtgagggctaaacaagatacacagtgcctgggctcacgaaaagcattcttatgttagccatcgttgagttcctgccatgcaccaaatcacaaacacgtcaggcagtaggcattctttagtttacccgggagggaactgaagctcagaggggttgagtaacttgcctgtgatcattacgtaaatgacaaaggtggcttgaaacccaggtcctgccagagattccatagcattcctgctctgatgttaatatgccaagtaactcagcaaagcaggctggcagggcctctgcactgtctgtgtttagcactcctactccaaacccagcacatcacaccacagaaagagagagagcctttgtggtggggaatagttccatcaacagtccttggacttgactctcagttgctgctccagcaataagtaagtttaggagcaagaatgaaactctacaaagcaggcttgcaaataactttctagcccacttccccaccaggaagtctctgagtggtcaaatacaaacacttgacaggacagtctgcaagactgggctgggcagttctgaggctggatttaaagggctgcaacctcgctcagcctgtgggttccatttttttcctgaatctctacacctggcccttcctccattccatccggcccaagccaaaggtgccttctccatcagtgcgtgcctcagcaggtctcctcccaacccagacatcattccccaagcccgcttcccacctactcccacacacgttccaacagatcagtgagaccgagtgccaagaagccagacccagactcaactttctgccaccagctcccctgcacactctcctaataccctaaatccaccaggatcaagcttctgaaaagaagccccttaagggagcattaagtcccaggaccccgcatttgcagcaactccaaaaaataatccctgaagagactgcaggtcaatccactctctgccccaccgccacgtaggtccacttaggggaaatccagagaagattcacctcccttgacaattgtcagcccccagcaacactcagatcccctgacccaacatttctgtgactaagtagtcccagggttctgcactccccagcaacgtcccttccagtccccagcacctcccctcccaaggacacagagggaaagcgctagcaatgtcttctttcctatcccctgcccccatcctcttcacattgcggctacacttctgaaccctcgggagcatgcagatgtgtctaacttacccaaagagaaaaagagactgagccccgtgaggctgaaggcagggcgaggtagccaggcatctctgtgcattttcagagactgagatgttagtcgggtgggctacgggagagggtgatttgagggggcgagaactacaagggaggaatggttggatgctaaaaaaaaatgcacggatgtacttcaaagacatatacaacattaaggaagctttatttccatctctctaatatggccggcttgtatgttgctgctaaaaagagagagagagggagtgtgtaaaggagagagagagagatgggggggagagaaaagggggatggggtaaatattgtggttggtggatttcaaaaagcaggtgggagggcataaaaaagtcattttgaaaagaacaaaatcccagaaatttttaccctctaaaacaagaaataatacaaaccctgctttttgacttcactgggatgattgttggattttgaaagctattagaggaatccatttattttaaagattctggaaagggaaacaccttttatcatttaaaaacacccccaggctgacgcagtggctcacacctgtaattccagcactttgggaggccggatggattgcttgagtccaggagttcaagaccagcctgggcaacatggcaaaacccatctctactaaaaatacaaaatttagccaggcataatgtcgcatgcctcttgtcccagctactgcaccgcactccagcctgggccctgcctccagagggaaaaaaaaaaaaaaaacctaaaaaaaaaaaggagatgcttgtttttgtgttattgaaaagggttcaggaaagtgagttggagagactttcaaggggtaatgctttcctcattctagcgtttcctctgaaaacagaacatgttgaagcaggctgatagaaaaatacccaagagatcttacaattgaatgtaacacaggcctttggataaacctgattcaaacaaatcaacaggaaagaaaagtttttgagacaattgggaaaagttaaatatgaactacatagtagattgtattaatgaatcattcttaattttgttgggtctgataaaatgtggttttgtcctttaacatctctatctgttaaagacacacatgggtggccgggcggggtggctcacacctgtaatcccagcactttgggaggccgaggcaggcagatcacctgaggtcaggagttcgagaccagcctccctaacatggtgaaaccctgtctctactaaaaatacaaaagttagccgggtgtggtggcgtgtgcctgtaatcccagctacttggggggactgaggcaggagaattgcttgaacctgggaggcggaggttgcagtgagtcgagatcactccgctacatcccagcctgggccacagagtgagactccatctcaaaaatacatatatatatattcaacgaaaaaaagagatgggagaataggtgacacgagactagttgttttgcttgataattgaaactagctggtgatgggtgtaaagggtttgtcatatagttctctcttcttttgtgtatgtttaaaacttttcttttgaagaaggaagaaaaaataagctaacgtcataagtaggagaacttggtgggtggagtccaaggtggtcctaagcagaggtgacccccatactcctggggagatggttaagtagggcagagattcgcatgcagcagtcacctgcatttgtgatgggccctttgtgtaccaaacagggagcaactaatatttttgagcataaactctgtgccaagcactttacatgtgatatctcaattttttatttttttattttattatttttttttagacagggtctcgctctgtcacccaggctgcagtgcagtggtgcaatctcagctcactgcaatctctgccttctgggttcaagcaattcctgtgtctcagcctcaagagtagctggaactacatgcacgtgccaccacccccagctaatttttttgtatttttagtagaggcagggtttcaccatgttggccaggctggtctcgaactcctgacctcaagtgttccacctgcatcagcctcccaaagtgctgggagtacaagcgtgagccaccatgctcagcctgtggtatctcagtttaatcttttctttttttgtgtgtgagatggagtcccgctctctctcccaggctggagtgcagtggcgcgatcttggctcactgcaacctccacctcccaggttcaagcaattctcctgcctca

SEQ ID NO: 915492 - DNA, 4001 bp, Homo sapiens
aggtgggtacaattgtgtccaattaccctgtgtattgatttttgcacggagaaaggtagctaagatcatgtaaagcaatctgtctgctgaagagaacctatattttatctgaggatctaatcatagacaccaaggcagacatgcccagaactaccacccccacccctgccatacacatactactacactcacccatgcattcagatgtctatgccaacatgctcacacacatgctagtgcacacatccagacactgaaatatatttacatacagtaaaacattgtctcaatcacacaatcagacattatcacatagatcaatcccctttacacacattcaggcactccaagaccgtctctgacactctcttcagcctttactgttccaagtgtaagattcccttatttggagggggaaggtcacctcagtttctcacagctgacaagcaagaatctattcacctttgaaggcaaaaacccagctctcctcccctaacaccaaagcatcttagttccacaggttcatgcaacaaacaaacaaaccaaaaaaaaaagaagaagaagaaaaagaaagatgcatttcacagttgcctatttatttaatatatagcagtaaatggctgaaggctgttttcttcccattccttgttaaaattaagaagatgatgagcaactaaagtattttcactctcaaaattcatgcatccagcttttatggtttttttttttttttaatatacagaaacgaatttgaagacccagtaagctttccaggagtatagactccttgatgagaaataaaatgtaaccacacaggaggtttttattcgtgaacgtgactgcatttcctttcagcaaagggaaagggaaaaaatactttggaatgatcaggaaactggaggaagggcggaagaaccaccaaaggaggttggagaatagcggggaagggcggtggggaggcgcctttcccatctcaaaatcccagctctcatggaacccctgccatctccatgtctggcagatacgcacagaggcaagccagccagagctcttttctgtcaccaacgacatcaatgtgttattattgttagcattgttactgttacctgcatccggcatggcgaggtgctggtacttaccccagtagataagcacgagagaagccaggggaaacaatctattgaaggcaggcatcttctggggctggcggcttccaaggctacacagagagattccctcggtcaaggactgcgccctctcagattctttcgaggaaaccctttgggacgaactgcccccagggggcgactttctgaccgaaggaagggccgagcaccggtgcctggggaggccctgggagcttttggagccgggtgggggctttgggccctaagcgaccccactggacctccccagttcgagggagccgatcagccgctccgcgcccgctctcgccggcgctcagcaccacggacagtcgcctccccgcccaccccggaactccagcttccactcgcgcccctgcctcgctcgtttgcgcccagggtaagctcagctcggaagggagtcgcactgctggcctagcagccaggctgtggaagggtccaggttgattcacctctcgcctccccaggatcggttgcgttccgactggaatcctcccagccccgcggctcctgcttcgtccgccctaactgcttctccagctgggcgtgaccccactcccgaagccgccggggccgcccgtctgggctacagaatgcgttccacgtcggtcccgtccacgcccgccctcggctccctggggaggtgcagcggggccgggaaggaagcggcagctcccgttcggccggcgatgtcagaggttggggggtgggtgtagaggcggagccccttcccgggagctcgcccccggatggtgcggggccccgaccctgggtggcaggtgatcagcaacccttctctaggcccccaggccgtgtgtgctgtcagccctgacatgcgcaggcggctctccgccaccaccaccgccccggaccctccccctagtgcacactccccaccccctgatgggcgtgcccctcccaggcccagcgccgcgccgagcgggggcggagccgggagcggcgcagacacttccagccgggatatctttgctcgcgcgctcgctggtctctccaggtctccctctcgcgcctccgcacctcccccgagctcgggcgcaccgccgccctcggctcacgccctccaggcaaacccactccgctcccgcacggacttgccgggtgtagctccgggaagagaagggccagagctctttcaggcaatgatgtcatctgcaaggcgcgccgtacgcggttcctggcttcgcctcccagaccccatgccttccagttctcgctgtctatcctttgtctagccttgattaattggccccggacacagcaaactcagcaagataatccctgtttagggcaaatggggtagggatgaggcgcacctgttcctgtcttcacctcatcactcagtgaggtgatccaaatgtcagcgcaaggggaggggggcccaagaggactcctcttcccttccccaggttctttgcagttctcccttttcctttaattactcctttttaataaagcagatagattgtgtttggcgtcttccaactattagccactccctagtcctagcagctgtttgagtgcccccgccccatctctggaagggaaacctgaaactttacattcaactataaactcaaattgacataacagattaggaacgcctggaactgaagtaaaagagtaatccaagagcccttcttcagcttcctttttctcctcttctgctctttccaaaaggggaagcttaacgctgatattccaaaatggaataacagagcaacagctgacggtgagtggaccagaagcaggaaatgctccctcctgacatctcacagagtaacagaatgtccccagtcggatcttcctgggcagggagccaccaggccataaactctgtgctgtttggaggactaggccttgaagcatgtatactgtgttaaatttggatgggaagttaaagttgacctaattcaaccgcttttccaatttgtgacttcccccaagaacatttcggacgaatggacttgattttatttatttatttatttatttatttatttatttatttattgagacggggttttgctcttcttgcccaggctggagtgcaatggcgcgatcttggctcaccgcaacctccgtcccccgggttcaagtgattctcctgtctcagcctcctgagtagctgggattacaggcatacgctgctacacccggctaattttgtatttttagtagagatggggtttctccatgttggtcaggatggtctcaaactcacaacctcaggagatccacccgcctcggcctcccaaagtgctgggattacaggcatgagccaccgcgcctggccttgatctttttagtgatgagaactttctacatcacaagttcacctcttctgatgcttaaggaagttctttatgttcagttgaattccgtacactcctcctccccctccaaactccattaagtggccctaatgctgttttctctttaaaagagctatgcttcctcacatccgccctaagacatttttgtttgtggctactcttccttagtttcttccaatgtattttctagtagtttccaatcctgtaccaccctggctgctttttcagaaggactttcagtttctcagcatgattctccaagtgacgtccagaacaggaactgatggtccctgtgtggtctgaccagcataaatccagtggaattatggctacatttgctttgaaggatataactagttaaatacatttacagccacatcttagtcataatcagcttatgttcaattaaaatccctgagtattcttcacttgacttgttgcagagtcattgtgtcttgtacaggcaattttggaaatttta

SEQ ID NO: 915493 - DNA, 4001 bp, Homo sapiens
cagtcctggggcctgcaggtctcccacctacaagtcactctgctttctcctgggctcccaaagggtagctcagaaattcatctaaacctatatcaataggccttagcccctacctggtctatacagctgaacagtccttggagaaggtggggcttccacctggagcaatgtaccaagactgtgcctacaatcccccttacacacgtgcacacacacacacacacacacacacacacatcattttcagggccctcttggttgcccacagaggcctggttctatgagtattctaacaaacaagggactggcatcccaccacccaggaaggtaagccagaggtgtgaagtggggtagtttaatgactggctgagtttgaattcctcagtgatcctttacccctgccattgccaccatggggacctgggctgatctgagatgggatgaggggaagtagcatggaatggcgctgtgcccaccctgtgaaaaggagcctcaggcgtcactaaggcccacttcattaaggtcactgtgaaaccagcatgacatctgtgccaaggtacaggagaaaacaagggtgtcttccatctagcggtacagaggtaaataaacatcccaagtacaagaaatactctctcccctcttcaccaccaggcaccaacctgctagatctgcacacagtttacattcgcagaaacagtagccacttcccttatagggttctgtctccctgttttcagcagaaatacctacaccgtgtgtcttacccaatgcagggagctgccaaaagccaaatctgaccaatataaacaggaagagatgccgttgccagagatggagtcggcttacattaaagtctggctatgatttatgaggagattacatcctggatgaataaatatcattccctaatctcttggagtttgacactcaaaactctcatgtgcatattaatagatattaataatgcttcttcctccgtgtcctctggacatgtcttctctgtctccatattcacttcaaaaatgaagagccaggagcaggtcaaacaggtcttccctacggaatctctttgtaggaagagagacaaggccgttcctaaagggccttgaatgatcccgcaagcccctccagccccttccagctttcaggtgctgctgtagggaaggcagtggctcctgagggaggtacagggcagaggagcaaagcaggaaaagggcccaggaagaaggggactcccccacccccaactggtgcatgcctggtgcctgggaaacaagcaaacggctctgggccgggatggaaaccaccattccaacagtcacacgtgcaacccacctggtatcccctgcactcaaggcacggacccccctcctccagcatcctgaacctctgaactctggagacccgcgctgcagccccaagatccagctccaaatacctggagccgaaggtgccaaggacagcaaaaaaactaatcctgagactggcgggctgatggggtagagagggacgcacacggtccccagggagcacagcctatgaaccaggcaggaaccaggcaggaagccggcggccaccatcctcattccgtgccgcactccaaagcccaccccatccaaggcatcttccttctcgagtgtccccttctttgggggtggggggaggcaagagaagagaccaagctggggctgccttacccaaaagcccagtgcccagccatctcgccggggctttgcctccgtccccagccccgggcatagtcctgttctctccggagcgcgcgggggtcgcggggatgggatactgggcacagccgcgctctccgcccgaggtcggcgttcggccacaaagctaccccggagctctgcgccgccggtcggggctcgggaaagttagcgggcagagagcgagaggagggggagggagggagcggagggggaggcgcgctcgcccgctgctgggagccggctgctggagcaacggcgggagggaaggagtaggaggagccggagcaggagcgggaggaagacggagcgagcgcagcggcgagcgaggctgcgcctctgctctggaagcgctccagccgcaggaggggcggtggccgccgcgtaggccggggagcccccgcccgctgcgcaccctgcctgccgcaccccgcctcgcggtcccggagccccgggaccacgccgtgcccccaactccctctccagtggggctgggctgctgcggctggcactgcagggccggcctgcagccacccgcatcatcccatgcgctgagctgccaattaggagcatagttcggggggagtagaggtggagcttttcggttgctggaagactgttttgctttgcttgggggaacacgggaaggttagcggctccctctcccaggaccgccaagggaccgctttaaagtccgcagcggacgctgccgcaacgggtgggcgtgtgcgggcttgcccactgcagcttgcgcctcctcggtggcgtgcgacatggcgcgcgtgcagcctcgggacccgctcccgccaccttctgccccatcgctcagcaactccggcggttgttttaggaagcccggaacagagctttcccattgcaaactgccccggccctcccttcccccacccccacgccaccccgccccacatttctccatggaccccttggaaatcaccacgctccaggttagggagcaggttggtccgcgcctggtctgtgtcctgcgccccatttcaccctcccgctgcacccctgcttctcatttttcctacctaggccgtccccctcagatgctgccttttcgccctcctccaactctcctgttttcttcggaacggcagactccctcggcctcccttttggggtaggggtggaggagtccagggtgacaaccaggtcagagggctgaggcgaggctgtgaacgagtaagccttttcccagacaggcccaagtgaaagagtttcacctgagcggtgctacttgggctggtggttctgtaaatgagtcgatctcctcctcagcacctttccaaccatccaagaccctccctgcatcacaggccctctttactgtctaggactggtccggactgggaagcccgctcccacttcatggtctgacttctgctgcaggcacaccaacgcaccgccttcttaacgaggggtctctgggtggacttcggcgtgatcacggaccccttgaggttgcaggcaaagtgctgaatgtctgtttgctttttcaggagagagggtcgctgccttccctatagtggcacagaggctctggcagcgccaccatttatgactgtatggctttgagcaagttacatggtcttctgggggagcctctgctcctcacctataaaatggtgaatgcaatgatatttgcctcctaggcttattaagagcgatgttacccctggacctgggcaacagaagcctcagccctgatttctggttttaaaggccctcattctggccctcctctggccatgcccctcactggagaatgagtccatgggaccaagggggcagggcaggtgggggcatgcacctcctccccttctagactgtactccaggtatcaggaactctggaattccctattccccagatctgtcctttcaagggctggccatatcaggtgtgcactcaagggctagagcagtgggcaagggacagctgtatgcaggtgatggggagtgcatgtaacttgacacacaccctaggcatgcacaagagcccctctcactacaggaccagagaagagtgtgtaccagagaatggcctgaaaatttcattttggacatggttttccaggttatcatgaaggaaaagtaattaaaggcagaggataaaacatcaatcttaacactttgttatcctgattaatatttagacatatgtataatttccatttgtacctttgctccaggacttgcaacatcaaaagtggacctagctgtaaagagggaatgagatattattgcatgtaaa

SEQ ID NO: 915494 - DNA, 4001 bp, Homo sapiens
atcaatttttgctaatggaatacccaatggtattaataatcagtatatacggagaaaaccctactagccacaaaacactaccaggtagcttctctaaccacaactctaggaaaatgaagccatattcccattttacagatgaggaaaacgaggcttagagagtatttcataagctatttggtagcagaataagtgttcaagctgagctcttctagcttttagatgtaactccagcagctctggaaagtgtaaagcaaaagaaaacaccaacacggtccattttgccatttcactgtgatgctgagttgggtgcctcccaagtccttcccacgccactgccctgtgccagcccctactgcatacgtctatcaacgacttggaggaagatggtggcgtggtgctggagattattctccttggggttcttcacatggcaggtgtatttgcccgtgtcgctgaactccaggtccctcagcacaatggaaatgttgttcatcttctccttagtagagcctaccagagtgatgcggtcatcgtctttcaacgtcaccttggggtcagacttctcattcttcacagtcccctctatgagctggtggaggaagggagttggggtgagaaagtagccgagaaagaatcggggtcctcaagggtcatgacatcacaccagcccactccttggatgcctcccctgtccaggaccaggaagagcctgtagtcacgccctgctccttccccccatggtttcctcttccagcgtcaatagctctgcctgtctaacctgaattttacttgtttcaggctaaacccatttccttttattaaggtctccctggaatgcagcacagctcttactgctctcttcataaaagccttttacctaatgactcctgcaagcaccgcactcatctccctctgtcacctcccacccagcctttgctgacaccatgtcacctgcccaactgaattttggccccctgtcaagacctggatcaatcccacagctctgcccgtcagcaccctctgaggtcagcatttaattataaccagagttggtctcttgtggcttccctgtgaaagtctcaggttggatcccccactagattgtagagtgagtacaatctagtgagttcactcccacccccaccgcagccgcgccaatgctcctgcagctctccctctcttcctctctcttttccctgccagtccagcttctcagcccttccctcattcagactcttctcattccttctctccaagctttccaaggcctttctctctcctgtttcttagactaaactattgatttttagacaagcaatccaagctccgggtgtttcttaagaccagacagaggactctagccaagaattccaacagtccccgaattctggcaacacgatctaagcatctctcccagttacatccttcctggcaggctctgaaaagaatactgggagaaagggtggcaaaaggtgggttctggggaccatcgcagtgggtctcagtccagaagggaccagagcgtaggaggcgaggcatgggtgagggaggctgggctgtactgttcttcctccaaatacttacaatcttgaatgcgtcactgctgttgtaggtccaccggaagtggaggtcctcgaagccaaagcagctggagaaggtgcagggcagcaggatctccgtgccattgacagcgtagatgtcggtggcctttcccacagacacctccagcgacagggttacggggagcaggaagaggcctgtgtaaggagcaccgcctcccttaataaaaccccaccagcctggagctctggaaggggatgcttaggcagggcggagtagcttggccaggcaggtaggtctctatcaccctcagtgccaacctcgggaggatggctgtctactccaatcagcaccgcctgggccaccctccatcattctccatttctcccctggaaaggactgaattctggaccagggagtagcccttgttgcgctctggatgaccaccaggggtcaccccaacccaaggaaacaaaggcctggccactgccgcgaaccgcgccccggctccgcccctcacctggggacgcagtgcctggaagcgctcctgccgcacccactccaggacgcgcagggcgggctcccttctgtttgcaggggaattcccctaggacagtacgcgcctctcgccaggttttcaggactgacgggcggggcggtcgaggagggggaagagccgggtcccgtaaggtgaagaagagaaacgcggccgccgcagtcccgggccgccgtccagtagcctctcgttcccccgccctggaggctcctccctggtccccaggggcagagaggcagaaggacacgttcgggctggacctcgctgggccagccgagtccgacgccctctggccgccaaacgggaccctgggaaccgcaggaagacggcctggcaggggggaacacggcgggggtggggaccgacgcggggcttggagcttggcagccgcgggggcgcgcgggcgcagccagggtgggaaagtcagtggcagaagacaccctggggagggattccgggccagcccgagtgcacgcgcgcgggggcgggacggggagggcgctggacccgcggtcccctcctgagccctgcagcccggccttctcgccacactccgccccctcgtccccgagcgcccccaggcttctttctcacgcttcgaacctccgccccagcactccgatgcggccccctccgctgggactaggcctctccactcacggcctccaaactcccgctccggagtccttgtaagggggcctggttccccgccaccccgccccacacacacacccacccccagtcctgcagatgccccaaggaaaccccactcgcctcaaggtcggtggaggcgggggcggggagggtgtctggaagtggatgcctgcctcacctcctccctagaggacactggcaccttccaaccccactctcaggaaggccctctgttgtctaacttaattccctgttctgcatcataaacctcttgttttgcccccaccggatgataatgcgtctgagcaatgcttttcaaatgacagaaaaggatctccaaggacagcaggcagccctgcttgctcagcttcttcctgtgcccttagcttctgatgacaaagtgaagtgcttatatcccccagccctaaaatcacaccccgtggtccagtaaccccatcgtgattcggccattgtcgctaacaatagtactagctgatattaactgagcatctactatgtgccaggcacatttcatcctcacggcctgtcctatgagtcacgtactattataggtccacattgtaggtgagacaactgagcctagagaggttatgtaacttgcctaagagacccagatctacccaccagggctccaattagtgctgggaagttatttcaattagcctttatttttggccagctcctaggatttgtggccaaccaggatttgttctagagccatggttttcaaacttgagagcgcatcagaatcccctggagaacagttacggctggctccgcccagcccctggagttctgattcaggtctggagtggagcctgagcttttacatttcgagaaagttcccagggaatgctgtgcgcagggaccacactttgagaaccacggtgcgagaggatttgtgcatactaactacgacttttattagaatgctcaaaggcaggtataatgttcccattttatatatgatgaaactgaggctcagagagttgacttgcccagggccacagagtaaatggtgaatttgagactgagcagttactataggataggagaggtattttatatacactgtctcatttaaccctcatcataatcctataagttactatttttattcccaataaacaaatgaggaaacaggcttaaaaagattaccttgctcatggccacacacccagtgagtggaataagcagcgttcagata

SEQ ID NO: 915495 - DNA, 4001 bp, Homo sapiens
agcggctcatgggtgccgtgggggtaggggcagggcaggggcagggctagggtgtgggagagaagctgggggctgggggcgggggctcggcccttggtgtcggggtgtctggaacctgcctccctagcccaggctgccctggcttggctcctcccctaagatctccctcaggcaaagttcctaaggccaccccttgaggctcagaacccgggtgttccccagggagcacctccctccctgcctgacagcaggttctgaaggaaaaggctctcctcactgtgtcctggggacacccctgcctgccccagagacaagtcggcttctcagggcggggctggacagggccttagtgactgaggctaaggcggggctgtgaggggcagctgggagttcctggggggccctggtgcccgacagagggggtgaggtgagactcgacacttgccctgctcttttcattggccccccagaagcccccagctctagggagaggccactgggtagggtcggggcgaggaagtggctgtcgtgaggggtaggtggagttctcctcctccaggcctgtgcgccgaagcttctggcctctcatggctggggctgggctcagtgtcctaaccctgcacggtgccctcatggtcgccttcaagccctgcacgctccgtgctccacaggctctgaggggtcaagccactggtccgaggccacacgagacagagggtccggagtcctcacgccagagtggattcctggcaccccaggtgacacctccaccctcccctcttcctgcccgcctgagcccccctggccccttcacaccctccccactaccccttacagaaacactgaccacatgggcccccgggcaggagctgagagggtgtccgggatcccccgagccccagaatgtttcctaatggatgacaaggggtggggcggggccctgcagtacttagtcgaggtacaggaggtggccctgatgccagagataaggatgaggggccgccgtgcctgcaggtgtaaagggcagctgggtgtggtcagtccctcctgggtggatgggcctccatccatccctcagccccgctacacaggggttgcctcgattacactgagtggacacagacaactcccagcgtctgggtctgattcctcctttattggtgccaagtaccacccctccccctctcccccatcctgccccccaccccaaatgcagctgcgctcctgggccgggcaggtggtgagggggttccttcctcatctgggccgcaaggttccttctgcagcagcgccagctggttctgaaaccataggcccagggggcagccagggagaccaggtcccgtccaggggcatcctgcagagacagcacgtgagggtctgagggctggggctggagaccccggccccgctgctggaattgggcctccagtggccaccagcgctgacccggggaggccaggacagaaggaggggtctggggtggggtctggagtggggtctgcggtggggcgggtgctcaccaggcctgcaggatgggcatgttggaccctgacgggcagagcagacccgcgctgagcctggtccaggccatgctgttctctgcgtcctgctcgctgccccccgccccaaaacagagttagtcctggagctggggggtcgcgcgttgctgctggggcaccacgccaggaccccccaccccacccggcctcacctgcgcttccccaccaggccctgtagcagccgctggagccgcgcgccctcccgcaggcggctgagctcgctggtgaacgtcccgtctgagtgtcgccgggccctgcgggcggtcgggggtcggggtcagggcgcactgggggcgggtggggcccggggggcgggcgggcctggcgggcggctcacctggggggcgcggggcgcgcggcggagcccccgaggagcagcagcagcagcaggaggggccggggggccatggcggggtcggggcgcaggagctgagcgctgcggccacggccccgggcccccgcaaggcccctttatggcggcgcccggaaaggggacggcccggccgcgcccagcgatcccgggaaggtcagggccgcccccccagctgtcgccccggcccggcctcccgccccctccgccgcgctggcgcccctcggccggctgggggagggggacgtcccggcctggggggcgaacggagcgcgggcctgggacccgcagagggaaccgcaccgcgaagcctcggagcctgcgggggcggaggggccggagggcttgggggagggtttggggggggactggggggccccggggaaggggctgcggccggagttccggaggcccctggagcaccttgctggggcgagttcgtctccagcttcagcgtggcgtgactgttggggggccggtgttgccattttatctgctttgaagtgcgcgattcaggatcattcggtgcatccatccccaccatccgttctcagactttcccgtcctcccaaaatccgttcacagacgctcccgtcctcccaaaatccgttcacagacgctcccgtcctcccaaaatccgttcacagacgctcccgtcctcccaaaatcgttcacagacgctcccgtcctcccaaaatcgttcacagacgctcccgtcctcccaaaatcgttcacagacgctcccgtcctcccaaaatccgttctcagactcttccgtcctccaaaaatccattctcagactcttccgtcctcccaaaatccgttctcagactctcccgtcctctcaaaatctgttcacagacgctcccgtcctcccaaaatccgttcacagacgctcccgtcctcccaaaatccgttcacagacgctcccgtcctcccaaaatccgttctcagactctcctgtcctcccagaatgaagctctgtccccatcaaacgccccctcccctcctcagccccggcgccccgtccactttctgtctgtggattcagcgcttccagggactgcgcgcagggggagcctcacgggatttgtcctttggagaccggctggattctcagcgcagcatcctccgccttcgccgccgcggcctggcctgtgtgggaatctccttcccttttgtggggaactgtgtcccgctgtgtgcagggaccgcatcgaccgcgtccgctcatctgtgggcatcttgatggacacctgggctgcctcccctttggggcgacggcgagtaacgctgctgtgaacgtgggtgtgcaaacggcgcttcccgatcccgttttcaagcgttcttggtgtatagttatgagggaattgctgggtgacagagtaattatgtgttaaatattctgaggaaacgccaaactgtcttcccagcagcgcagcagggacacggttcttgtcctcgccaacacttgctactttgtggctttttgtttgtcgcgtactaacgatgccggtgggtgcgacgtggtgtctcgctgcggttttgattggcatctccctaatggccagcgatgtggagcatgttctcaagtgtctgtgagccatttatacatcatggagtggacggagaaatggccgtcaagccctttgatgttctgctgtggttgcgagtcatgcactgtatccgtctgttaaatcagccacaatattttccccagcgtttgcatcatttcacagccccgccagcaatgtggggctggctggctggctggcttgctggcttgcttgcttttctttctttctttctttctttctttctttctttctttctttctttctttctttctttttctttctttctttctttctttctttttttctttttcttcctttcttcctttcttcttcctttcttcctttctttccttcctttctttctttttcagagggagtctcgttctgtcacccaggctggagtgccgtggggccatctcagctcactgcaacctccgcctcccggtttcaagcagttcttgtgcctcggccctccaagtagctgggattaca

SEQ ID NO: 915496 - DNA, 4001 bp, Homo sapiens
ggagaggaggggcagtacttttaccaacataagtggccactgcaagagctaaggaggtaggagcttccctacagtccccccacatggtccccaaggcacttaccctcacactgcctgccttccccttggtagccaggcttgcaggagcacttgtaggaggtgggtgtgttctgacacagggcgtcggcatggcagtcatctagcccttgggcacactcatctacatctgcaaaagagcacagctgacacctggtacaggctcccaggccatgtgtgatctggcctcggccctgtctggcatcatcctcaccagcccaccccgcttcactcctcacaagctacagctgcttgggatccctgggataaaccaaactgtttctgggtccctgtttccaggaacagcccggacactctacgtgaaattacccccaccatcacctactggccttcaggacttagctcaaatccacctcctccaggaagcctgccatgacccccattgtagctgccctcaccaagtgctcgcatatgtatggctttgcatgcacacatcaggcagggttgtcactgttttccttcctctctctccactagacaatgtcttgacaacagactgcgtctgtgtcccttatgccaagccagcgcagtacctggcatgtgagtaggcaatagtacctacatgcccgctaaaggaggaaaggaccaaacggacagacaagctctgaacaccaagcagctgtctgtcagctttctcggagctcagagcaagcttgtccaacacagcccgtgggctacgtgcagcccaggacagttttgaatgcggcccaatgcaaattcataaactttcttaaaacattatgagattttttttttatttatttatttattttttttttttgctcatcagctgtcgtttgtgttggtatattttatgtgtggcccaattcttcttcttccactgtggcccaggtaagccaaaagattgcaccccgctggtttagagtatttatgggaagtctgccccgggatcggagcagatgtcatccagggctctcagatgctgcgaagcggggatggtgtccccatggccggccccctgcactcccacccctgcccatcctctcaacctggaaacccgccttggcagaagtatttcctgggttgacactactccaggatattaattaaaaacaaaagcattttgaaagtattgcaagtccagtaagcacagcacgtccagagtcctctctggaaaccaaagttctctgctgaaaacctaggcttgttgctgcttcagggtaattcccagatcggaacaggcgctgttccgctgacagaaaagtctctggagcccaccccgaagccatcagcagaacttgccggcccccaaagaaagaaacggcaaagctgccaccgcctcgcggatgtgcccggcccggccctcagtttccccgcctacgctgaggcgcgggaccccaaggccagggtccgcaccctcctgcctgctcgccggcgacggtctgactagcaggcgctctggaggcatccggaccggggcgggaaccgtcagcagctccgggtccgaggccgggccgaaggactcagggccccagcggtcgtggcgccttggcccggccggcgggtgaggtcccggggggagcagaggcccccgcggagctgcagccgccagccccgagccccgcgcgcccggctctggactccgccggggacctaaacactcttcctggccctgcctgctgtgccaggtgcgcccccgcggccggacactcaccctcctgcggccccgcggcacggccccgacccggcgggacggcccccgccagcagcagcagtggcggcagcagcagcagcagcagcagcaccgcccaggccgccccgggacggttgcggcccgcgacccccatggatggctcagcggttgcgggcagaggcggcggagtgcgggcggtggcggcggcggcgcggggaggtgtgcgcggacgccctgcccgctgccgctgccacccccggcccggccccgcccgccccccgagccccggcctcattttcacacggtccctcccgggccggggcgggaagcgcaggcgggagcagtgccgccccgcccggcctcctcccgtcccctccccggcctcgggtggagggggcgcggccgcggtggcccgagcgcggctgtcagcctggcggggcggcagcaccgtgcctcgcgccccgcgcagccctggcacccagcccgctgccccccgcatccccgctccgctccaacgctcggagccctcggtgccgcgcctgttccagtgtgttacaactcgacccaggccctcatgtgaggacaaacagcccttctagattgaaatattcggggtcagggcgcccagaaagtgttccgtatagtccccaaaccccaaagccatcttggggctttccacgtgggaggtgggaggtgggagtggaaggaattgggggtgacttccaattcgggaaaacagctgtttgaatggagaaggtgaccctggcttctctgcccaccccagcacaccctctgcacccttctccacactgcccaccccaggccctctgggatcctccatcccacagccctgagggcactggtccacttgtcccactgtggggcacactgggcctagaatccctgcaagctacttatgtatatctcagggcagcctaaggggaagggggctagaggtcaaaggtgagccaccagagacaacagacagcagccccgactttgccggagtacaggtggcatttacgatcacctgaactcataaacatcaggtctggctagcttcaaacacaggcagggcctagcacctagccttccatgaaagacagtccttgcaagggaacaggtacacagggtcttcccatatcacacttgacacggatggctggagcccaatacacccaccatcactccaggaacaaatatagtaacaatttccggacgcaaccaaacatcacacttagggatagtaatgttcttcactgagcttctccgtatttattcaattttctcctgcgattatatacatacacatatgtatatatgcaggcacacgcacgcgcgcacacacacacacaccattcctttggagatcagaaaaaaaatagatgtcaccaaaaaatccccacctagctcatgcacaaaaactcttatgtcttcttggggcctatccacagcccagagctcccagcctctgcaccctcagtacccactgtctgccaccccagcccccgaacatgcccacgggggcctgcctctttgggctgtggctagtgcagctgcttgatggagctatctgagaaaataacttttctgtagttgtttttcttttgaccctttcagtgaaggcaggcaggttgcgtccctctttctgtctgcgcctccctcccactcccttttgtttggtgctgagagagacactcagctatttctggtcataagggtggtttttacacatttgtaaatcttcagttagtgaaacgttctctccacctttgtctttgtgtccttaatggtagccataaattactgccttcttttctctccactgcatcaggcttcattgcttttgaaatgatcaaagttatttcttttaaaatccaactagaaactgcccattgtgtggcacagacctctttagctccagttaaagcatataaatacataaagctgcccattaaactctagggggagcctcctgcagcgcccttgtgcctggcaaagaaatcacacatgtgctattcttcccctttacctttccctaacttgatctttcagtaaggacataaattaataatgacaagaatcagcgcctttttgcctaagactgtcagcttttgtcatgtttcccagaaaagtccaccactggcacagatctcaaaaaatgttctgtatcctattttgtttgcgctgacatccttacaaacgtgctttcagctgttggctcccagac

SEQ ID NO: 915497 - DNA, 4001 bp, Homo sapiens
ttgctcatgaagccaccaggtgcccggcagttctgcaggaagcgggctgggttgggacgcaccttggggtttgctcccaccagctcacagtaatggggcaccagcgttttggggatctgtaggggaggggtcagtgtcagggcaggggtagccagctggcagaggggctgaggcagggcaaagagccaggggcaagaaacttaccttcccagggttgcgtagggctgctgcccgaggtaggggcccattgaagacttcccaaatgaggcagcccaagcgccacatgtctgctgacctgtggcagtgacccagagctcttagggccccaccaaccacctgcacaggcctccagcctgccttgggcaccaggcacccactgcatgccagggcctggctatgtccctcagctgagccatcagtcccaagaggcaggtttcattagcctcacttaacagattaaaaaaaccaagcctcagagaactaggcacatctgtccaggtcacagagctttcaagttcagaatcacccaaccccgaatgctgtgtccatcccgccctaccgccctgaggaccctgggggcagaggagtgtccctcactcctgggacactgattccctccccagccaggcagcagggaacaggggagtgccaactagtctaggagtcctgaggctgcaggggcctccaggacagggcaggttggggcgcgctgcccccagtcacccaccacttctctctgaccactctgccactgctgtcagccaactccggggggtcatactgctcaagctcggggatccccttgcggggaggtcccccaccgttgccctgggccgaatacatgtagtccaggcccccaagcttccactcgccagctcggtccacgaacacggcggccatgcagacattgttgtggatgaggctgcagtcgttgaccaggaagctgagggctttctgggggcaaaaggagccatcacgccccagcacctgcaaccccccatccctgctctcatcaccactgccccccacctcaccacgatctggtgtagcccccaggagatctccagctccttcaggccaccagcctccactctcgccttgaggtatattcccaacggggtcacagcctctgtcacgacgtggaggcatttttctgtctggggaaggggacacagggttatcaagggcggaggggcagagaggaaggagagataagcgacttgaagttgggagagatggggaagaggaaaccaaatctgggggtgctggggcacatagggtggaaacagggcaggaggggagacaggagtgggtaaccaggacatcgtgaggggcagagacgggcaggcaaggcagcaggtacctccagtccatcgatgtaagccaggatgttggggtgccgtagagttttgaagcgcttgaaggcagctttggccacctgggtctgctcttccgcgccaggcttcacatcatagacgaagatggacacggggctgcctgtggcctaggggagggcagcggggcctgagatggtcccagagctgttgtgtggccggaagacaagggcccgcagccaggtctctccccaggtcagccttagggacacttcgccgggcccacgtgaccccggccctgtccgcctgtcggtccctcggtccctccgcccgccacgtaggcactgcccgccccctccccggcctgctaccccttggttccgccgccacgtcaggccgggcgcaacgcgacggggtcggcggcgcggaataggcaaggcccaggtcgaccgcggcctacggagctcggccgcactcaccttcttgcggccgcggtgcagggcccagggcccgggcaggccgccctctgggggctccgggatgagctcgaacggaaagtcccggaccgggtcccgggcaaagaaccacatcgtccccaccgccgccgcgggttcgggcgccttagctccgggtcctccggccgcccgagccggggcggggcggagagggggcggggcctgcgtcagacgggggcggggcccgggggccagggcggggcctacgtcggggcggagcaggacgtgaattggggcggggtggggcagaacctgagttggggcgggaaggggcggggacaagggaggggcgggagaggggcggggatgggggggctagggaggggcggggatgggggggctagggaggggcggggatgggggggctagggaggggcggggcagtccggggcggcgggcggtactaagatcagtactccgccgccgggtaagtcacttaaaaccctccaagcctgtgagcccttttatctaaagaggcctaaatcctaaaggataatagagcctgccttctagcgtactgtaaggatgagagcttaagaagggacagagggatggggaaaccgaggcaaaaagggggagaggtagaaagactgacaggcatgagagggtgcagtgaggagtgaggcagagacccagagagggagactggccccacgccagacactctctcccaccagcaagtgggtgcctccaggctccggggaggagtcggtcctggtgaagtgaccatgagagaagcacgaggagacgccccagagaaagagcgtgggtgagaggcagagagtgaatccaaggttccaaggaggtccagaaccccggggcaggggcgggcacccagggaatggaggaaggagagactgaggagggaagaagaagtgaccccaggaaaggagggagggagaaggagcaactgggcaggtctggaagaggccaaagggctgggaggggaccctgctctcctgggctcagctgcccggctctcaagccaacggattgcatctctcagtgcctgtgtagacagccatggagtggtgttagctcaatcagcacatcacactggtggggatccagcccctgagctgtgtaggaggggctggacaggcagtggttcttctgctggtagggtctcaggacccaggcttggggacagtgcctcaaccacagctatggagcactggtgagattctgggactggttatgaaaagtctggttgggatgcctttgggagataactcaagggcagagatgccacagtgagacggtgctgggtttcaatcacggttcagcccctcattggatgtgagaactcacacagttccctttgggtgcgttaggtcccccatctataaactggggtgagggccaggcacagtggttcacgcttgtaatctcagcactttgggaggccgaggctggaggatcacctgaggtcaggagttccaggtcagcctgaccaacatgtttgaagggggcctgcccctccacacctgtgggtatttctcgtcaggtggagacaagagactgagaaaagaaataagacacaaagtatagagaaagaacagtgggcccaggggaccggcacactcagtatacgaggacctgcaccggcgctggtctctcagttccctcagtatttactgattactattttcactatctctgcaaggggactgcggcagaacagggtgatggtgggaagaaggtcagcaggaaaacatgtgagtaaaggaatctgcatcataaataagttcaagggaaggtactgtgcccggatgtgcacgtaggctggatttatgtttctctttacccaaacatctcagtgtagcaaagagtaacagagcagtatcaccgctagcatatctcacctccagccatagggcagttttctcctatctcagaatagaatgactggtgggctttacaccaagacattccattcccagggacatacgggaaacagaggccttcctcttatctcaaccgcaaagagatcttcctcttttactaattctcagcacagaccctttacgggtgtcgggctgggggatggtaaggtctttcccttcccacaaggccatatcaggctgtctcagtcggggagacaatacccaggctttctcgggcagaggtccctgtggctttgcacagtgca

SEQ ID NO: 915498 - DNA, 4001 bp, Homo sapiens
ctaccacacctgactaattttttttagtagaaaaggggttttgccatgttgcccaggctggtctcgaactccaggactcacacgatccacccacctcggccactatttactttaggtataaatggattaaactccaggcctggcgcggtggctcacgcctgtaatcccagcactttgggaggctgaggcgggcagatcacgaggtcaggagatcgagaccatcctggctaacacggtgaaatctcgtctctactaaaaatacaaaaaattagccaggcgtggtggggggcgcctgtagtcccagctactcctaaaccaggagattggcgtgaacccaggaggtggagcttgcagtgagtcgagatcatgccactgcactccaacctgggcgacagagcgagactctgtctcaagaaaataacataacataacataacctccccaaccaaaagacatgaagtggctgaatataatgaattaaaaaaaagattcaactatatgccgcacaagagacattttattaaaatctggaaatcaatggcaaaagaaaaggtggaaaattcacaaatatgtggaaattaaacaacacactcttgaacaatcaatgagtcaaagaagacatcaaaaggaaaattagaaaatatcttgagacacgccgggaatggtggatcacaccagtaatcccagcactttttggaaagctgaggcaggaggatcacttgaggccaggagtttgagaccagcctgggcaacatagtgagaacctgtctctacgaaaaaaagaaaaaagaagggaaacaacaggccgggcgcggtggctcacgcctgtaatctcagcactttgggaggccgagaaggacggatcaccttaagtctggagttcgagacctgcctggccaacaaggtgaaaccccatctctacaaaaatacaaaaattagccaggcatgatggcgatgcctgtaatcccagctacctgggaggctgaggcggaagaatcgcttgaacccggtaggtggaggttgcagtgagccaagttcgtgccattgcactccagcctgggcgacaagagcaaaactccgtctcaaaaaaaaaaaaggaaaacaacaaaaaacaaacaaaaaggaaatatcctgagacaaactaaaacccaacatatacaaaattatgagatgcgacaaaagctgtactaagaaggaagtttatagtgtaaacgcctacatcaaaaaagaataaagatcgagtccctgggtctgcaggaaaaaaaaaaaagaataaagatagggatgggggtaggaggggaagatagaggcaaagttagttactttataacagcaggctaggaaaaaagaataataagttccagtgttctattacatattagagtgactacagctaataacactgtactgtatatgtcaagatgctagaaaaagatcttgaaaagttattaccgtaaataaatgataaagatttgaggtgatggacatgctaactacgctgatttgattattcgatgtacacatgtattaaaacattatactgtacccccataaacacgtacaattatatgtcaattataaacaaacaaaaagctgaagatactatgtgaaaccacgaaaagcattaaagactaaagaacggggagaaggggagcccagggaagttgggctaatcccgcctgggacgtaggtgagaggcgaattgggtcttggacgatgactgatcgtttaagcagatatttccagaccggcacacagtaggctcaccaaagaatggaagcgacctttatttcctgagttgcaggatcggcctctccctgggcctgcccttgccctgcgctatcgggcagacgaactctccccaagatagagaccacagaggaagacaaagggtaatccccgctgccgcccgccccggacgctagaacgttctctctcctcaccagcgacgaagtcgagaacactgtagacaccgccattttccccacctgcaccggaaaccggctgcgcgggcacttccgggaactcctagccgcccggccagccgaccacggcagccacggaggagctgagccggaaggtgcgtccctgcgcatgccggaagtggcggtgcgtgtgacgccggcggcggggggggcgggacctggggcggagagcggttcgcgcgcttcgggcctagtccggactcgccgccgccgccgccatattcccggtaacgggggcgcgcggtcgggggcaggttgggccggaagaggggtccgggccggcactgaggcgggaagggggtcggttgagatgggacggccggagtctgcgggcggagggagtcgcgggccttttgagggaggaggcagagcgcgccgggccgggtttgtcgggagggagcggggcgggcctagctgggggcgaagagtaggcctgggttgggggcagaggcggctggagctgcttgacacctgggggctctggccggagccgccttgggggctaggcaggtgcagcggataggggctgcgggcttcgccgcggtcattcttcgcaacgccgtcctagggccactaggacccgagggtgggacttttccgtcgcgccataggcagctgcggcgcagacgcggcgctacccgggtcgggcccgagggtgatgggcagcgacccccggcggcctgggagagcggtgggcggcgcgaggccgggggcggggcggagcgggtggggccgagctggggccgccaggatgctgcgtctctggagatgggaggttagcaatcattaccctcttcccagcccaggaccctcgtgccttctaattcttgcatttttccgaatcccgcagtggcatcttccttactttgtccatcctccggactcgcgatcttccttccggagccatgtcagaaggagtggacttgattgatatatatgctgacgaggagttcaaccaggtgaggtgtcatcaggagctttgggattttccttgatcatctgaggaatcattttcagcaaactggcagtggtttcaagctgtaccagtcctaggcttgaacacgcgtctatccggtctaaaatttttctcctgcagaaactttaaagactacactccattcctctttatgttaatttgaagctccaggcttaattttaaaggctttgatttaagagcaaataaaaagcaggtgtaatagaatggtgaatcaacctgtggaatttactccccaggaagccaaaggtgggtgtcagactaaccacacttaaaaatcaaaagtacatttgctacggtattcatgaggacagtgttgataccggttcctttacattctcaacctgcagctggagaagtgtagtcccctccatcgtgacagtgcaaaagcaaagtagaaaagatgactttaacatttagtttcaactccattccaattaagttttacttccttttataagtaggttgactccagtcatgagaagtccacaggcattttggtataataaattgtattggttacctttagtctttctagagggaataaaagagtaaagacgttagacaaaccagttagaaaactgataatagacccatgcacataccctcagttggatttgtttttattgtaccagggaacattatacagaaatttatctagagctgggcaaggtggctcttgactgtaatctcagctgctctggagcctgagatgggaagattacttaagaccagaagttcaataccagccagggcaacataccaagacccagtctacaaaaatgtaaaaaaaaacaacaacgagatatggtggcttgtgcctgtagtcccatctactctggagagtgaggcaagaggtactccctgagcccaggaattcaaggctgcagtgagccatgattgggccgctgcactctatcctgggcaacagaacaagaccctgactcttaaaaacacaagaaaaattctctcaaagaaataatcttccatgcagttaagtttttcagtcttgaggtcaattc

SEQ ID NO: 915499 - DNA, 4001 bp, Homo sapiens
cacatctttcatgttcaacatatgccacacagtaacccaaactgacaggcagtgtacatataggatataactctgagtacaaaggaagtaaaatatcaaaatagtagttgagagaagctatctctgttttttgaaggctttatctctgttttttgaagtcttttagcacaagggtatctcaatgcctacatattgattagaagacagatccaagaagatggataaaaaacagaattgctgtattgctacagaattaagccagtcttggttcagtgaagtgaacagacaccttatgaatgtaagttagtggtccaggcgtggtggctcacgcctgcaatcccagcactttgggaggctgaggtgggcagatcacctgaggtcaggagtttgaggaggtcaggagtttgagaccagcccggccaacacggtgaaacccgtctctactaaaagtacaaaacttagctgggcatggtggtgggcgcctgtaatcccagctagtcgggaggcaggggcaggagaattgcttgaactcagaaggtggaggttgcagtgagccgagatcgcaccactgcactccagcctgcataacagagcgagactctgtctcaaaaaaaaagaaaacaaaagaaaaaaatttgtaaagacttaggctagaaggtcttctatgattataaatggcatcattcaaccataatggcactgtctgcccaaaggtgtaaactaggtcttcatttgacaaagttggacacaagagtcccccctacaggtaggaagtcctgctaaaggcatgaccattagtgaaggtaaagatggctagagcccagaaagcagcagcgatggagagaacatacaatggtggctcggtgacaagtgtatgtgctgcactccacaccattctgggataggtcggtcctgaagaaatgctgagatatgagcaggtctgaccactggagttcgaagcaacagagctgaggaaagagtcattaggatgatcataagaacctctcctttaacaggactgacaaactttctaaatgaccataggtaagctacttaacaataaataggggataacatcttatttgtaaaatgaagatagcatctatttcactggggttactgtgaagttaagaccagggaacatctgcatgttccctactttatttaatgacacctcaggcattctttaacctaactcagtaatctggaaatcatgagagacttttcccctaaattcaatcgccaaatcctattggcgtatctctttaacagttcttgagacaatcttcttttctttgtgctactttcctagttcaggacctcatcttgcccggactactatgacagtgttttcctcatcagaatgaaagctcgttgagggcgggaactacgttttcttcacatttgtatcctagcattactacagtacctgaggtaacacaaatgcccaggttaaatgattttcgaactgatcccccctccactcccacatccaaacacaccaactccagaagaaatgggcaagctcctaaccctctttcccgactcagggtgggagcgagtggggagcattctagggacagtgaacggggagaaaacagaactgctatgtggattagcctcatcaggactgcgacttccagagggagctctctttctgattattccctcaactcgtcagctcacagcaagtgaaatataccttcgggtaaacatctggacccctagactacagtggtcattgctgtgatttcggtattttcttctcctcaagagatctcccacccggcagatgagtcctcacttccatccccttccctggctggaggctacgctaagcacctcagggtgggaagacccctcacctcggcctcctagggcaccgcaaacggcactcagcctccagagaaccgccatctcgttcctgagggctcaaggtcatccaccaacccggaaccacttaggcgacaattcccacccacgacgacgaaagaaaacagggaagaggaaatgctgggtgaaccggaagtcgagaggcggtgcacacccgtcgcgcatgcgcaaacacagctgtcggaaggtggcgagcctgaggcgaacaatggcggagctgggcgaagccgatgaagcggagttgcagcgcctggtggccgccgagcagcagaaggcgcagtttactgcacaggtgcggggacggggagggtgaagggaaaggaagtttcaccttccttggtggtcctgggcacgctcggaggtctgtacactggcggctcactggtgctcgatcccggctgcatcccattcccctcacgaaagacaaagttatggctctcctgtccctggtgaccggtagtgctcaggtgccaggtatataagcgtagcgtggagaaaagaaaaggtgtaaaacagggaagatttgggcgacgcaagggtacgggagactagttagccggcgacatgactgggctggcattcgaaagatctgggttctcatcctccctctgctccttgcaggccacgtgcccgtagaaaagatactcatccactgtgggttttggtgtcgccgtcaccccactgcctcactggattgtgaggatcatatgcgacaatgtatttgaaaacgactagaacattatcggaggaaggtggactctgaagtagtcgctgtagactatggatgtagaacaagggtttggagcccttcggacatggttctaacgcggcctgacttcttgctggctacatgaccttggactacataatcacgcctcttaaatgggaggtgatgacagctatccttgaggaccttagagagaactgatttcttagtacccagcctcacaaatagtaagctcttggtaaaatggttttttccttttgggtgggaggaagagggtgctcggatgaccagcaagaaccctggctagaaatctttgggccctgaacattctaatgacagtgcacataatttctgtgcctgtatgtgcatttttctggggagtggatccataacccccaaaaggttaatggaagaattaccttgtctaggggataggtttggaataaaatgagtgcaatagtttgggaaaattaattggttccctagttggttcacaatggtgctagctactttggggaatataaaaggttattagtcctacctgagaatgtacaatctgtagggacgaggatctggatcaatattggtgactaattaggaaatgaagaaagagaagagcccaaagtgactccgtggttgatttaaagaatggttttgtcaggtgtcaaaaagtgagaagttaataaacaagagttaggcctatctgcagaccccaatggttactatttttctttccttttaggtgcatcacttcatggagttatgttgggataaatgtgtggagaagccagggaatcgcctagactctcgcactgaaaattgtctctccagctgtgtagaccgcttcattgacaccactcttgccatcaccagtcggtttgcccagattgtacagaaaggagggcagtaggccatcccccaggagaatgacagaagcaaaggacttgttactaagcagatttaagggtcagtgggggaaggctatcaacccattgtcagatcagcatcaggctgttatcaagtctgttggtgctaaaaagtaaaagatgaaatgttcaaagagtgaaatttatttatttggaattcagaaattccaggttgtatgacatcagttactcaataagtgtgaattctccaactcttcttttaatcccattttagaatttaatatagagatctctgattggcaggaacactagaaataaatgttccatggccagtagtgcaaatgggggattgtaggttttgaaaaaccaccctaagccatattaagggggttggaagaaccatcgaagcctaaggcatagaagaaaatttggggttaagaaagatgaagaacaaaaaacagctttattgcttatacatgaccaagaaaaggaaa

SEQ ID NO: 915500 - DNA, 4001 bp, Homo sapiens
cacacccctaacaaggtaaatccccttcctgtgaaccgaactttattcccccaaaattcacgtgttgaagccctaacctttagtaccttactgtatttggaaagaaggcctttaaaggggcaattaaggttaaatgaggtcataagggtggggccctaatccaatatgactggtgtccttaaaagaagagacaccacggatgctcacgcacacagaaaaggccatgtgaggacacagtgaaaaaagccatgtgaggacacagtgagaaggcggccatctgcaagccagagagaggcctcgggagaaaccaaacctactcacaccttgatcttggccttctagcctctggaactgtgagaaaataaatttctgttgtttaagcctctgttgtgtggtattttgttatggtagccctagccgaccaacacacccccacagtttcagattatacagcaggaaaaacacactaccagtcctccaaacacagcagaagggtgtcaacaacctattaaacatattttacaacctttaatattcggctttgtctgtactgaaacaatatttctgtttcctctgtccacacagacgccagtctcctgcctggaaaaagccagagacagcacacattcaatccccaactccacccccagctcccgggccacctcaaagacgcccagccagccagactaccgcaggtcacgccatgctctccctcctgccaaattgcagccccacattcaacaattgccgccttgtactgatcattacttctttaaaaattggacaactaatactgattttaacagcaatacaggttataattttgctctcccccaacacaagagctggaagtccttcactcgtgtatttcactcatgtgtatttccccaacaccagcacatgggtaggcacacagatgctcgttcattcattcgtcaacgagtatttactggggacctacaatgtgccagacaccaagagaggcaccgtgaacaagacaggcacagcacccactcttaccacacttactttccagccagagagactgacgttaataataaattatacacatcattacaattgtgatacgtgctatgaagaagcacaagacgcagcgactgcttgttcccgtgcatgctggtcggccacctgccacgctcctgtgcatgaaccctcctctctcccagacacacatcaagatgaccctgtctctcccaatgctcccgtcaaaccaacagcagcccaactcccccaacacatgcaagaaccggtcacagcagagtgtcagcaaataggcagggtctgtgccttgtgcgcggccaaacaccgcaggcctcacatctaaaggatgctttcgccaggctgggacagggtctccctcctccaggcatcaggagtgtggggggcacaggtggccccacggagctctgggaccgggcgatcctctccaccgagccctccgcgctgtcttccaggcgctattcgggctggagggctctcgcggaaccagacgctctgccccgaggcaggttcttcccgcggcgccacagcccctccggccctgaccccgccagccggcaggcccctaagtcgaccgcgaagacccttccttccccgcccgcccgctcctcctccgctccccctccgctcccagcccaggatccttcaacccagagcccggctcggacctcagccgcccagcccctgaactgcccacgccgcggccagcagctcccacatctcggcgcccctcagggcctgcaccggcccgggggcggagtcacgtacccaggcgaagagcgcggccgccgcgggggcggcctccgaggcgctgggctcgcgctccatgcgaggacgctccgccggcgcttccgggagggacggcacgggggcggcgcctgccgggggtaggtgagcgccggagccggaccggggacgcgtgatgggtagggcgcggggcggggtctgtggtgggaagcggcccgcaggccgggagagagggtgcggccgggccctcgggccactggggatcagtggtgggcggggccggacgacagccccggagccgcctcccagtcagcccgccccggcggcgctcgcagcgtctccgcccgcagcctcctgtctcgctgggcctctcagcctctcgctcctaccccctcgtactctttatttttagtcataatttcatgtttcatgcaggtgcactgcgcgccacagttcacaaagctccttcgcgtttttgtctccttggaggcccacgacagcccagaggggctgacagggcagcgatggcatcaccatttgcgggaacaggaaatggagcctgaggggtagggcagggtcctgcccggcgtctcaggcgcaattgtcttgagcccgctttggtgtgcgttcgcaaacatctgagggggcgccttgggaggcgagtggagtggcacgtcgccggtgtcgccctctgcacctggcacggagcgggaacccgcgcctcgcgacgctgaatgggggaggctggttagcgtcgactcctgccggggcagcctcggcgctccgggcacggccctgagctcattctattaataatactggataatcgtcacccaacgaacatttccatataaaatggcttttctcagacagcgtcgtgttgctgatgggagttaattaagttcaatttatctgaaggaaaatatggcaccgcgtaccgggaatacagaacacatagggtcacattaaagatgatcatccacattcacattcggtagcacttggcccctctgctgacacgggcctccagcactcactgcccttcacccctgggcttctgggaagtgtctccaatgagctcttacactgtcctttcctgttctttcactccatccacttttaggagtttctgcctgtaagaccacttgagggcagcccctcacctttatctctccaacctgtggcatctggagaacgtcgatgaccataccaagaaaaaagcaaactttggagagataaaacagctcttcattctctagggatctgaatgtgcaggagctataccatgcttactgactgtcttatgagtgggcttttttgtgctgaccatttctttgaagcatgtgtaacaggatgtaaaaatgggatccttcaccgctcagttttggctgagcaacaagtgccagttactcctatatcataaagtaaggttcaagaccaccaaagcaggtcttgcaaagcaactgtctagaaaccagtgtatgactttcagtctacgaaaaaggttgagaggccagagagaattctagtaggatatgtggccacaattatcaatgtggtgtgggtctcaacccatctcaggtctaaggaaagttactttacctgggtccctgagagagcttggtatgcatccctctagatttaggacccagacaggcttctgtccaatccgttctgagaaatacaagggcttgtggctggatatctgctctaatagctgagcaaagacaaactgatgctttggggaggtctttcacacccacagtttttcaaaataaaaactgtccatttcccatgtgagtatttcccatacctgagcaaactggctgggggatggtcttagaccttgtccaagagaatttctggaagggtgaagtgacacccacaggacagtcgatcactagattccttgagggtgagggaaatgaatttaacagcccagagagatacatttacctacatcaagaaatcccaagaaataagaaggtgggaaggtcttccaaaatgcccacaagaaaatgtcagcatgtaatatttacaaagtacagaaagcactgatgacaattcacaacagtatcagaccaaaaagaacttttctcctccttacctctcctcccctctacatctccccaaccctggaggagtcccaggcatccactgagtaacaagagacaaggaaattaagaaactaagcacacccactcctttctcagttctggaggaggaaaaaagct

SEQ ID NO: 915501 - DNA, 4001 bp, Homo sapiens
tatgttcttgcaatttcctgtaaatatctacctgtttgactcacttgcttggctagtacagacatttgaacttgtgctccttgatttagaacagtaaatttttaaactgtgggttgcaacccattagtgggtgtggaaaaacagtacacattaggaagggaacgaagaaagggaaggaggaaagaagggaggcaggaagggagggagagagaagtagtataggccagcggctctgaaacaattttgactcccaggggatatttggcaatgtccagagacatttttggttgtcacagggagacagcagggaagatgctaccggaatctagtgcgtagaggctagagatatactgcaaaacatcctaaaatgcgcagggtagcccctcagcaatgaattatccagccccaatgtcaacagatcctccactgagaaaccacgcattagctccatttcacaggtagagaaactcataccgacacatattaactagtccagggtctcacagaaatgggagaaacagctaggggtcaaaacaaggtctctgattccaaactccctgctcataactacatcatctgctgagtatgtgataccaacttgcgcgtgcacacacacacacacgcacatacacacacccctacctacctttctcctgggatcctgcacttcttagccttatttctagtccatgacctcccagaccactgggacctctcactgctattgacccccacccagacccacgtatgtttgctaccattcttccctgtcttcacaggccctagcctgggaccaccgtctgtgtcacagcagccaaacctctcctccccacagctcttttctacaacaaactcttgctttgatatcacaaaatgcttcccatctccttgccctatgtgatcctcctgccaagcctgcttggtggacagggtgggatctgtttattcaacattttataaatcaggaggagtaggctgagaaaagtgacgtcctcaggaccacgctgcgcagctcctacatggcccgccaagattagaacttgcatctgtctgagtcctgagctctttccaccatctacgagtgcgtgtgcaaggatcacactcaatgatcccaagaggagctctcctcattccccggagcctgaagggttaatcctcagccaccgcccgcaccccgcaccatcccgcctcccgtctccacccccgtcccccatcccacaagggaccacataccccagccagcagcagcagcaggagggtcagcagggtcagcctggaggccatctgggcggcgacgtcagcggacctgcggagccagccagcctcggagccagctcccaccctgggagcccaggggcccccaccccgcccggggcccgcccccattccgtctcaggccccagtccctcttagcgaattccctcctcctccctcctggggccaccttctccctggctcctccctctgttttgttttccccaaaccgcttccctttcccggcaccggctggcccttcctctccccgtgggcccgggtctctgtccatctgttcagtcggaggggaggtggtgggagggggagggggtcctgctttaaccaaacaatgaggccagaggcgtgggggaggggaggtcctggggggctgagcacaacaggcctgaggcgggaggggctggggtaggaggaggcagaagtcccaggtggaagcaagcctatagagacccccgagatcaaggcgggcaggaaggcgggggtgaggagaccccctccctagacctcttcactccatgctttccaccctactccccacccctgcccagcaccaaacctactccaaacttctggtcaccaggcagctccagtgcagactgagtagagagtcccccagggtcagggagggtggggtgcggggggggcagtcttagctattggctggcccgggacactgcccagttacaaattaaggaagattgatcgctggtgtgagttcctgtaaatcaggatgggacggaatgggactgaccgcttggtcttctttgtgggccaggccaggaatttagcccaaatcccctggtaggtggggtgaacggggaagcttgggtgcagttctcagctttacacaaccaaagcttcccccgcgtcttcatgagtaacaataaaaacagcatgtacacaaaatgtgctccgcagtttttaaaggaatgaactttttggaaattgctcacctccgttattcctcaaagtaaccctttgtgccccattgtacccatttgatagttaagatactgagccttagagcagtgaaatgtcgggccctgatcaccctcatttggagaagtattctgaagcctaatccctgctcccatctcccctgtgccctgtaggtgttctgccatttttgctcgtagagacccataatcagtagttctttgtataacagacaacggatgtgaggcacccagctcaacaagcattcaacctaattaaaaaaaaaaaaaaaaaaaaagctagccgggcacggtggctcacgcctgtaatcccagcactttgggaggccgaggtgggtggatcacttgaggtcaggagtttgagaccactctggccaatatggggaaaccccgtttccgctaaaagtacaaaaattagctgggcagtgcaggcgcgcacatgtagtcccagctactagggaggctgaggcacaatcacttgaatctgggaggcagaggttgcagtgagctgaaattgcaccactgcactccagcctgggtgacagagcaagactgtctcaaaaaacaaataactaactaaataaatatttaaaaacttgaaagctggggtgtatgtgtttgcgactagggctccacaatagacctggctggctgtgtgagccagcaagttgctttcccccttgacgtctggctgtcctcgaaatctggctgtcctcgacatctagctgtcctctcagcattgccagataaaacacacgaagtaggcaggcctgggggttcatacctgtaatcccagccttttaggagactgaggcaggaggatcccttgagcccaggagttcaaggctgcagttagcattgatcatgccactgcactccagcctgggcaacagagtaagacacttgctgtctctaaaaaaaaaaaaaaaaacttacattgggatatacttatggtaaaaatgcttacattggaatatacttatggtaaaataaattttgttgtcattgttgtgtatctgaaattcaaatataattggcattttgtatttttgctaaatctgataactctgcctcatctgcaaaacaaacaggttgtctctgatgacctaatatagctatcatgttctatcgtcatctcactgcaggcctatcctctggctgtgtttggagcattcaggaaagtttgctgctagcaccagaactgctactctaagggactgaccaaggacagaaacaggagaatatttgtgtgtctcctcgggggtccttggacaagacccagaaagagtcttccccagctttgtgctttattctctgaagccacttgggaacctcctaaaccatgggaaagttatataacatcagagccatcgtttgaacagctgcacacaaaacaacgtttctccatccccagtgctcaagctggtgggctcaaagggactatgagcttgtggattctgggaaatgggtcagccaaaggaaaagaaggtggtggaaagcaacctaattcactgagtgctcaccatgcatttacattcatcctctcactaattctcatcacctatgaagtaggtgctatattaatcccatcttaaacaagttaaaatgaggctcagagaaattaattgatctacctaatatcacaaagccagtaagtgacagagccaggatgtggaccaggtctgtttgacccaacagttctttattaacccttacaaattattgacacacaccaggggctaacctgaagcagacagcaaagggaatattctg

SEQ ID NO: 915502 - DNA, 4001 bp, Homo sapiens
actctccaagtcagagcagagagtaacaggtcctgggcagaaggacccagtagtgggctgggtaggagaatctgttgggagctgggtagttggttgggtgggttggatggtgggttgggtggtgggctctgtggtgggttgtgtggtgggttcatcagtggtattagctgttattttggtggctgaattggttgttgagttggttgtcggcaagctggaaacctccaggatgggttcaacgaatagcatcttggagataactgttgttgcgaccttcccttcgcctctgtcttgcaaactctctggatcctgggagctggagctggtagcatttggatttgaggaggctctatcctgtggttcaagaaactgagtttcatttttttcttactacgaggcacagtcctctaaaatactcaaagcaggaagagaaggtgtggatgtggaaaatgtcctgtacaagagagtaatttctgacagtgcggcagatgagcaatctgtcttagaaccaccaccactaattcctcagagaaggggcaatacagggtgagggtgggggtgcacaggaatgtgctctgcagaagatgagggatagtcagggactctgtaatctctgaccaattactgccctgtaggaagttgttttccaaacagtgaagctgagtgttgtcatttatctatgttcttgcaatttcctgtaaatatctacctgtttgactcacttgcttggctagtacagacatttgaacttgtgctccttgatttagaacagtaaatttttaaactgtgggttgcaacccattagtgggtgtggaaaaacagtacacattaggaagggaacgaagaaagggaaggaggaaagaagggaggcaggaagggagggagagagaagtagtataggccagcggctctgaaacaattttgactcccaggggatatttggcaatgtccagagacatttttggttgtcacagggagacagcagggaagatgctaccggaatctagtgcgtagaggctagagatatactgcaaaacatcctaaaatgcgcagggtagcccctcagcaatgaattatccagccccaatgtcaacagatcctccactgagaaaccacgcattagctccatttcacaggtagagaaactcataccgacacatattaactagtccagggtctcacagaaatgggagaaacagctaggggtcaaaacaaggtctctgattccaaactccctgctcataactacatcatctgctgagtatgtgataccaacttgcgcgtgcacacacacacacacgcacatacacacacccctacctacctttctcctgggatcctgcacttcttagccttatttctagtccatgacctcccagaccactgggacctctcactgctattgacccccacccagacccacgtatgtttgctaccattcttccctgtcttcacaggccctagcctgggaccaccgtctgtgtcacagcagccaaacctctcctccccacagctcttttctacaacaaactcttgctttgatatcacaaaatgcttcccatctccttgccctatgtgatcctcctgccaagcctgcttggtggacagggtgggatctgtttattcaacattttataaatcaggaggagtaggctgagaaaagtgacgtcctcaggaccacgctgcgcagctcctacatggcccgccaagattagaacttgcatctgtctgagtcctgagctctttccaccatctacgagtgcgtgtgcaaggatcacactcaatgatcccaagaggagctctcctcattccccggagcctgaagggttaatcctcagccaccgcccgcaccccgcaccatcccgcctcccgtctccacccccgtcccccatcccacaagggaccacataccccagccagcagcagcagcaggagggtcagcagggtcagcctggaggccatctgggcggcgacgtcagcggacctgcggagccagccagcctcggagccagctcccaccctgggagcccaggggcccccaccccgcccggggcccgcccccattccgtctcaggccccagtccctcttagcgaattccctcctcctccctcctggggccaccttctccctggctcctccctctgttttgttttccccaaaccgcttccctttcccggcaccggctggcccttcctctccccgtgggcccgggtctctgtccatctgttcagtcggaggggaggtggtgggagggggagggggtcctgctttaaccaaacaatgaggccagaggcgtgggggaggggaggtcctggggggctgagcacaacaggcctgaggcgggaggggctggggtaggaggaggcagaagtcccaggtggaagcaagcctatagagacccccgagatcaaggcgggcaggaaggcgggggtgaggagaccccctccctagacctcttcactccatgctttccaccctactccccacccctgcccagcaccaaacctactccaaacttctggtcaccaggcagctccagtgcagactgagtagagagtcccccagggtcagggagggtggggtgcggggggggcagtcttagctattggctggcccgggacactgcccagttacaaattaaggaagattgatcgctggtgtgagttcctgtaaatcaggatgggacggaatgggactgaccgcttggtcttctttgtgggccaggccaggaatttagcccaaatcccctggtaggtggggtgaacggggaagcttgggtgcagttctcagctttacacaaccaaagcttcccccgcgtcttcatgagtaacaataaaaacagcatgtacacaaaatgtgctccgcagtttttaaaggaatgaactttttggaaattgctcacctccgttattcctcaaagtaaccctttgtgccccattgtacccatttgatagttaagatactgagccttagagcagtgaaatgtcgggccctgatcaccctcatttggagaagtattctgaagcctaatccctgctcccatctcccctgtgccctgtaggtgttctgccatttttgctcgtagagacccataatcagtagttctttgtataacagacaacggatgtgaggcacccagctcaacaagcattcaacctaattaaaaaaaaaaaaaaaaaaaaagctagccgggcacggtggctcacgcctgtaatcccagcactttgggaggccgaggtgggtggatcacttgaggtcaggagtttgagaccactctggccaatatggggaaaccccgtttccgctaaaagtacaaaaattagctgggcagtgcaggcgcgcacatgtagtcccagctactagggaggctgaggcacaatcacttgaatctgggaggcagaggttgcagtgagctgaaattgcaccactgcactccagcctgggtgacagagcaagactgtctcaaaaaacaaataactaactaaataaatatttaaaaacttgaaagctggggtgtatgtgtttgcgactagggctccacaatagacctggctggctgtgtgagccagcaagttgctttcccccttgacgtctggctgtcctcgaaatctggctgtcctcgacatctagctgtcctctcagcattgccagataaaacacacgaagtaggcaggcctgggggttcatacctgtaatcccagccttttaggagactgaggcaggaggatcccttgagcccaggagttcaaggctgcagttagcattgatcatgccactgcactccagcctgggcaacagagtaagacacttgctgtctctaaaaaaaaaaaaaaaaacttacattgggatatacttatggtaaaaatgcttacattggaatatacttatggtaaaataaattttgttgtcattgttgtgtatctgaaattcaaatataattggcattttgtatttttgctaaatctgataactctgcctcatctgcaaaacaaacaggttg

SEQ ID NO: 915503 - DNA, 4001 bp, Homo sapiens
tgcgctactggggagaagggcagccccactgaacccagcagcaggaatgggggaaggcaagttactgcaagcaggccagcctcccacagcccagcccatcttgccacagagaaatgccagccctcaggccaaggttagctgagttacagtcccacaaagaaaatacaagatcacctagccagggctgtgcccacagctagctggactgagcagggtctggaagggaaggggaggagatgatgggaccccaccagagggtcccaaacacttgagaggtctaaagtacctggaaactgcctcagagggaggtcaatgcctgcctttttcattctgaaagaaaacagaagagtgaagagggcgggagccggcaaaggagagatggtgaggaggcccctggcgcagagggcacaaccagtccccaatctacagggaccttggagatcgaccacctcactgtaaaatgggagaaacaaggccagggcagggggtcaccccaggtccctcgggataaacaggggtctgccttcccagcacaggggtccttcctcacagaagcacagagcccctcctgagggctgcatgcggtgtcctgttacacagccagtacaaaaaaaaaatctctgctgggagtcccggtgacagaggagacaaaggagaggacgggaaggggggatgggtacatgaaccatctgaagacaggagggtgtggccccggccggaattccggagaaccaaagccccctcattttcctcaggcctccatccgggccgtacagcccagagggaccagcgggaaacaaggaagaggaggggctgagactctgggccagtctggaagtgcattcattctccttcctgctcttcagccacctcaggaatgtctctaagctggggggcagggaaccccagcctctggaagttagaccctgcagtttaaaccctgcagttactccaagaaccctgtggcagtggacagaaggaaagactcaaatccttctagtcagccccttaatccccagagcagagcagaccctgctgacccccactctcttttttcggagtggtagggagcctcgctggccaagtctttcctttggctgccatcatctaggctgcaagctgctgatcagaaattgagccactgtcgcccacttctaccagagcacacggaccccaggagtcgagacgatttcacctcctttcccaccaccggaagctcaaattccctcagcaagcctgtgaggaggctgggccaccaatcaccgctgcccctgagcctcaaccccagaacggaagtgacctggaactgcgaggccggcctatcctccctacccttgcgggaagaggcaccagacccatctccttcctcctctgtttctttccgcagaggctctgctctctgcccccagccccctttacacagcacctagtctcgtatctgccaccaccaccttttaggggtccctgcactttttcccagtcctccgagtgcacggactcccaacccggctccgatctccgccctagccctcagctggcaccatcactggctagccctgggctctcgattccaaaccctccagcggcccccaaagtgccgaggactccaatttgtaggctctggctcggcacccaacgcttcgcagggtcccctcgcccctcttactccctcgcgcacccccagattgctcggcgctcccccgggccgcacgcacgcaggcgtctcccgcccctcacctgggtcgggctgggctagcgccgggacgtgactctcgctctcgagccgcgacacgattctactcttagcccgctcccctgctcccgggatctatatatggcagtccccaccccctcctgcccgtcccgagaaacttctggaaagttggaaacgcttccggagggcgccccagctccgccaaaaaaagccaaagacctccctcaaaacctccccggcccccggcccctccctctgccggcgcctcccggcccctgggtcctactgcctccctcggcggcccgggctgcggggcgccgggagtccccacggggatcagcgtgtccttcagagtgcgagcttcctcccacccccaggctctctgcataagctagcccactccgaatcgcacgtcctttcaggcgcccctttccccgcaggggctctgccccaagcagagccatctccccttctccccgctctcccccattttcaagctgaaacaattgagtcctgtgcaccccctccctctcaggggagacgttcaggcttctgaaggcagtgcccttctccatacttgtacattcaaaaaacctcaacctcagcgatggccagagggagagggagcagaccagacccggtacctgcccggcacccggaaagttcaagtcgtggagtaatagaggcagagatgcctggggaacttcaggtggtctggctgggcttggaggagtgcacaggaaggaaaacctggctctccactgagcaaggtgctgtgtgaccctaagcaggttactttccctttctgggcctctgttcccttggctgtgaaatgtggttctaaggcatcccttgctttttttcccccctctctcccttcctcaatccttgtcacccctggccccctccctattgcatcccctccctctttgggtcccctcccacaggcctcaggtctcactgtcaattcctaccccaccctcgcaaactgatagctccttgacctccaagttaagctagggtattcattactgttctaggtgctgaggacacagctgagagctgaacaaagtccttgccctgtgcgatgtccatctgtggggtatgtacctgttagtagggaattcagtgattcagtgaggcagattatttaggaaaccctaaataatctgggcgacagtggctcaatttctgatcagccgaggctccctaccctccgaaaagtcctctttagtagtttaatgatagctattggatggacgcagtatggagaggaagggacagggtagggactcttcattcattcagtcatgaatgaatgcattgagtatcttctttcttctaggtgcttgcctggatcctggggagcaaaaaaatcccagtacccagcaaatgagtcaatcacctgggtccctgccctctgttagtggttgtggggaagcctggtggtggtgacaaacctctctgtctgggtaggcttctgcagctcagagtcttttgagtacaaggactgtgggaaatctcagatcccaaaagcttcagactctgtgattcagggtcaaggaatcagagattacttccactcaaagcccccaaggagtctttgaatccagctaaggaatcttaacatgttaaaatctcagagtcgaaggattctggaataaatgtattaaagactctgagctgcaaggcatctcagaggtcaggggttcctgtctgcagccccaggcagaagccctcttctcagtatcccaaaaaggcaagcaccgaggcacctctaagaagagagagcttacctccttcagaggcagccccgcattcttttttaggacaggtctgattattaacaaaagcttccagccttggcatggtgtccatctctttggggtggctgtcgtggttctcatgtgcttcctcctgcctcaactgtatattgcttttaaagataaattctaggctgggcgcggtggctcatgcctgtaatcccagcactttggaaggccgaggtgggtggatcacctgaggtcagcagttcaagatcagcgtggccaaaatggtgaaaccccatctctaataaaaatatgaaaattagccagctgtggtgtcatgtgcctgtaatcccagctactcaggaggctgaggcgggagaatctcttgaacctgggaggtggagtttgcagtgagccgagatcatgccactgcactccagcatgggtgacagagcgagactccatctcaaaaaaaaaagataaattcttgtttatccaaggagacctcccgggtccca

SEQ ID NO: 915504 - DNA, 4001 bp, Homo sapiens
aacaagggaagaaaaaatatcccaacccctccagacttgggtctgtcccggcggaaataaaaagccgcagtagtccaaaccctcctgccctcaacccacgccccctttctcagtccctgcggagggacggtgcccggggatccctctcagcctcccccagtgcgcgcccggggacgagccgcccgagccccggccggcaggaagcgaccctcgccggcaggaccccgggccgaacccgtaccttccgcagcactttccggcagttggtacagagcaggtagttggcggcggccgacgggctgccgccgccccggttcatcgtggctgcgggcgccgaggcgagagcgggcggagggccgggtccgggctgtcactgcggccactgcagggccggtccgtccccccgccgccagccgcgattccgcctcagcctcctcaaggcgggatgtcgggaggagaggcgactgcctgaaagctagcggcactgccagaggcgaccaccgcggcagctgccccagcgacggcggagacggcggcggctgctcctcaccggcccgttgttccacccgcccccatcttccagacccccgcccccgccaggctaggacgagcagccgccaccgctgccaccgccaccaccgccgccgcagcgcctcagtgcggccccgcctccgccgccccaccaccttcaccacctccacgctccggtaccgcccctcccgccaatcggacagctccggctacgcccccagggcgctagcccgcagccaatgagcaacgagagcccgactgggagtcgcgccggccaatcgcaggggccgaggaagccttgaatctccgggcaagttaagtttatctccgaggctcggaactgaagggaggtggcggttagctaagtagtagggtagcagggaacagtttgctctcctctgccaataagaggacgagggtgtgtcatatgcaaatatactgccctccaagccccacccccaagataagctacgcccccttctctaggtccctgcagaagtggtgaggagaatgagataaatagttgggagctagagctcgctagagagtctaagattgagctaaatatttcctgatctctcgagaaagggggaggggagtgggaggattaaatgttccttccttcagggcagtggttaggctttctctccaccaaaatctaactttagctgtaaagaagactgcagttatgtagtactttgtatccagggatctcaaagaactttacgcatcatttattgtgaaccttgttttgcaaagatttcagttacttgaggcttgggaggcggataggggataaatgtctgagttatatatatatttacgcaagtaatcgagtttgaggggagagacacaaaacctctggtttagcggtttcctcttgtttgtgaagcaccttctagcagttatcttagagatgtaagttcatttacttgtccagcactaaaaggccaaaggggcttgttttctcacccaaaagaccttcctgaggcagctgttcggatacatgcagagcacagcgccctgctcagaaaggaaggttcagagaacaaattgtcgtttaaaactattgggacaaacctacctcttctaaagcttaaaatggtaagtcagggttttagcgtccacgttctgcggagagaaggcagacttgactggggaaagcgcaggctgaccgagtgtggcgggacagacgggtaggggagccaggtctcccgaaggggctagcaatgcgcgtccgagtcgaatgcgggttcccgatgctagacgcccgcaacctgctcccgagtgagaacaaaggccggcgcagagcgagaacctgattggtgcccggtcctcactcgtgtcctccgggccccagagataacttgcatcgcctactggcaaggagctctgtgctcactggagcccagctccccacccggccatggccgtggccacaggactgtgcattatgacatcacctgttttcgatttttagaacctaatcagtattctcggcttctccctttttaaaggtctccagcgtaccaggatttgtgaaggcctgaagttcgtagaatgaaatctatgtggagatgatttaaaagaacggtttcactggtttgcatttctttcttttctttttaattaaaaaaaaacaacaaccctggtttccttagggattcagggtggtgttatgcaaaatcggaaaggtacacttggaggagctagcaagtttagcatatcaaagctattagaccaatttgtgcggttaaaactgccattctcatttctcaacagctgtctcctctctgtccctttttagagaccaacacatataaaccaagtctacacaagaaacaaaggtaatggaaatctgctagtatcaggtttaaatagatcaaaatagagtagaaaaccccaaaagggtctaagttatgtagttgggtaaaggtgttgatctatttagccagtgttagctaaaggtcgcttgatgctgtgtagacatacataactaaagagcaatgaatggtgtggggaaggtgcttaagattcagttagaagaaactgtaaaagcaagtaaattcagaaaaggagggaattaccacatgcccttcgatgcagagaaccaagaaatgcagggagaaagtcagcaaggcacagtttttctaagaaacacatatgtgtccccatttagtggtaaatttcttgggctatattcctggctggttctggcttttaaagcagattttatgtgagtacattttaaaggaaaggagaaattgaaggatgaagtgaatttttgtgcagattgaattttctcaaatagaattttaaattcatattgttttctagcacattcttcttataaccttttcttttcttttttcacttgacagctaaaatcctttcgaaatgagttcctttaagttcttcagtaactaaatcctccagaaaggaaagccgagagaatctagtcctatacaataacaccctctaacaaagatcgctaaaggaagattttagtagatgaatatcttcaataatacatggtcacatacatgtatctgaccatatgatggctctctgcaccaaattcctccaaactattataatatgtattgtctgtagtgctatttatttggcagttaatcatgtattacattgtgacatttcttacagtgaaccattatgtatgtgtttatgttctgccctcaactactcaatgccagtaccttattcttaacacagcaaccaccctttctggtctgtcctcacaccctcattcccatcatagttattctcctctctcatggaaatgttcagtttctggacatctcctttctcttccattcttcacctgaccttccttcctttcttggccagcctgaatattataaagggaattttatttcaaacccaggatcgcacttaagaggaaaagaaacaaaagccagttctttttattgcacatagaacaaggagaaactccaccccttttgttgtctggtatgtttaaaacaagaaagaactttagaaaagtaggatatgagtgaaaattacaaccaatgttgagaactactttttaattttttattacaaaattaggatgatacttcattaaacattgtacatcatttcaaaactgttatctcataatcatgttgcttgttttgaattattcttttaaagtgtaatttttttaagcaaagaatccataaaattacatggcttggatgtaccataacttacttaatccttatgctattgtttaatatgtgggttgtttcagatttttcatgattgtaaataacaaaataaacttccttatacttaagtttctggcagaatctctgattcctaggcctggaatttctgagtaaaagggtatacatatgtcttaaggctcatggtgcaacttgctataatattttgtggaaagatttgaataagaacacaggtgagagcaatcatttgaaagctatcat

SEQ ID NO: 915505 - DNA, 4001 bp, Homo sapiens
ttattcaattaaaaagcataacttgctgtcattttaaccaggctgcactttaatcaaacatgtcttaaatgacacattttttcatgtcaaagacataacataaatttaaaaattaagaaataaatttttttgaaagctaagttcagatgacatctggccctgcagtgaaagagttaacatccaactaagctgatctgcacttctgatccattacatttctcacaagctaccctacaatgagctgagcaagtatcaactgtaatttgatcctagagtttatggaaaaaaataactgcacatactcaacatgcacatttaataaaaatctgtttcaagagaaacatatccaataaacacaatttaaggcatatttaactgttcaattaacctcaaatctgcaatccctttgctctcacgctctcaaataaaataggaagaaaaaaaaaagcagcagccctactgcagggaaaagaggcttgaaaaacaactttgattggcacttggcctgacccacagaggaagaaaaacagtttttggacaaagagcgcaaatatttgagcttgcttacttatgtgcttttttctttcttccttttttaaaaaaaaatgtagaaagaacaatcccaaagtgaaccgtatttagagatgttgactaaaaacggtaccatattcatctccgctttcagtcccgatgcatttgcacagctcagcaattttaattcatttgtagtgaacaaacagaagcatctcacctaacgtttccacttaataaaatgtaaaaatagagtttgaatacgaataaactgattataatattactttggggcagctgttaaaatctgatcaaaaagtctagagacctttttttcattcccttccccatccctctcgcccttccccgcggggcgattaagccaagtaagctaaacaatactggagtaaactttctatcagtcactctaggaagcagcaataaactgatggtgcgcctcatttttctggatcaacacgggggcaggggggtgctaaggaggaataacccacatccacctcagtcttctcctcccccaaccccagcctcaggaactggccaggtcgaattgcatttcccatgggcataaagttcaagatgctttactggttcctttcgagactgaactacagacacaggactaccatccaaacaatttgaaaacgggggttgttgagcaaggcgcgcaaggcagaagcaaccgaataaacaaaaacaacactcgcaagagttagccacagcaaagaggggccaggttcctcgggatccgacccagctgctctgatttcacaccgacctccatcaacagctaaactgcacagggaggaggatcgaacggatccctcccgccctccgcccaaggagccgacccggggtagcaaggtagggaaatgagccgtaaaggagagcaaaggcaccaaataaaaggaacaagggaagaaaaaatatcccaacccctccagacttgggtctgtcccggcggaaataaaaagccgcagtagtccaaaccctcctgccctcaacccacgccccctttctcagtccctgcggagggacggtgcccggggatccctctcagcctcccccagtgcgcgcccggggacgagccgcccgagccccggccggcaggaagcgaccctcgccggcaggaccccgggccgaacccgtaccttccgcagcactttccggcagttggtacagagcaggtagttggcggcggccgacgggctgccgccgccccggttcatcgtggctgcgggcgccgaggcgagagcgggcggagggccgggtccgggctgtcactgcggccactgcagggccggtccgtccccccgccgccagccgcgattccgcctcagcctcctcaaggcgggatgtcgggaggagaggcgactgcctgaaagctagcggcactgccagaggcgaccaccgcggcagctgccccagcgacggcggagacggcggcggctgctcctcaccggcccgttgttccacccgcccccatcttccagacccccgcccccgccaggctaggacgagcagccgccaccgctgccaccgccaccaccgccgccgcagcgcctcagtgcggccccgcctccgccgccccaccaccttcaccacctccacgctccggtaccgcccctcccgccaatcggacagctccggctacgcccccagggcgctagcccgcagccaatgagcaacgagagcccgactgggagtcgcgccggccaatcgcaggggccgaggaagccttgaatctccgggcaagttaagtttatctccgaggctcggaactgaagggaggtggcggttagctaagtagtagggtagcagggaacagtttgctctcctctgccaataagaggacgagggtgtgtcatatgcaaatatactgccctccaagccccacccccaagataagctacgcccccttctctaggtccctgcagaagtggtgaggagaatgagataaatagttgggagctagagctcgctagagagtctaagattgagctaaatatttcctgatctctcgagaaagggggaggggagtgggaggattaaatgttccttccttcagggcagtggttaggctttctctccaccaaaatctaactttagctgtaaagaagactgcagttatgtagtactttgtatccagggatctcaaagaactttacgcatcatttattgtgaaccttgttttgcaaagatttcagttacttgaggcttgggaggcggataggggataaatgtctgagttatatatatatttacgcaagtaatcgagtttgaggggagagacacaaaacctctggtttagcggtttcctcttgtttgtgaagcaccttctagcagttatcttagagatgtaagttcatttacttgtccagcactaaaaggccaaaggggcttgttttctcacccaaaagaccttcctgaggcagctgttcggatacatgcagagcacagcgccctgctcagaaaggaaggttcagagaacaaattgtcgtttaaaactattgggacaaacctacctcttctaaagcttaaaatggtaagtcagggttttagcgtccacgttctgcggagagaaggcagacttgactggggaaagcgcaggctgaccgagtgtggcgggacagacgggtaggggagccaggtctcccgaaggggctagcaatgcgcgtccgagtcgaatgcgggttcccgatgctagacgcccgcaacctgctcccgagtgagaacaaaggccggcgcagagcgagaacctgattggtgcccggtcctcactcgtgtcctccgggccccagagataacttgcatcgcctactggcaaggagctctgtgctcactggagcccagctccccacccggccatggccgtggccacaggactgtgcattatgacatcacctgttttcgatttttagaacctaatcagtattctcggcttctccctttttaaaggtctccagcgtaccaggatttgtgaaggcctgaagttcgtagaatgaaatctatgtggagatgatttaaaagaacggtttcactggtttgcatttctttcttttctttttaattaaaaaaaaacaacaaccctggtttccttagggattcagggtggtgttatgcaaaatcggaaaggtacacttggaggagctagcaagtttagcatatcaaagctattagaccaatttgtgcggttaaaactgccattctcatttctcaacagctgtctcctctctgtccctttttagagaccaacacatataaaccaagtctacacaagaaacaaaggtaatggaaatctgctagtatcaggtttaaatagatcaaaatagagtagaaaaccccaaaagggtctaagttatgtagttgggtaaaggtgttgatctatttagccagtgttagctaaaggtcgcttgatgctgtgtagacatacataactaaagagcaatgaa

SEQ ID NO: 915506 - DNA, 4001 bp, Homo sapiens
aagtgcatttggatgcagaacgtatatttacctatataagctctttcttgttctcgagtaagtccagggggaataactgtaggcattcctggaatcactgtcttctgttccattgtgtcttggttccagcggctcctcttccgcttcttacttgggaagtctaaaaggcagagacaaaatccatccgatgtaaatacaagtagttatcaacagacagctaagggtatttaaggtactacacagaaactcagcagactgtgaagctgagagcttaacctaaaacttaaacattaaaaaaacagaaaacaaacctcagagatcagagatttaaagcttatggccactacaagggtatgtggtccttggtcaggcaagttaacatttcaccttcttttgtctagaaaaactgtcagatatataaacgtggtaatcttaatgcatatggctgcagagagtgttagatagatactacatcaaccatgagtgctctgaaatccccaggggagacaaaaatacactgaagaatcatagatttgtaaagcagtcctgatgggactgggggctccacccacctccactcccctcaccagtcacttttgtacgagaggccggaccacaactaaacctagttacaccctaccaagtgggaaaagcccaattcttcaacaagatcacctttgtcttcataagtttagccaagatcagcattcagttttcctggccagttggacactgagggtctgaactcttaaaaggatctatcaaaaattcaacaacctatacaatagcagccaagttctcctttccccgtacataggcagaaactccctacatttgccacaaaagagtccttctatttcccaaggggtacaggatcagagggaaaagctttttaaaacaaagcgacagggcagccgatcagactgagatctaaacatactgaacagatttaaaaaaaaaaacaaactaaaattctctccccaaaagagaccaagaaagatcagacccaaccatcatctgaagcatgccaacctctcccggatgaaaaccctgccttgctgtagaagcagaggagctatccttggtacggttcccattctggttcctcaagaccagaagggagtcgctgcacgtcatcaggtgaggctttcacgccctgctggcattcacagctagcaccccgtccagcgctgaacacccgccacccctgttcccgacaccagcggactggacagcaatagtgggcccccagtctatacagttgcgccgcacagcccggccacctcactgcgtctgcgcacagagcgcctcccgcccgcccagccctccccccacagcgcgcgtgcgcactcgaggccctagaaccaggccgcgcgcgcccaggggcgcctccgcccgggcctccccgtgcgcgcacgcgcgcccctgccgcgtgcagccgccgtcgccgccgccgcgcgcccctcaggcggccgggcccgtccgcgcgacgcctctcgcgctctctcggcccgactcacctcctccgccgccggccgggcccggctgctggtccttacgcggcggctggggtggcggcggctgcggcggcgacacgcgctggtagagcggcggcggagggggcggctgcggcggcgggtacgaggcgccgggggacggtggcggtggaggcggcggcggctgctggggaggcggagggggcggcggcggaggcggcggaggcagcgccgcgaaggggaaggccgcggtcagggcccccatcgagcccacgggcgggggcggcggcggcccgggagccagcagccccgccccaggcccgggtgcaggcggagggcccggctcgaagcctcctttgggcccggggagcgggggcagcccgggggggcccagcttacccaacggcgtggcgttcgctccggtcgccatggcgcccccggggacaggcaccggcacctgcttttcctctgcggcggcttctccttcgcaagcctcccggggggaggggacccgaatgcgctgccggagcgcgcggagcccgtcctctcacgcggcgggcggcggcggcgcgagacgcacaaagagggaggagagagggcaccgcgggggcgggccgggggcggcggggccggggcctggattgggccgggccgaggcgaagggtcgaaatcggcggcctccgattggcggagcctcagtccttcttgatgcgcgctgggattggccgaaccgttaggccaagcgaggaaatggcggcggagttcggtgggctgggaggtgtcgcagcgcgcacttcatttgttactgcgtgaactgagctccgagtccagaaaggaggggatggggtggggcgaactctatgacggagcgacggcgagctctctcattggctgcggtggtggactcaatcaatctcgcctgcgttgtagtgtcgcgggattggctgtcgctggttccagcctttttctactcccctcccccagggggcagtttctccgggattaagcgagagtcgcggcggaaaaggcccagccggaacgagatttacggcgggggagtcctggagcaggaagtgcgcatgcgtagatggagcaaaaccgcctctccacccgtctcccttcaccatcgacccttgggtccagcaaggaagccctaagtgacgtcaacctttgttcccatggtaacgcagaaccttggggcgggagcaggggaggggctggcgcgcgccggaaaaccggctcagttgacgctgcaggtaaaaagacttcctgtttttttggaaaaaaaaaaaaaaaaaaaaagtgacccaaaaagctacgaatagagacgacttatcgaaggatttaaaacagtatttgaactgatgcaacaacatattagatgaaaggtaacagaaggttgtcagttcaaaaattacaaatacacacttctattggaatctccacggagttcagaggatttaattaaatgatcttaaaatcgtataaaacaataactacggccgggcgcggtggctcacgcctgtaatcccagcactttgacaggccgaggcgggcgaatcacaaggtcagaaggtcgagaccagcctgaccaacatggcgaaaccccgtctctacgaaaaatacaaaaattagttgggtgtagtggtgcactcctgcaatcccagcttcccaggaggatgaggcaagagaatcgcttgaacccgggaggcggaggttgcagtgagccgagatggggccactgcacttcagcctgggtgacagagcgagactgtcaaaaataaaaataaaaataactactacagtactgggaaaactttacaagacggagcaggagcttgcctttccagatgacaaacatagtatataaaacacaataggccagtgccaaggcactgggaggccaaggcggggggatcacctgaggtcaggagttcgagaccaacctgaccaacacggtgaaacccccgtctctactaaaagtacaaaaattagccgagcgtggtggcagacgcctataatcccagcttctcaggaggctgaggcaggagaattgcttgaacccaggaggcggaggtgtagtgagctgagatcgcaccactgtactccagcctgggcaacagcatgagactccgtctcaaaaacaaaaaaccacaataataaaacaatatgatattgttggtaggaaagacacattagtgcaacagaatccggaaataccacaaatgtagtattttatttcaatcaggaaaagatgatttcgttgataaatggcgtagaatcttaaatttaaacaacaaaacatttagaatataatttaggagactataagggtattctaggggttgagagactgcaaagacaggaacctcaaactgtaaaaagatatacttgattaccccgaaaattaacactgataaaagtcaagagacaatgatagatgaggaaaaaatatttgccatacatgataaagagccaatacctgtaatatacaaatacatctta

SEQ ID NO: 915507 - DNA, 4001 bp, Homo sapiens
attttgaggttaatttcaattccactgtggatagtcattaattctcaaaacctcccagcaaataaaacctttttatcctagcacttcattccatatccatgcaatatccctttcccagcagagttctttaaaagtaaatacaagagccttcattttaagacagctctccatagaccaaaccagaaaagatgttgaagggaaggttaaactcttaaattcaagaaaataaaaaggggtaaattgtaaacacactttcagaaccactttttgtcattttttttttttcagaaagtacctataaaaagtaaaagaccacattttagggggagaaatataaaattatggtgaaaggccacgctgtgaaaagtacttggtttacagtacctgcggtgttctccactggggcctgtccagagaggcagatgacactcacctcatcaactggcaatgaacagcagctgaaaagggtggctgctggactggggactgttcttactcctaagtgaaaccctaccttcctgatactcatggagaacactgcagttacgaacagaccaaaacaaggagctgcaaatgcagaactcactgggcaaaaactgacagatgataccaaagtcgtgaaagtatctcatctcaaaaaagataactacaatctcaaactttcaaaaaatgcagatcttgctcagaataaatcgtaacaatctcaaagtgcatttggatgcagaacgtatatttacctatataagctctttcttgttctcgagtaagtccagggggaataactgtaggcattcctggaatcactgtcttctgttccattgtgtcttggttccagcggctcctcttccgcttcttacttgggaagtctaaaaggcagagacaaaatccatccgatgtaaatacaagtagttatcaacagacagctaagggtatttaaggtactacacagaaactcagcagactgtgaagctgagagcttaacctaaaacttaaacattaaaaaaacagaaaacaaacctcagagatcagagatttaaagcttatggccactacaagggtatgtggtccttggtcaggcaagttaacatttcaccttcttttgtctagaaaaactgtcagatatataaacgtggtaatcttaatgcatatggctgcagagagtgttagatagatactacatcaaccatgagtgctctgaaatccccaggggagacaaaaatacactgaagaatcatagatttgtaaagcagtcctgatgggactgggggctccacccacctccactcccctcaccagtcacttttgtacgagaggccggaccacaactaaacctagttacaccctaccaagtgggaaaagcccaattcttcaacaagatcacctttgtcttcataagtttagccaagatcagcattcagttttcctggccagttggacactgagggtctgaactcttaaaaggatctatcaaaaattcaacaacctatacaatagcagccaagttctcctttccccgtacataggcagaaactccctacatttgccacaaaagagtccttctatttcccaaggggtacaggatcagagggaaaagctttttaaaacaaagcgacagggcagccgatcagactgagatctaaacatactgaacagatttaaaaaaaaaaacaaactaaaattctctccccaaaagagaccaagaaagatcagacccaaccatcatctgaagcatgccaacctctcccggatgaaaaccctgccttgctgtagaagcagaggagctatccttggtacggttcccattctggttcctcaagaccagaagggagtcgctgcacgtcatcaggtgaggctttcacgccctgctggcattcacagctagcaccccgtccagcgctgaacacccgccacccctgttcccgacaccagcggactggacagcaatagtgggcccccagtctatacagttgcgccgcacagcccggccacctcactgcgtctgcgcacagagcgcctcccgcccgcccagccctccccccacagcgcgcgtgcgcactcgaggccctagaaccaggccgcgcgcgcccaggggcgcctccgcccgggcctccccgtgcgcgcacgcgcgcccctgccgcgtgcagccgccgtcgccgccgccgcgcgcccctcaggcggccgggcccgtccgcgcgacgcctctcgcgctctctcggcccgactcacctcctccgccgccggccgggcccggctgctggtccttacgcggcggctggggtggcggcggctgcggcggcgacacgcgctggtagagcggcggcggagggggcggctgcggcggcgggtacgaggcgccgggggacggtggcggtggaggcggcggcggctgctggggaggcggagggggcggcggcggaggcggcggaggcagcgccgcgaaggggaaggccgcggtcagggcccccatcgagcccacgggcgggggcggcggcggcccgggagccagcagccccgccccaggcccgggtgcaggcggagggcccggctcgaagcctcctttgggcccggggagcgggggcagcccgggggggcccagcttacccaacggcgtggcgttcgctccggtcgccatggcgcccccggggacaggcaccggcacctgcttttcctctgcggcggcttctccttcgcaagcctcccggggggaggggacccgaatgcgctgccggagcgcgcggagcccgtcctctcacgcggcgggcggcggcggcgcgagacgcacaaagagggaggagagagggcaccgcgggggcgggccgggggcggcggggccggggcctggattgggccgggccgaggcgaagggtcgaaatcggcggcctccgattggcggagcctcagtccttcttgatgcgcgctgggattggccgaaccgttaggccaagcgaggaaatggcggcggagttcggtgggctgggaggtgtcgcagcgcgcacttcatttgttactgcgtgaactgagctccgagtccagaaaggaggggatggggtggggcgaactctatgacggagcgacggcgagctctctcattggctgcggtggtggactcaatcaatctcgcctgcgttgtagtgtcgcgggattggctgtcgctggttccagcctttttctactcccctcccccagggggcagtttctccgggattaagcgagagtcgcggcggaaaaggcccagccggaacgagatttacggcgggggagtcctggagcaggaagtgcgcatgcgtagatggagcaaaaccgcctctccacccgtctcccttcaccatcgacccttgggtccagcaaggaagccctaagtgacgtcaacctttgttcccatggtaacgcagaaccttggggcgggagcaggggaggggctggcgcgcgccggaaaaccggctcagttgacgctgcaggtaaaaagacttcctgtttttttggaaaaaaaaaaaaaaaaaaaaagtgacccaaaaagctacgaatagagacgacttatcgaaggatttaaaacagtatttgaactgatgcaacaacatattagatgaaaggtaacagaaggttgtcagttcaaaaattacaaatacacacttctattggaatctccacggagttcagaggatttaattaaatgatcttaaaatcgtataaaacaataactacggccgggcgcggtggctcacgcctgtaatcccagcactttgacaggccgaggcgggcgaatcacaaggtcagaaggtcgagaccagcctgaccaacatggcgaaaccccgtctctacgaaaaatacaaaaattagttgggtgtagtggtgcactcctgcaatcccagcttcccaggaggatgaggcaagagaatcgcttgaacccgggaggcggaggttgcagtgagccgagatggggccactgcacttcagcctgggtgacagagcgagactgtcaaaaataaaaataaaaataacta

SEQ ID NO: 915508 - DNA, 4001 bp, Homo sapiens
acatttcaccttcttttgtctagaaaaactgtcagatatataaacgtggtaatcttaatgcatatggctgcagagagtgttagatagatactacatcaaccatgagtgctctgaaatccccaggggagacaaaaatacactgaagaatcatagatttgtaaagcagtcctgatgggactgggggctccacccacctccactcccctcaccagtcacttttgtacgagaggccggaccacaactaaacctagttacaccctaccaagtgggaaaagcccaattcttcaacaagatcacctttgtcttcataagtttagccaagatcagcattcagttttcctggccagttggacactgagggtctgaactcttaaaaggatctatcaaaaattcaacaacctatacaatagcagccaagttctcctttccccgtacataggcagaaactccctacatttgccacaaaagagtccttctatttcccaaggggtacaggatcagagggaaaagctttttaaaacaaagcgacagggcagccgatcagactgagatctaaacatactgaacagatttaaaaaaaaaaacaaactaaaattctctccccaaaagagaccaagaaagatcagacccaaccatcatctgaagcatgccaacctctcccggatgaaaaccctgccttgctgtagaagcagaggagctatccttggtacggttcccattctggttcctcaagaccagaagggagtcgctgcacgtcatcaggtgaggctttcacgccctgctggcattcacagctagcaccccgtccagcgctgaacacccgccacccctgttcccgacaccagcggactggacagcaatagtgggcccccagtctatacagttgcgccgcacagcccggccacctcactgcgtctgcgcacagagcgcctcccgcccgcccagccctccccccacagcgcgcgtgcgcactcgaggccctagaaccaggccgcgcgcgcccaggggcgcctccgcccgggcctccccgtgcgcgcacgcgcgcccctgccgcgtgcagccgccgtcgccgccgccgcgcgcccctcaggcggccgggcccgtccgcgcgacgcctctcgcgctctctcggcccgactcacctcctccgccgccggccgggcccggctgctggtccttacgcggcggctggggtggcggcggctgcggcggcgacacgcgctggtagagcggcggcggagggggcggctgcggcggcgggtacgaggcgccgggggacggtggcggtggaggcggcggcggctgctggggaggcggagggggcggcggcggaggcggcggaggcagcgccgcgaaggggaaggccgcggtcagggcccccatcgagcccacgggcgggggcggcggcggcccgggagccagcagccccgccccaggcccgggtgcaggcggagggcccggctcgaagcctcctttgggcccggggagcgggggcagcccgggggggcccagcttacccaacggcgtggcgttcgctccggtcgccatggcgcccccggggacaggcaccggcacctgcttttcctctgcggcggcttctccttcgcaagcctcccggggggaggggacccgaatgcgctgccggagcgcgcggagcccgtcctctcacgcggcgggcggcggcggcgcgagacgcacaaagagggaggagagagggcaccgcgggggcgggccgggggcggcggggccggggcctggattgggccgggccgaggcgaagggtcgaaatcggcggcctccgattggcggagcctcagtccttcttgatgcgcgctgggattggccgaaccgttaggccaagcgaggaaatggcggcggagttcggtgggctgggaggtgtcgcagcgcgcacttcatttgttactgcgtgaactgagctccgagtccagaaaggaggggatggggtggggcgaactctatgacggagcgacggcgagctctctcattggctgcggtggtggactcaatcaatctcgcctgcgttgtagtgtcgcgggattggctgtcgctggttccagcctttttctactcccctcccccagggggcagtttctccgggattaagcgagagtcgcggcggaaaaggcccagccggaacgagatttacggcgggggagtcctggagcaggaagtgcgcatgcgtagatggagcaaaaccgcctctccacccgtctcccttcaccatcgacccttgggtccagcaaggaagccctaagtgacgtcaacctttgttcccatggtaacgcagaaccttggggcgggagcaggggaggggctggcgcgcgccggaaaaccggctcagttgacgctgcaggtaaaaagacttcctgtttttttggaaaaaaaaaaaaaaaaaaaaagtgacccaaaaagctacgaatagagacgacttatcgaaggatttaaaacagtatttgaactgatgcaacaacatattagatgaaaggtaacagaaggttgtcagttcaaaaattacaaatacacacttctattggaatctccacggagttcagaggatttaattaaatgatcttaaaatcgtataaaacaataactacggccgggcgcggtggctcacgcctgtaatcccagcactttgacaggccgaggcgggcgaatcacaaggtcagaaggtcgagaccagcctgaccaacatggcgaaaccccgtctctacgaaaaatacaaaaattagttgggtgtagtggtgcactcctgcaatcccagcttcccaggaggatgaggcaagagaatcgcttgaacccgggaggcggaggttgcagtgagccgagatggggccactgcacttcagcctgggtgacagagcgagactgtcaaaaataaaaataaaaataactactacagtactgggaaaactttacaagacggagcaggagcttgcctttccagatgacaaacatagtatataaaacacaataggccagtgccaaggcactgggaggccaaggcggggggatcacctgaggtcaggagttcgagaccaacctgaccaacacggtgaaacccccgtctctactaaaagtacaaaaattagccgagcgtggtggcagacgcctataatcccagcttctcaggaggctgaggcaggagaattgcttgaacccaggaggcggaggtgtagtgagctgagatcgcaccactgtactccagcctgggcaacagcatgagactccgtctcaaaaacaaaaaaccacaataataaaacaatatgatattgttggtaggaaagacacattagtgcaacagaatccggaaataccacaaatgtagtattttatttcaatcaggaaaagatgatttcgttgataaatggcgtagaatcttaaatttaaacaacaaaacatttagaatataatttaggagactataagggtattctaggggttgagagactgcaaagacaggaacctcaaactgtaaaaagatatacttgattaccccgaaaattaacactgataaaagtcaagagacaatgatagatgaggaaaaaatatttgccatacatgataaagagccaatacctgtaatatacaaatacatcttaaaaactaattagaaaaaaggcaaaaacaatagaaaatgagcaaaaaataggaatggacatgtctcagaagaacaaatccaaatagccaagaaatatgaaagggtgcacaacccctctgctgtggttttttaaaataaatagaaaagatgttggaacccccacaacacttgaaacctggagagagaggtgactgtgatctcagccatgtatggttataattttttctgagataataaattagacctgcttgtttttcttgttctgtacaattattggagagaattaaacatgggacaaaaacctgctgccttcttaatgacccttcttatagataacttcccttttgttgtcctgctttacttagaccagatgacagca

SEQ ID NO: 915509 - DNA, 4001 bp, Homo sapiens
gccaccatgcccggctaatttttatatttttagtagagacaaggtttcaccatgttggccaggttggtcttgaactcgtgacctcaagtgatcgcccacctcagcctcccaaagtgctgggattacaggcatgagccaccatgccctgcctcttttttttttttttgagacagtctcgctctattgcccaggctggagtgcaggggcttgatcttggctcactgcaccgtccacctccagggttcaagtgattctcctgcctcagcctcccaagtagctgggattacagacatgtgctaccacgcccagctaatttttgtatttttagtagagagagtttcgccatgttggccaggctagtttcaaactcctgaccgcaggcgatccacctgccttggcctctcaaagtgctgggattacagacatgagccaccacgccctgcctcttttttttttttcctattttttggtttaattttattttattgtaagttttcgggtacatgtgcagtatgcgcaggtttgttacataggtaaatgtgtgctatggtggtttgctgcacctatcaacccactgcctaagtattaagcctggcatgcattagctattttttctgacactctcccagcccctcccccatcacctccccccttttttttttaaagaagcaaagtctcattctgtcacccaggatggagtacatggagtacagtggcgcaaccagagctcactgcagcctccaaccccagggctccagcaatccttgagcctctttatagggactttataggcgcgtgccaccgtgcccagctaatttttaaaattttttgtagtaacagagtctcactatgttgcccaggctggtctcgaactcctggcttcaagcgatcgtcccatctaagcatcccgaagtggtgggattacaggcatgcgccactgcacccggccacaagctgcttttggagaagcagacagtggaaaaggaggcaagtgtcagcatcaaagagagaactgaagagctcacaattctgtcatggcagtacctccctgcccaacaactgcaagtgagaggaagggctaccctgaacatatggaatctttttttttccccactcaggtcaggcgagtaatgtgcaagggtgtcacatctcacacatgcacgtgaacacccaatcatcatgctcatgaactacaaaaggatcagcagatggaatcttaaaaaacagaagaatctccctacctgtgccgacatgggaggtggagcggctttgtccccatcttcccctctcaaaaccggccgattcagcacgatgccagtctgcaaaagagaaaggactctaggtcagtccaaaactagctgtttcactaaacgacgttcgctcccaattcattcaacaaaacgtacccagtgcctgtctgccagcgctctggctgggcactgaagaggaccaagatggatacaagaaattacaactaagctggcaaaggcaagaacaagctaaaaagggcaagcctccgccttgctgtgccgagataaagaaagaatgaagaccgagccgtgatggggtatataaggtctcctggagaagctcggcctatcctgacgtcccgccgccaacacctacctggcgggtgtagctctgcagccgctccaccagctcctcgcgattacctgcagggcaaagtacacgatcaatggggcaggccagcccggccaggtcaggccccagcggcctgcctccgcccctcgcacccgagtctcccgggtaaccaggctccgcttctccgcaggcccgtaaaggcccctcgacttcctgtgttcctcaccctggatcggagctccgatctctgccaacttggcctgaagctcctgggcagcccaggcgccatagtggcctggaggtggcggcggcggcagctgcaattctgctttgggaggctcgggatgctccgtcgccatcttagccgcaggaaggcgcgcgaccaacccggaagctggggccagcctcagggcccacttgccggaacttccggtggcgccgtatgccacgtcctctctggttgggaggcgacgcgcactcaggcacacccgctgccgtgcgctgggcgacgggattcgccgcagacgcacctttctctagtggcccctcggcggtctggtcgcgaggcctcctgggagttgtagtgcgcaggtctcggtctctgcgggccctgcgcgccgctacggccccgaaggccggcggcgggccggagggcggggctgcgaggagggctggcacttccccgagggagtgttttctgcgcctcacctgcgggagcgaaggctctcaagctttccggcccggccctccggtcagatcctcgaacgcttacgctcccagggagtcccgagagactcatttccccggcggccccgcgttgcgggcgccaagcgggaggctggagccgatgcctgggataaaacagtgtctgattgtctgcccgcccacccccggcccaggcccggatgaatgggctgaaaggggatccaagccgggagagcagcaggcctgcccgggctgagctccagctgccgacctgggggaagggcgactctaaagcccccttttccaccttccaggccggctcaaatgtcgtcttctccactaagcctcctcccgctttcctttcctttcttagagctcccataatacgttcgaatctccaccgtttgttaagtctttcttgccctttcttcctacctctatcccaaaaatgtgagcagggacttgatcattttcagtctcgcatcgcctggcgttcaagaggcgcccaataaatgattactggaaaaaaaggaacaatgtttctggtgaaagcatttgtgtcttttttagtctcaaaaataaactcaggcccttttccctcagccgcacctgcactgggggccccaccttgcctcccactccccaccccaactccccttggcctttggagacagaggcagagactggcagggattcttgcctgcctagcatccacctctccctgtcccacaccatcaattcagtttctctccccacctctgccactagctctgccctctcaccaacagctagcctgtgtgtgttttttatgtgtgttgagaaagggagtggggagactcaagtgaaatggtctcattttccccctacacatccccttcagatcttttctccagctccattttgccaactgcccccagtggagaagaagctgggaacagggaaaaaaaaagaatggggcaccaggtcgggggaaggtgaggtttgggagagacagggaaaaggactgggttgagaaaggttggctcacatcctagcactgggtgggaagtcctcttcctcctacccaaaccttgacctttcccctttccatcaatatcactatgggaggctcctgcagccacactcccagaggagaagccaaacccggaaaggacagtaacgaagacagaaaaacagcgcccttccctccagcttgtcagcccactcaggcagaacctttctagcccaaaggaaggctcttctgctccctgtaactggagagcccagggcaggtcatctgaggctgagggccccaaggcatgtgtaggtgctagggaagggggcggggtctctgaggcaggataaactaaaggctgatggagtctcattttatttatttattttttatttatttatttatttttttttttttttgagacagagtctcagttgcccaggctggagtgcagtggctctatctgcgctcactgcaagctccgcctcctgggttcacgccattctcctgcctcagcctcccgagtagctgcgactacaggcgcccgccaccacgcccagctaatttatttgtattttttttagtagagacggggtttcaccgcgttagccaggatggtctcgatctcctgacctcgtgatccgcccgcctcagcctcccaaagtgctgggattacaggcgtgagccactgcacccggcc

SEQ ID NO: 915510 - DNA, 4001 bp, Homo sapiens
ccagcagggtcacacgttctcatatgcatccttgtgacacctttcgaggaggaactgtgtactgggccagtgcttctgcacaagggacaagtatgcagcatcggccacagacgagggggactgtggaggatacagacccagccctcagccaagacagccagggaaggcaggagcaccctccacggagccgtgtcaccatccctccatctgggaggacacttgtccacatctgggaggtgagtgacagcagaggctagagagggagctcagagatttggagggacatgcaggtgcagagaagggcttgaacatggggagggagagagtccgactgcatttcagacgggattggtgagctgtagagctggagacaggaaaaccaggcaggtgaggccgcccaactgcgatggtggccaggaccagggtagtcctgcatggggccgtgactccgacattctgctcctgcctgccgcgtttaggaccccagggtgtgcattctcatggggtggtggaaggtgaagcagagataaacgatcagcacagcaacagccttccatatgcgtggcttcagttaccctgaactcaaccaaccatgcgcacattggaaatattttttagttgcatctgtaccgaacatgtacagacatttttcttgtcattattccctaaacaatacagtatagcaaacatttacatatcatttacattgtttaggtatcatacacaatctggagatgttttaaagtatatgagagaaagtacttaggttatatgaaaatactgcaccatattaaatcagggacttgagcatccatggacttttgtattcatgggaggtccaggaaccaatcccctttggatgccgagggatgactgtacggcccttccacagtattaagatctcatggtgcacacaattaggaaagtatatctgacgcagcttcttgggcaggcccgtgcagctgagaggcccttccctgcacggggcaccaccaggtacacccccatccacgtgaaaatgacggagaggaactggaagcgcctgcaccactcatctgtctgcagccacactgtctgggtctggcatgggcacgttggtgaggatagctcagaaggattgagaaattgcccacagggctctggaccacacagatctgtctttatggtccctggtatacaaggccatgccaggaggcaagggtcctataccagcaggagcccagtgtgtggtcaagccaagctggattcagccactcaatacccacgtgaccgtgaccaagtatctaactgctgagagcctgtgtcctcactgaaaatggtggtaattccactttctgcatggagctggtggtagtcagcgtcaacgttgataagatacttggcagacggggcctttaagcacattacaggtgaggtgataccagcaaggcacagaggaggcgctcaagaatagagccactgagcaccagcccacgatctgccctcttcagagcacacagacctgggcttcactgcacccttccctgcacgtgggcatcacgaggcgcacccccgttcatgtgaaaatgacggagaggagctggaagcacctgcaccactcatctgtctgcagccaccctgactgggtctagcctgggcacactggtgaggacagctcagagcacggtccagtagccagaggcatagtccctttcatatctcgcaaggtcacacaagcgggccaccaaggacaatgccatccaccctcttcccacccaaacacaagcacagggcacacagggcctgacaacaagaaacttaaagtccctggccacagtgcaaaggtggggaggtggaccaaacccagacagtggccactggcttgcaggtaacaaggacaggggaaaatgttataactcaccagaggtgttgggagactgagcctcacagatggcctcttagagcaggaactgtctgtattctagagggccaaagcagggtgcctggagagatttccagacctgtggagagataatgagaccggggcatggtcagacacagactgttgagaggcacatgttaaaacttcatgtagattctgatatttctgtgctaaaaaccagggatcgaacttctgcttccgggcaattggagtagacacatttttccctattcctcacacaaagcacaactaaaactcaggatgctgtatataaaacaaacctaacactctgcaaggtggagagaaggcagaccagccagggacatggtgtgagctctctgggttttcttcttgcctcatacatcccagacgtggtgctgaataagccagcaacccagaaaagccaacaggagcaggaacagtaccacaacaaaagcatattctctttagtcgaaagactaggaaagcggcagctaacagggcaatatatttagacaacaggtctactccagccagacactgcagaaaaatctgtggcctcagccccacccacagcagcaaaggccgagtagggagtctagatttccaccctgtgtggctataatgaagcaccaaatccctgccagcgtggcatcaaatagagcaacggaaggagctagcacattcatccccaccaggcagtaacaaatcctcctttcactccggcattagtataggcagcatggggagcctggatttctatggcacctgtcagtaatgaggtgacacccctttccaccttcccttgtggaagtggcgtcaggaaaagttagcttacaaaaaaagtttaactaagactaaaagtctcataacataatacaaatatgtccaagtttcattagaaaatcacccatcaaaccaaggatcaggaagatttcaaactgaaaaaaagaaaatcaatggatgccaacatggaggtgacagagatgtcaggatgatctgacaaagagttgaaagcaaccatgatgaatgcttccacgaacaattaggaacatgctagaaacagatgaaataacagaaagcctcaccagagcagtgcctttcaccaaagatataaaaaagaatcaagtgaaaatgatagaactggccgggcacggtggctcatgcctgtaatcccggcactttgggaggccgaggtgtgtggatcactcaaggttagaagttgagaccagcgtggccaacatggcaaaactccatctctactaaaaatacaaaacttagccgggttggtggtgggcacctgtaatcccagctactcaggaggctgaggcaggagaatcacctggacccaggaggtagaggttgcagtgagctgagatcatgccatgcactccagcctgggcaacaagagtgaaactccatcttacaaaaaaagaaaagaaaatgatagaactaaagaatacagtaactgtaataaaagactcagtggatggactcaacagcagaatggaggggacagaggaaataatcagtgaactggaagacagaacaacagacattatcccaactgaacaatagagtgaaacagactgaaaataaataaacagagtctcagggagttatgggacaataataaaatacctaactttaaatgtttgaaatcccagaaggagagagaagagagggagggtctgaaaaagtactcaaaatgtcccaaatttgctgagagatataaacctacagattccagaagctgaacgaatcccaaataggataaacccaagaaaattcacaccaatatacatcagaattaaacttctgaacactaagaaaaaatattgaaaacatgcagagaaaccaatacttacatttctcatcagaaactgtggagaccaaaagaaagtggcacagtaattttcaagtgatgaaagaaaagtattctcaatccataattttataccaacaaaaatatcctgtaagaatgaaaggaaaattaagatagtctcagatgaaaggaaacaaaggaaatttgccactggcagacctattctaaaagaatagctaaaaagaagcctttctaaataaaaaaataataataaaa

SEQ ID NO: 915511 - DNA, 4001 bp, Homo sapiens
tccccggtccttagtccggcttgccacgccaccccaccttcatccacggactccaggtactgtagggctgggaaagccggtgttggtgtgaattcttcaatgggtgtgtcagctgggaagacaagcagcacctggttacaagcctgggagatgtcttccaagttcacattgcctgacctccccacaggaccccgggaggaagtgggcccactcatctcccattgcaggtggctagtccaggccaactctcccccaggaagggcttgagattcatactcatgggctgatgcaactcaagcaatgaagtcaattgcaccttggggccgccatcatatttcttggcctctctgctgaaaccacaggataatgtgctctgtggtacatgtctacacgcctgtcattttctttaaaagcatcagtgactaaacattttcggttctaaaaatggaaaagttcctcccctgccacacagagctacagaaacaccacactaaaccacttgccaaatttacatctacgtagactcgcaaccaagggaattcaacttggaacgcggacggaacatcacgctgacccagtgggtggctacagatttggaatgtgctcatgagtcctctctacagggagtccaggcctctgtgaccactctgtgtgtgaccagtgtccctgggcactggcatgtgtgtgtgtgggtgctgaaccactactgcccagcacagtgaggcttggcttctggggccccacacagctgccaggtgcaactccagggcaggagatggacttttctagggaggcatgagtggccaagggtgggtgggtgtggagataaagattccagcagggggaggggagagcaaatcacacagacaggcgtggatgctctcacagagacagatgcatctgctctttctctctctggacagctcgctatggagctgcctgagtctgaggcaggtgggcatgccagctggggaggaggcctcctgcagcacaggtgcgggacccctggcacagcgcgtaagctccaagatgaaacttccacatggctgagccacacacacagtgggcggatgtcccctctcatggggaggtgatgccattttgttttcttttggaggggaagctgcgcgtgcagggtgactggcaggtgcaccgccatggactgcattcctgagcctcccacgacgggccacgtaacgtgtgtgctgccggctcagtccacggcagaggggaccatcttgtcacatttcctttgcaaagtcaccttagaggtgagcacacaaatgcctgccgcccttggagccaaagcccactcccagaatggggcagtttctaggtgcctgaaactcaggccagggcaatcctggggatttgagacccagagctctgagggtagccacagtctggctcaactagaacacaaaatactgaccaccccatcatttaaaaacaaaaggtaggaggggcaggagggagagagaacccattcagaacaacatcatctacagaaaattaaaaacattcctcaaggaagccctaacgttttctgagtaaggcacaatgtgaaggaacatggttgtctagcaactgagtgcccccaggaaaaatgcttatttaatgcttattcctgagctggggaacgtttttcatgcaggcgtatacacacacacacacacacacacacacacacacacacacacacacacacacacacaaacatgggaacatattcaggctcagagcggctgctcttacctttggcccctcgaagcacgaatccaaagccctcattgtcttttttctgcaggaccaccgtcttctcctcaataatgcagtcactgtagagagaattccggggacagcgaccattattgtagcccgtcatcatcaccgcggccgctcctccgccggggacgttcatcatcatagccaattaatcaccccagctcgccagatccaggcagcatggaggaaaggaggcagcgagggtgcaggaggagcgaaggaagaggggggtggctaccgggataggcgagcgtggcacaatgagacttgcagggtgggggcaggcagagccggagccagccggaggaaggagtcatacatggtggggcggctgcctgagggatggctgagctggaggctcaaggggggctggccaggacgccgcccagggcaaagaaagtaagtggcccgaacggcggcggcggcagcggcggcctcagcagcggcggcgtcgggaatgagctcctccggcttgtcccgaccacacgcatcttccagggaagcccgggaaaatcagccagaggagaaatgaggcagcagttttgttttgcttttccttgaagggggtttaaaataaaatcaaatcctatctgctccccgcacgagccggcagcaggcaccagagacgcagggacctgcgcgtcgcatccagcgccccctccctctcccgtcccggcgccggcggtgtgcggcaggcaggagcccccacaatcatctgacgagcccacagtgcgcccggcggctgcctgggcgtcatcccgcgcgagcatccgcaggctgggctgggagagggcggggagggggagcggctggggctctctctgcatccccccctccagcgtccccccggtcccttgcagccttggaaggtggccggtggccggtcggggaggggtgggggctccctggcagaggactcaggacatttcggtgttaaagcccctgaggacaccagccccctctggggatgatgaattcattgctggggaactggagggggtatgtggctgcccctttgagatgacaaagctaaagccacaactgcttgcctctagccatggcattttttttttttaaggaaagaaaccaaaaaagctccaactttgctctagtggccacagtgtcctctcgcttttcctgctggcactcgccacatgacatccagcccccgaggcacccagagtgtgtgggacggtgccctgctcagtgagcctccaggctgcggctgaactgtcctccacccccaccttctgggtggcctgcgggggcagaaggggagtgagatgaaggctaccggcacccccccgccccgtaggactctgctgctgcccggaagttagtggggagctgggaaggcctctgtggaggggagcggggaagggagggaggcagcgtggagggaggcctctacagggtcttgcggggctgtgtgtgagcctcgggggtgaggagaaaggacaccaggccagcggcccagccggaaaaagctgcagatgggtcatgaggaacccaccaggcccccgtcgcacaggggcagtcccagggatgcaaatttcaaacaaggccatgtgctgacggactcttggtcccagaggagtgcgggtcagctctgcctggcaccagcaccaggttcacggtctacaggaagcacagggccccaggtgcagccagctggtgacagcacagccaccccggattggggggccctggggaggaggagggacggggcaaacgtggatgacagggctcagtatcctggacaagggacgagcagcggcccctcgatcctcccattttacagatgaggctggtgaggctcagagagatcggaggacccagctagggaacgcgtgctcttctcaccactccacgcacccacccccgacagcatcagagggtcgtgcatggaggcatgctggggtgaccctgtcttccaggaatagcccagcatgaatgatagcttcacagccgaagaccaggacaatccaggtgactggtcactcccgttgtcagcagctgggaggggggttctggcccctgaccttccttaccttgccccctccccagagacagcctgctaagtgcagggaggtccactctggggaactcggtcacaactgtgagcccctcttggctcatccctggaagcccacttaccctgctcagggccaccaaacaagggctgacacagggtcagaggtccaggaccctgggag

SEQ ID NO: 915512 - DNA, 4001 bp, Homo sapiens
gaggcgggatcatcgctggagcccaggagttcgaggccagagaccccctctcaaagaaaaaaaaagcgatgaaacgagaaccctccatagtctgagcctcattaaaccgtccagttctcccaacctggacccctaccacggcctccgcctctattccgcattgacgcacactctcacattaacaggccaggtcccggaggattcttttcatactcagtagtagctcagcccgctgcttagcagctacccttaatctagcccttgtatttcaagacagaaagagacaacctgatcaagaagaaaccgaaaaatataagaattctaaaactttagaggctgggatttcaaaatcatgacacacagccccatcccatcccatccctccctcacacacacgcacgcacaaccccattccacagtacgaaggtgttcgaagcattgtgggtcatgcttcagaagtggcagcaaggggaaagattgtgcaacttcttcattcaacaaattaatttctagaaccaggactaatttctactctttaaaaaaaaatagacctcaaagaaggtcttctcagcaattgacaatgaatttaactttttagcaatcattctctctaaattcctgtgtgatagcaaaaattacccttaccttttgagcatataaagggtaaagagagaaaaagtcatattgaaaattatgggttttttgcaggattttaaatgatttggcctagtgaatgggtctgtgtttgtattatactaattcacaatggagatttcaaaactctttggaagaaatggatgggcttgggttgtgttagggaaaaaagaattcaagtccagatgtatgagtctcagaaataatttgttggcatagttgtgattatataagtaaaatcagacaaatttaaagacagtactctttaatgaatctttaggttccataggcagttcttaccaagaagatgtcgattccattctccaacacccactaccgaattccacaaggatttgggaatcttcttgaagggctgacacgcgagattctgagagagcaaccggacaatataccagcttttgcagcagcctattttgagagccttctagagaaaagagagagtaagctttctaaaattagtcattttttaaaataagaaactaagcatttgtttatggtaaaacttgcttaagaccatctccattctgcagaaagccttttatgaggcagggagtttcagataacagttcttgctctttgaaacagtatgtacctctttgatatgttctcttaaattcgtttcatattatcgaagattaccagttcattattcagaccgtcttcattgtatttctcacggacatacagcgtggaaggtaactgcaaaagagcatacatttctcgggagaaatcagtgggggaaaaaaagatcatacagtctaccctcgccacgttccagcatactgttcctatgcatccctggcagctgactgttattcctgagatgagtatctgtggtttcctttcaattttgattccttccatttgaaagtattttaagtactgcaaaaagaattctgcactctttaaataaactgatattcactggggtatatgaaactgttctgcaataacggcacagacaaactgatttgaaaggtggaataccagtttggaaaggtaatttatattctttatgctaaattccatcctgcacagagacccagatgcccactaacaataactatttggttgaaagccaaggcaaaattccttcactcctataaataaaatttacaaatccccaaccttgaaggtttatgactgtcaggactttaccagttttgtactaaaaacctatcctaagccaggcatggtggtgcgcacctttagtaccagctactcaggggctgaggcaggaggatcacttgagcccagggattcaagacggtagtgagctatgattaaacctgtgaatagccactgcactccatcctgggcactcccacgacccctgccccaacccctggaaagccattgttgattagaacatccattttgtataaattcttgtcatcattactttttattacagtattctaacagagtggtaaaggtgactagaaataggcacaagcaaacaaacattctattgtaatcattttatagtggaagaaaacctagcacaagggtagaattaaaacaactcccacacacactgcatagctccaccccttgctttttttgccctgccctagcagagctcaaaatctctgccaatttcctgaatgttgctggtcttttccatatccggtcagggtgaatatctgttgcacaatctgaaactttaaatattttccactgaaaacatttgataaactatatttagaagaggaacgttattaagagaaatcatttggcaatagacttgggggcctatgtgagagcagaggtaggaggagggtgaggattgaaaaactacctatcaggcattatgctgattaccttggtgacaaaattgtctctacaccaaagccccttaacacagagtttaaccatgtaacaaatctgcacgtgtatcccttgaacctaaaataaaagttggaaggggaaaaaactaaaattatttgggaaaagaggtgaattataatgaacatcaattttattataagattaactacaaattcttgcagtaaaagtctttagtcatttatttaattttagaactcagaaatattccattataaaaacatttgcgtcattgttactggatcacaataattaaagcaaatgatgattcagattagtggtctcaggacactagctctctaataaacaatgggtaaaaccatttgaaaaaattgtaagcaccacacccaattccacccatgtcaaccaaagacaaattatctagaagatacaagtatcagaattcagtctcttcaaaaaggaaaaaaaacaatcattatggacctctggctcagtctcccacacaatgcaagaattcccttgccagcattcatcataggtggttactactcttaatttttatttttgtgatggggaacatgttagtatatgatttaaatggtatttcaggtcactaggaaaaaggtggactttttgttattttaagataaaggaaaaagataaaattggatcaatttcttatacacaaagacaaattccaaattagtcgagtatataaatattttttaaaagaaaccatacagatactagaagaaaatatggatgaatttctctataagagaagaaaaaattttgctagctaaattgctttaattgcttcaaaaattcggaagcaattagagaaaagattgttataaattgacaacataaaagtaaacttttacatgagaaaaagcactgtgaggaaaacaaaactacaaaagacaaacaaaaaatatttgcaatttatatcccaatgggttaatagccctaataaataaatagtttgtaaaaacagtgtgttataggcttatagaatccaacagaaaatattggcaagaggtatgagcaaacaattcacacaaaaatgaatgcaaatggcacttatgaaagtatattcaaactaatgcataataacagaagtccaaatcaaaactacactgagctaccaataacaacccctccattacattggcaaaaagccaacatgctctgtaggctgtgggataataagcatttatatacattgctggtagataagcaaaatgccataacttccaggaggggaacttagcaatacctaccaaaattatatatgtatttaacctttgacccggaggtgccacttctacacttttcagggcatcattctttgtagaaacaacccaaatatccacaggagtttgagtgaacaaactataatacatctatacaactgaattatatatatagctgttttcaaaaatgagaactatctctcgataatactatggatgatactgtggagtgattttcgggatatattcagtgaaaacagc

SEQ ID NO: 915513 - DNA, 4001 bp, Homo sapiens
ctcccgagtagctgagattacaggcatgtgccaccacacctggctaattctttttttttttttttttgatatctttagtagagacggggtttcactacgttggccaggctggtctcgaactcctgacctcatgatctgcccaccttggcctcccaaagtgctgggattacaagcatgagccaccgcgcctggccaatttttttgtatttttagtagagacggggtttcgccatgttggccaggctggtcttgaactcctgactctaagtgatccgcccacctcagcctcccaaagtgctgggattaaaggtgtgagccaacatttggattttttaggtcttcagttttttccttcatttggggctggagtagaaaaacaggaattagtgttatggggaagagagggcagtggttgcctctggtgaggagctccggatgcattggcgaggagcacaatggcaggctcaatagactggcaatgttctagttcttaagttgggtactgctctcatgggtgttcattttattgtgtcattgttacatataattttgtacatctcaagcattacatggtaaacatgggcacagggagaatgacttaaaggaaaaacgtcaggatacgcaaccaagtagagtactaatgaatgaaaaatgtgatcaatgttaatgaaggtgatgtaacaataagacccaaaggaggagataaaatactgacactaaaataaacagcctttaactgaaaacctaataaaatatcttttccccacctcataagatggatctcaaaggtcactgagtggagataagagtcaggaaatggcatacagagtgctagcattttgcacttttgttagactctgaacaatcatttatgggctgcagtttgtctgaatctaggtacttttccggctctcaggtagagcaggagtcatttttctgcacgctgttctcctaccccaactatcatttcttaacagggatctctggggtccactctttgagtgttttgaaacagaaaggaagaaatccaacattatcactttagtttgcattatcagacagattgcaccttctgctttctccatactgtgacccagtgtccagcctagggtattcgaatggcaagatctgacctgcgcaacagccaaagggagccaccagcctcccctatgccactcacattttcccaccaccaatatctgtaagcggtaccagaaatcaaaactgagccttaaatagtcagagctagtgagggggttgtatttcttagccctgataaccacttaaacgagtaaaatttaattcccctaaggaaccccgcctgaagcaaaccctccccaagggcaccactgagggggtagcgctgaaatgttttggaagattcagtcacctgtttccaaatattacctaactagcttcgcctccttccctccgagctcccctgcagttactccaggaccccgaaggcctctttctgggcacatttgggcctccccactcagacaagccgcactttctccctgctcacaggctgcatgtcagggatggtaagtggggggtggagaaagtggagaggccggggttcaacccagcagactcctgcagaccgggcctcggtcggagacgcgagcccctagcctagctaggttccttcgtcgaccttgagaaaggggcgcggatccgtgtcccgcagaggacacggggtctcggagcccgcacaggctgaggggcaggggtccggccgagccgggccgcctcacctgcacttctgtcggcccacaggattaatggcagcaccagcccgagtacaagccccggcgcgaccatgcttgcaaggatctgaccgccgcctaggactgggaaagtgggttcccggcaggggcggggcctgggcgggggcgaggccgactccacccttttgcagtcctcgcagcctcccgcgacctcaggactgggctgtactcgccccttctcggccgccgtagtttttttttttttttaaagaaaaaacggttacccagcaactagaaaaacaaccggaaccggcggcaccagctcggagagaaaggaggtgaggccgcttccccacttcctctccgataccaagacctagccttttcccttcgtctctcttattctctcagcatcccagacacagcctcggagccctgggccgtttgggagccgaggcagcccattctgcgcgagtctgaaatcccaggtcctcaacatcccgcccccgactagacccgtctgccccctccgcccgccctcctctgcccacattggttcagaatctcgccagctcttttcaccactctagaatggttcgatacccccatctactgctccctcagaaaaagcaaaagagaggagtcaggcgtggtggcgcgcgcctgtaatcccaattgctcgggaggctgaggcgggatcatcgctggagcccaggagttcgaggccagagaccccctctcaaagaaaaaaaaagcgatgaaacgagaaccctccatagtctgagcctcattaaaccgtccagttctcccaacctggacccctaccacggcctccgcctctattccgcattgacgcacactctcacattaacaggccaggtcccggaggattcttttcatactcagtagtagctcagcccgctgcttagcagctacccttaatctagcccttgtatttcaagacagaaagagacaacctgatcaagaagaaaccgaaaaatataagaattctaaaactttagaggctgggatttcaaaatcatgacacacagccccatcccatcccatccctccctcacacacacgcacgcacaaccccattccacagtacgaaggtgttcgaagcattgtgggtcatgcttcagaagtggcagcaaggggaaagattgtgcaacttcttcattcaacaaattaatttctagaaccaggactaatttctactctttaaaaaaaaatagacctcaaagaaggtcttctcagcaattgacaatgaatttaactttttagcaatcattctctctaaattcctgtgtgatagcaaaaattacccttaccttttgagcatataaagggtaaagagagaaaaagtcatattgaaaattatgggttttttgcaggattttaaatgatttggcctagtgaatgggtctgtgtttgtattatactaattcacaatggagatttcaaaactctttggaagaaatggatgggcttgggttgtgttagggaaaaaagaattcaagtccagatgtatgagtctcagaaataatttgttggcatagttgtgattatataagtaaaatcagacaaatttaaagacagtactctttaatgaatctttaggttccataggcagttcttaccaagaagatgtcgattccattctccaacacccactaccgaattccacaaggatttgggaatcttcttgaagggctgacacgcgagattctgagagagcaaccggacaatataccagcttttgcagcagcctattttgagagccttctagagaaaagagagagtaagctttctaaaattagtcattttttaaaataagaaactaagcatttgtttatggtaaaacttgcttaagaccatctccattctgcagaaagccttttatgaggcagggagtttcagataacagttcttgctctttgaaacagtatgtacctctttgatatgttctcttaaattcgtttcatattatcgaagattaccagttcattattcagaccgtcttcattgtatttctcacggacatacagcgtggaaggtaactgcaaaagagcatacatttctcgggagaaatcagtgggggaaaaaaagatcatacagtctaccctcgccacgttccagcatactgttcctatgcatccctggcagctgactgttattcctgagatgagtatctgtggtttcctttcaattttgattccttccatttgaaagtattttaagtactgcaaaaagaattctgcactc

SEQ ID NO: 915514 - DNA, 4001 bp, Homo sapiens
agctcctggccggcagacatgtgcagggcagcaggacccaagcaaccgcagggtctcaccctctgccaggaaacacggtggaggccttgcgagtctccaggataccccattcctatccatgtgcacaggatgcacaggcctgcacacacaaacgtgtacacacgcccccacacacgaagacacaggagaacaagaagtgctcctcaaccttcctgtgagccaggaagccagcaggaagctctagttaacagctaacctggggccagagcccagaggagttgaggaggggtaggtattgaaggccatgttgtatccttagctcccaccaagggacagggctgtggagaagtcactttacttctctaagcctcaacttctccctctataaaatgacagccgggtgcggtgactcacgcttgtagcactttgggaggccaaggcaggaggatcatctgaggtcaggagtttgagaccagcctggccaacatggtgaagccccatctctactaaaaatacaaaaattagctgggtatggtggcaggcgcctgtaatctcaactacttgggaggctgaggcaggagaatcgcttgaaccgggaaggcggaggttgcagtgagctgagatcacaaaactgcacttcagcctgggcaacagagtgagactggtctcaaaaaaaaaaaaaaaaaaaaaaagataaagtgatcttcacccttggagctatgaaggaacatatataaacaatgggagcttaaaggaaaaataaaaccaaatcgatcttggaatgcttgttattgggctgctgaaacccaagccctagggcagcatttcccaaaagagtaaaaaccacagctctccagtgcctttagatatgggaaaaaaggaagaaaggactctaagcagaaagagatcaaacttcagagaaccaggcactgggggcagatcctggcctgccacagaaaccaaaccactccccgttctgaaaaaaaatcagattccccattctcaactccattgcttctcagtaaacggcagtcatggagagagagcaagagacccgggcacgagaccacacagccaggttgcaagaattctcccaatctcagctctgcctggggtctagacttcccacactagctgtgtctatttcaactcagggactcacagctggtgaagaaaccaaagagaagtcagggtgaagtggatttttcacagtggacaaattccccttctcttcccacccaacttgcagttggccttataaaacctctgtcaccctcaatttacaaggccagctggctctcccaggcaggaagagggctgggaagccctgcattcatctccctggggagtctgagatgtaacttgcctgcacagagcttttcagttctgggccagtctcattcccctgaggttttctgggcaagcccagtaataagcctgtttcctctcccaccgagaccccacagagctgtcagattctggggtttagggtagagagcaagccatgtgtgctcagaccacaactgatggaagaatgggggcggaagagaagatgggaatgagccaacttcaaaaactgcccagctggagcttcagagaaacattggtggcaaaggaaggaggactggtcaagaggctccagtgtggttctgggaactgggaacctagcaggacagctcgttcctggggcctcccaaaagggtagcggggcggcagaatcgcctagccctcgtcggcttccccactcgcctctggcccctaagcccccagccctcaccctgttgcgggtcacagtatggttgaaggtgtagatgttgaccagctcgctgttgacctcgtccacgtaggtgcgctcaaactcggcgtctttctgcgagacgttcttgggccccagaacccccagatggctctcgaccgaggccaccaagagcaccaagaagggcaagcccagagcgaacatggccccggcagggcggcagtggcagcggtggtggcggcggcggcggcgacaggagacaggacacctccgggacgggttgcggctgcggccgcagcttccagcatctcaccaggaccagaactttaaccccggcctgagattaggaaatgtcccctcccaagagccccgaagaggctcccagggtccccgcaggggagggggcggccgggagggggcggggagggaggggatgctggctacgggaaggggtcccagctcgcgaggggctgagtacgacctgagaccctggagccccgggccagggccgtgagaaggagggcggctggttgccgggagcctggagacgccgggaaaggggagggaggaagagccggcggcgggggctggccgcggaggaaggcgagtcgcagagtgaggggcgtgataggtggtagctacccgacgccgtgctgggctgcgagttttccgaggtgcgggccctttaagggcgggcggacgcgccgtcccgacgcacgaacactgaaaagtgagctgcgccgctgggcgataaacagcagggctgctggcccgcccgctgacgtcaggggaaactgacacagatttaaaggaccaggtcccgcatttgcccttaaaggggctgcagctgtctagctgaaggggaaagcttgcaatgccttctccaactcctacccaactctctcccgtgattttcaccatctctgaaactcacgttggaataggcagatgtttctgttaacaatctccaagtgttgggttcttgctgaacaactcttacatttgctcaaacataaggattcccccacccccaccaccacctttacaactaacatcgtccaaccctgggccactttttctccggggatcttaaaaaatgaaaaactcgaaggattaggaaacaggacggtggccctaccggcggaggggaaacggaggcagcactgcaggaggaatccccatgcctttcccacctccctctagaggggccacacaactgcagggacggccttccgagctttccaagcttgccgggctgtttcccctcttctctcagagacagttacaaaactcattgaaagatactgaccttcagtgtaaattggtgaaaacttttctacaaaatattttggcactgtttcaagaaacttagagagctttataccctttgatccagtaattccacttctggactctatcctaaggaaataggaagcacagataaaaatacctgggcagctacgcttatcactgtgatatttataatataaagcaaaaaggaaatgacttggatatccataatgagggattggttaaatgcactatcatgaaggcatcaaaaatgatgcttaagacttcacaggacacgtaagcagagaattcaggatatgacactaaataaacagtatatagagccaggtgccgtggctcacacgtgtaatcccaacactttgggaggccaagacaggtagatcacttgaggtcaggagttcgagaccagccatggccaacatggtgaaccccatctctactataaaaatacaaaattagtggggcgtggtgacgcgtgcctgtaatcccagctactggggaggctgaagcaggagaatcgcttaactctaccaggcggaggttgcagtgagctgagatcatgctcctgcactccagcctgggctgcaacagagcaagactctgtctcaaaaataaataagtaaataaaaccgtatatattccaaatgcatatagacatgcatagaaaaatagaaaaaaattgtactaaacatttagcaatgtctccagaaagcagggcaaattttaaaaataaaatttagcagtagttatctttgaattacaattttaaaaataacacatattgtatatcattttcctttaattctaaaaatatagagtagtaccaaaaaataaaaaataatggattgtgagtggttcttaaattttattttttatatttaaaaagatttacaaatgttctacaatgtatatatatttatatattgctttttta

SEQ ID NO: 915515 - DNA, 4001 bp, Homo sapiens
ccagggccaccctgcacacatacaaggaggaccggggaccgcgcggcatgccttccagacgctactagagctcacactcaggagccaaggggccggtttgctcccccatgtgtctttgacctctgaccccggggaacagggccttcagaaactcccggtcaacaatggggctccagcagaactcttccgccctctccccgtccctctcccagacatagctcccccgatgggtgagcagttacaagggactatggcatcttgtggaccttcccttcaggctggggtgggagggcagcgcccccttttccaaataaggagcaaacacaggtggccgaggctcctggctcagagcagatgaggggcagatggcatctcctgttgtcaccaaactgacactccccaggttgacctgggactggggacccagtgaccggtggctggtattgcccacagaatcagacaagggtctcctttggaccctggccctgccctcagccacatgggggcagggcttcattgtggagggctgccatccagcctcccggccctggctgagcaccctctcagcagcaggctttctacaggtacttgtctgactgagtcccagccctgctaggaccttcctttgtcccggtactcagccttgggtgatggtgggccttgggctcagggtcccaaagacagcaccccttcccccacagagcctggtaccagcccctccttgaagtgggtccttggaagcccctcaagaaggttctccccacactgcaggtcaggaagcaggcacagcagggcccagggcacccccgcaggaagcaggagcagggcctccagcacaggccctggggtcagccgccaactgtgaagccccggctcggcggctgctctgtgcacccggtctcagcgtcaccatctctcagggctggcttggcaccctctccttccctctctctgctaacgtcctgcacccccgagcccccaggtccaccgtccagggtgagcatgaacacccacaaagtctccgaccctcgcccgcacagctcttccgaggcgcccagaatctcagtccaagcctggccctggtcgcctcgcactgcccaccgcactctgctgggcaccttgaggttcttagaaagcgccagctcctcccgccctcagacccagccagcgtcctcggtccgcggccgcccctgcccggtgggttcgacgctcagcacccagcaccctgcgggcgactcccgctcagctcggacgcgccgcccctccgctccccgtgcgcgctgggcccccagcgcctgtcctgaagcaggaacgtgggtaaaaggctgcggccccgcaggccgaggggctctggttcgctcccctaccccgcgcccacctgcgccctgggcgccctccaagtgaggagggcggagaacgaggacgcgcgcgggaggcgggcacgggggtgcggctcggggcgctcggccggggcagaggcgcgcggatggcggaagctccacccggcgccgggcgagctcgggccccagcctgactcttggtccgccctcggcgcctcaggaagcctcgagctgggatccaggcttgggcgaccgaggtgggatccctgcgcgcctcggcgctcctagccccgctctgttctgcgcgagggtcaccaaaaagccgctgaccacgtcgggcagaggaaagggtggcccccgcccccttcgcccactttcctcccttcccccagccctggaaagggccaggacgcgggcgagctcgggcttccgggcgacgcgggaacctccccggccccgagccatttcctgagagaccgcgcccagggacaagcagcgccccgggccccgactccaggcctgcagcggctctgggaggactgcgacctccactcaccttcgcgggtctgatggcgaccgccactcacctgctgccaggacctggggctcgcgccgggcgggggcggggcagctcacctgagccaggtgcgcagcggcaacagccccggcggcggcgtagccccggcagcggcagcaggtgcggccccgccccgcagtcagggcgggggcggaccccagcgtcccgctctgcgcccaaggctggcgctggaggctgcgctgctgcccgggagccgctgccgcacgggcctggggccagtggccaaaccagcccaaccagcgcgcagagccccggagccccagagccttggggactcttcggagcgtccaccgccctcaaggttttgcgcgtccgcccctatctcttccctttcctccaggaagcctgccttgacccccaccccaccctcaagtggccccgatgtcttctcttgcctccctcaacaccccaggtgcagggacggggagaggaccccataggcgcccctcccttggaagcccatggaaaactggagaagggacaggcggcctgaggcggcctcacctggttccagacgttccacactccgggtctgtttcccatctagccctgagggcagatataatccacccgggacccagcgaggccaggaaagcaagacagacaggcttaattttactgcagaaacgggttggctgaagggaacaggccagcgaggtgggctcaggacacccccaacagccaggatgggggcacggcaggatctggcgcccagaagtcagagggaggcccaggaaatttgcgccagttttcctgccttgtggctgcctgaggagccctcactcccagttctgtgggtgcccagggtcacccagagttcaagtcagggctgtgccaagcctgagagcccccacaaagacggagcaggcggaatagggtggcagctcacagccctgaacatacaggggattcctgcggccccacatgggcacagccttctcacagcacccctcaacacgcacagcggtgggcttgtgggaggtgctggtggtggcactgtctcagctcctggtggcctctggacgggctctggccctacacgtctgtgctcctggcactgaagatggatgctggggtgggatgggcaggcattgggggccgagagcctgcccccaccccacccagcctctgccttccatgccacatcttctcacgcagcctctggtacttcacctccagaaccttgttcttcaccgactgagggatgtcgggcacgaaccaggcggcgatgagcttgatgcacaaggccacgtgctagcggcagcacaggagaggcccagcacggtcaggtgccagctggcatttgggggttcagggccggggagaaggactggggagagcactgcccagacccactccgaggcctctcccggttctggctcacctcaaagaggatgacgaaggccaggcggatggccaggaggaaccagaactgctcggagaagttgtaatcggggggattgcggtagtccctgtatctggggtaaggaagtacctgaggtcaggggtcaggagttcagagggcattcttgggggatggggagttccaaacctgcacagagtcacgttttctgagccctcaatcccatcagggtcctggaagtccttggtgtggaagacggacaggctgtggttgacgtagcccttgaggcagctggggagaggggagaggagtgtggggtggggtgggcttccagggcggccccttcaggccccagagtgcttctagcctgcgttgtggagcaaacagtgaggtgggggccacgccacagactgcgtccagtgggacggggctcccgggccaagcacatcttcacatccgggggccttgtggggactgtggggactctgggcatcaccagccactttccctgccagagactggccctggggacccagtctgcagtttggtggctcctcgaggtcagagagctggataaatcagaagaggacatgcggaacctcacatcgggagggagccgttctggcagggcctactcaggaggcagccaggtctgggaacttcacccccaactgcggtcctggccagttatccctgacct

SEQ ID NO: 915516 - DNA, 4001 bp, Homo sapiens
cagcccagggccccaggggcctctcctcactggatgccacagggtcaccctgtttatccaacaggcactgactgtctactcccctccctgctgcagggacacagtggaagtggggatgtggggatcaagcctaagtttctgcaccccagctccctcaggattcctccccgctaaggccccagaggcagtggcagggacagtcctcttagcctgccacctattccctctccatgggtgaagcacagccagaggccccaggtttgactgtttggcagtttcctcgggaaccgatacagcatgaggcacacacccatgggggatggccagggggtccttgaagaagtcctttgcggtggaggacactccaaggaaagtccttgacccaggggaaccacccactgagggtccttaaagcacacacttcccaggaaaccaacccctcacagcaagcccgggaggtcacaccgccagcccagcagaacccctggcatctcctgcagtgcttccgtgaccgccccaagctcagacctcaaagtcctccctccaaaagcagcctcagagccttctggaagtcaagggcagactgccaggatacgagcacagcaagaaagcaggtgccctcccctgcaaaccctcctctgcaccctctccgctgcctgcctctccttgcaccctctcccctgcaccctctccctgcaaaccctcccctgcaccctcttcccgcaccctctcccctgctccctctcccctacgcaccttcccctgcaccctctcctctgcctgcctccccctgcacgctctccactccccaccttcccctgcccaccttcccctgcaccctctcccctgaaccctctcctctgcctgcctccccctgcaccctctcccctccccaccttcccctgcaccctctcttctgcctgcctcctcctgcaccttctctcctccctacctttccctgtactctcgtctgcctaccttcccctgcaccctctcccctccccacctttccctgcaccctctcccctgcacaccttcccctgcactctctcctctgcctaccttcccctgcaccctctccctccccacctttccctgcacaccttcccctgcaccctctcctctgcctaccttcccctgcaccctctcccctccccacctttccctgcaccctctcccctgcacaccttcccctgcaccctctcctctgcctaccttcccctgcaccctctcccctccccacctttccctgcacaccttcccctgcaccctctcccctgcaccctctcctctgcctaccttcccctgcaccctctcccctccccacctttccctgcaccctctcccctgcacacctttccttgtaccccctcccctccctaacttcccctgcaccctctcctctgcccctcctcccctgcacacatcacatacacacagccctctggcccatgtgcacctgcacagagcttcagtctcagcccgtgtgcacacttgcacctcctacacagcacacttcctaccacacacacctcccattaccactgcacacagcttaggctgcagacccctcacacaactgttgagtatatacaacacccattgcaacgcttgtcacagagcctaggaccacaggcaccccacagcacacacactgcacctgacacccacccttggccgctgatgcgacacagcctcctgctgcccctcgctctgtctcacacacacatgcacacacatgcatatgggtcttgggcgccgtgggcctcctctcagccaggccctgacacaggctcactcagagcagcggggaaggcagtcacctggttccagttctttcctccggggggcaaatgttggtcattggtgcgcctttgggagcaaactctccccttcgctgggccccagggagtgtccacagcaccaaggctgctatggatgcatcgccaagcgcggtggggacctggcttgtgtctttgtgtattttgatcagaactttccctgtagcttcctggccttgcagtcacatcctctcctaaccctaaaccccacccaggcacccaccccttccctaggcgggcgggaggacgggcagttggtggttctcaccccgcctgccccggctcttcctgtagctctgagtcaagcggctccttcctctggagcccgccccaacccacccaggcacggcactttcctctgtgcagcgtgtgtgtgtgtgtgtgtgtgtgtgtgtgtgtgtgtgtgtgtgcagtgtgtctgcgtgtgtgcaatgtgtgtgcagtatgtgcgtgtgcgtgcgtttgtgtgtgtgcgtgtgtgttgtggggtggggggtgctcaaaggggcaggttccaggggtaatgcatggggggtcctccagccaggagacccccgccagggccaccctgcacacatacaaggaggaccggggaccgcgcggcatgccttccagacgctactagagctcacactcaggagccaaggggccggtttgctcccccatgtgtctttgacctctgaccccggggaacagggccttcagaaactcccggtcaacaatggggctccagcagaactcttccgccctctccccgtccctctcccagacatagctcccccgatgggtgagcagttacaagggactatggcatcttgtggaccttcccttcaggctggggtgggagggcagcgcccccttttccaaataaggagcaaacacaggtggccgaggctcctggctcagagcagatgaggggcagatggcatctcctgttgtcaccaaactgacactccccaggttgacctgggactggggacccagtgaccggtggctggtattgcccacagaatcagacaagggtctcctttggaccctggccctgccctcagccacatgggggcagggcttcattgtggagggctgccatccagcctcccggccctggctgagcaccctctcagcagcaggctttctacaggtacttgtctgactgagtcccagccctgctaggaccttcctttgtcccggtactcagccttgggtgatggtgggccttgggctcagggtcccaaagacagcaccccttcccccacagagcctggtaccagcccctccttgaagtgggtccttggaagcccctcaagaaggttctccccacactgcaggtcaggaagcaggcacagcagggcccagggcacccccgcaggaagcaggagcagggcctccagcacaggccctggggtcagccgccaactgtgaagccccggctcggcggctgctctgtgcacccggtctcagcgtcaccatctctcagggctggcttggcaccctctccttccctctctctgctaacgtcctgcacccccgagcccccaggtccaccgtccagggtgagcatgaacacccacaaagtctccgaccctcgcccgcacagctcttccgaggcgcccagaatctcagtccaagcctggccctggtcgcctcgcactgcccaccgcactctgctgggcaccttgaggttcttagaaagcgccagctcctcccgccctcagacccagccagcgtcctcggtccgcggccgcccctgcccggtgggttcgacgctcagcacccagcaccctgcgggcgactcccgctcagctcggacgcgccgcccctccgctccccgtgcgcgctgggcccccagcgcctgtcctgaagcaggaacgtgggtaaaaggctgcggccccgcaggccgaggggctctggttcgctcccctaccccgcgcccacctgcgccctgggcgccctccaagtgaggagggcggagaacgaggacgcgcgcgggaggcgggcacgggggtgcggctcggggcgctcggccggggcagaggcgcgcggatggcggaagctccacccggcgccgggcgagctcgggccccagcctgactcttggtccgccctcggcgcctcaggaagcctcgagctgggatccaggcttgggcgaccgaggtggga

SEQ ID NO: 915517 - DNA, 4001 bp, Homo sapiens
cttgctattaatcccagtaagagctgatgagaaaaaaatattaagaactgatggatttggaattcaaccacacgatatactacagttcaaaagttttgtagaacctctctataactcacaatttgtttgtttttagaaagtcattaagcaaggactcataaaacatgcatttaaaatgccttcttttatgtaacttaaagggaaatggcatggcataggccatggctcttcagaggaatggaaccaatttcttcattttaaaaaatgctgggatcagattaagatttaacaatatcactatagtcaagttatcattatcattacaaacaatctaaattgctaactggtaaatctgtgagaagaaaatatctgaccttggtcctgattctaaaagataagtcagatttggactggttcaggaccagcaggggaaggcaaaaagtaaagaagacagaatgacatataccccttccttttggaaacgggattaagcaaaacttctaagtacaactgcaactccaaaaatcactcacgtttgcaagtgcccttcgccttacataagtcattctgaaaagaagtcctactttattctacactcaaactccagtacattcgtactaacaagggaaaaagcagaataggaccaaaactggagggcaaacaaacaggaaaaggatgaaactccaggaggaactacaataaggcagagtagagtacgtcaaaaccactaggttttattctaaagaatggttttgtttctaccgttcttctaaggtatttaatttgcacgtcttaaaatagagaccctgaggagagcagcttgaggcagtggaaggaaggggggcgggttaggtaagaacagagacttgtgagagagtatgtgcggtgcattagaatgtgcaatgaagagggtgcaggattcaccgtcaggaagcagttgagggctttatgagtagaggcagaatctgatatggtttaaagaatgcgtattacagccagaatgcacacctggtacagtgacaaccctagacaagtagaagaccaatccacccaccgtgcaaatgcagagatgaccattttaaccagttctattgtctggggcattaaatggaaatgccccaggcaagagatcaagctagccagacaccaaatcagagacaccctgggccaaaaggaaggagaggagatggacagtggccgtgggggtattcccagccatggggcccttcctcgtcgggcaggggaggggcgccggggtcacgggggccgcacgatcccccatccgcggagcccaagcgcaggcggtcccctcctcgggccggcgacgtctctcacggcgcagcctgggaacaccgagacttcccctcccaccccacccccagccgaaagcagggaagacgcggaacttgggctccggagcggaggccacagaccaggtcacggcccgggtggggggctctgggcgaaattccgggtggccaccgggggtggcgtaggggaaagcaaagccccggctggttgcgtttccagtcggacgacactcgggtccgggtgcccgggcccgatcccttcgctgctcaccgaccccctgcacctcctgggtcctcacagtcccaggcccgctcgcctccgccagtgaggcggcctctcgggtctccccggtcccaccactgcggccgcccctctcggtaagcagctcctctcccgaaccctcgcctcggacgctcccgccgagccccgggccgcacctccgtcttggtgatccggtgccgccccagcttcaccacagcgaagttgcccttgcccagcgtgccctcgatgtcgtagaaccccacccggaccggcccgcgctgcaagtgcctcgggccatccgccatgaccatgctgggccccgctgctagacacggcggacaggagcgcgggcgggcgggagggttggcagcgcggcttggcttgggcgacggccgctccgcttgctccttcgctccttcgctccttccctcccgctccccagggcccagccaggcgcgcgccgccgctgacgtgcgccgacgtcagggggccggggcaggggggcgggggcgggcccgagcctggattggtcaccatggcgaccgaagcaccgccgacgtcggctgctggagagtgggggacggcgcacggggaggggcgcgagcctggccggcgcgctccttccgggctcagacgccctcccctcgcccctccgcctcaccgctgccaggggcggggtcgctgctcggcccgctccgttcctcggccttccaggcgaagggcaagagcgagccctggcggaccgtgcggaggggtgcagagacctggatgcggcctgcgatctccttccccgccccggcgttctccgcccacccggggtccttcccgccaaaacctctcacctacaagtacagcgcgtcctaaatttggcaccggcaaagaactgtggctgagcaatgcgttgctcacaggctcctttctttgtgtccttttctcttctcgttgctatatataataaaaccctccacgttttgatgtctccgaggagtcattctgacagcagtgcagtcgcttatagactcacagaatgtcaatgtcagcgctgaagagatcttggagatcacttaatccagagatttggagcctcatgtgagcttcagagtttggaaccccctaaaacacaggccagtttttgcttatgtgagcatgtctctggggagatggacccgtagcttctgtcagattcccaaacgcgttggtgactctgaaaaagtttagaaatatttctctaatccaatttttttccccaaaggacgaagaagacctcaaggaataaagggaattgcctaggtcacacaggcaatagtcgaggtaggattataaatcacaccacgcttccaaatgtgactcaaggaaacagggacagtgacacctcactattttgagatgtatcatatgcctttatatcttggtttctaaataccattctccacctaaaggagccagactccgtggcgagatggctcattcgagggcagagacagggaaagtataaaatgcccttgaaagatcctgctccttaaagcaaggagatttcttggctatgtcaaggaagatatgtcaaaagaaagcagatggctcgaaggtgctccccccttaccaaatctgagacagtttgagtatcaggaataaataatgggccgggcttagtggcttacgcctgtaatcccagcactttgggaggctgaggcgggtggatcacctgaggtcaggagttcaagactagcctgtgtgaaaccccatctctactaaaaatgcaaaaattagccgggcgtggtagtgggcgcctataatcccagctactcgggaggctgaggcagggagaattgcttgaaccagggaagcagaggttgcagtgagccgagatcgtgccactgcactccagcctgggcgacagagcgagactctgtctcagtaaataaataaataaataaataaatatagaaattgattctaacacattgaattttttaaaagaatcgtagagcatacttacttttaaacagaaaaataaagaggggagaagtgaaatgacggtggaatgccaactaatatatgttagaagaaatgacaattagcaaatcatttggcagccattacagtaataatggattcagacaattatcaatagatgttaaaatcattgaataaaatttggctggggaacaagatatttgcacagtctttggatttcttattcatgataaagggttaacaagggtacctctacagtggagaaatctgaccgacactaccctaaccaaatgatcaaagttaatgtcaccaattatgtgataaaatgacatgatgtgcctccagatgtgaggcactgaggttacaatatctcttaagtagtattcctgtcaaaaatgcatattatgatctagaaacatcagaaagatgcaaactaagaaacattctactcaaca

SEQ ID NO: 915518 - DNA, 4001 bp, Homo sapiens
caaggaacaaggcatattgtttgtaaatgtaagtttgccttggctaatagtcaactagactggaaacacggtgaggggctggggtggcaagtgaggagcacaccaaagtcttggctcaatcgacttcccctgacttcccctcagggtctgagggagccctggactttggtatctcattcagctctgacctgcagactggaggccctgtgataaaaacggacaaaaaggctgaagagggccctccagaggaagtgaaactgaccaatcaattcgccacagccacccaccctgacaccctggtaagaagggccccttgtagcctcaggcagaaagatggtggggaaggaacttcaggttgcaagtgatcaggagagaaggcctagataagtcactggcttcagaaaacaagccactgccaaaaaagcaaaaacaaggtaggtcatgacaaccagaggctaggctgaggaggtgaggggaattgatgtggctttggtaggaggcggcagcagctgtaagggttcttcattcctcaggctgagggaaaacacaagctgcagttctaaacataatgaatgactacattaaaagtattcattcaagtaagatattgagcaaagaaaattttagagtaaaaatgggctttgcgggttccaccaaaaccaaaagattcctcctgatgtcttagattccagtcctcccaacgaaggctacatgaaagtgctaccatatttcctcaaagaattttacatgcatacatatatagcttcctaattgaccttggccaatttcactcctatagcgcctcaaatccctttgagaactaagggctcgatgagtgtaatctcccggtgtctgggttcttcaatcacaagcttccccccaaccagtaaaagcccaccctgggttctacaaagcccacaattcccgaccctccaacaactaaaaataaccagcaatcagctctcccaaattgtttaacccctgactacctagtgccatcataaacctgggacagcccccacccccacctcactcccccattccctgggccccttcctgtggacaagcaaagcaatttcccccttatttccccattttcctcattgcctcctccactaatcgtgtctcctcgggatccccttcgcaccatctatcagtcttagatgatcaaatgcggattcctgtctctgtcttaaggcaccaggatcctgggacctcccagcgccctgcagacgtgcacattcccagtccgtgccccagccgtcctgggtccccttacaagcccgggtctgccacttcacccttgtttttccccatcctccgggtccacatttcatatgcccctgccctcattcccttatgattccctagctgctggttccagagtcttctgggcttacagtctcccggccctcggggagttccgaccccttctttccaatcatcccctttacccgcctgccctcagccccgaggacccctccccgcgcccggctcctgggcgccggtgctctgtgccctcggccccctgcttggagttccgccgtctcgagtcccaggtgtccctagctccgcgcccgccccgccgcggctggctccctcccgcctcccggcccccaacgctcccaccacgcgccgcgctcgccgccccgaccccccggctggggggcgcggacctctcccggccccgccacgctccgactgccgcctggcccctgcgccggtaccttggccttggtgacgaggtgcgtggcccgcttgaccaccgcgaagttgcccttgccgatggtgcggtcgatctcgtagtagccgatacgggcgggcatgggtccgcgggaggccggggctgggggacgcggctggccggccgcaggggacacggcagcgggggcggctggggaccccggcgcgggcggaggcagcaggcggcccgcgggcccggctcccccagtcccggccccggcagccccgccagctccgctcgccgccgccgccgccatcttgttgtgcagtgaaacctccggggccgcggggagccggctcgggggagggggcaagggggggcgggaaagggggggccgcggacgtcactcggggaggcggggcgctttcgccgaccggcgcccggctccatggcaaccgcgggtcacgtgccgacgcgcgtcactgcccggagccatggcaaccgtgacctcaccggcgggctcgaccttcccgcgtgggccccggttcctgaggcgctggctcccgggtgcccccctccgggagctggcggtgggaaccttcgatgggcccccaacctcgaagtctccgccacctttcccgagtggggggcgcaggatgcccgacccaaagccaaccccccaccgccgctcgaatcgccaatgtgacctctgctgtgacctctgtcccagttcaacgatcacccaacctcccttaacaaaaaaaaagtgtttcctcatcaccaaaaataccagcgttgtcccactttagcccttgaggccacaaatgcaggaatagctacactcttgaagcaactgtaaccaagttggtaacaacgcaggggaattcttcggtaaaattccttcctcttacaaaatccagctcaccctgcacagtcaacctaattgtcaccgaatataggagaatggggaaactaggatttgcgtgttcaagggcggacaagccagtccaaacaggcattccagtcattgggtgggtgacagccaaagaaggtacgtcattttccttcctaccacccccatctctgaacaattctacagggatgtctgtcagagtgcctacatactatttctgttgcttgtataaccctgatgaagcagtggtgcgcattgtccaatgaaccacgtcgtgtttaaacaacagtcggttaagcaaaataaataagtaaataataaaaattccatccttcctagtgactctccgaggacattgagggtcatcaagttaataactccagcaatttcatatctctttttcttcccttgcctattacctgcatccttcatagctcccaggcttcctcctcctctctccccttccctttattaaatagattaacttagctgctttaggtgagggttgcaggtaggaaatcagactgtcaacaaaatagtctttggcaggctgggtggaaaggagggaagattgtgaatattccaatgttaaaatgtattcctttggactagtcctgatccatccatatctatgtctctctcaatggtagaactgtattgtgaggtcactgcatgcacagtattaaaaactgacacccagggcactgtaaatgtgtggaaggataactcgtgtttactcgctgaccaaagaacacctcctggtgctccaattccctatccaaccatgagtaatggctgggacttaagatgggacagaggggtcatcccacaatggtcttggatctattccctggtagctgttccaaactgccaacacaattaacactaattggctcccttattagcaactaaagataagaatgaagtgggccttggcttcttgcattggttaagccctttcatcagctgagctcattccatcccagataaatgatggggtgtgacctgcctctcctatcacttcatggctctcagctgcctctagcagggactataactttggtgctgggcttcacagctgcagtttttgggtttttgtttttttttttagacagagtctcactctgtcacccaggctggagtgcagtggtgcaatctcagctcaccacaacctccacctcccaggttcaagccattctcctgcctcagcctcccgagtagctgagactacaggcgcacaccaccatgcccggctaattttgtatttttagtagagacggggtttcgatatgttggccagactggtctcgaactcctgacctcgtgatccccccgcctcagcctcccaaagtgctgggattacaggcgtgagccaccgtgcccagctacagctgcagttttacc

SEQ ID NO: 915519 - DNA, 4001 bp, Homo sapiens
caactcaccttcttgcaggctactgtgcccaggcttgggggcaagaggagtcacaatgacagggacccatagggacctctgcctacctggtctcactgatgcagacagggaggtctgaaccccatgtgacagatggtcagatgaggtccagaggagatgctcttgcctgaagcaattccgtgtcagagctaggatgtgagcctgggtctgcccatctccaggccctaagcagggctgcacctgcccactgctgtctgtgtgcgtaggttttggggggtgggtgttgggctgaggttcaaggtctcacaggatgcaagattgagacacccaaagccccagggacctgctaagtgcggaaacgtgacgccagaggcaggtgcaaatggtggtgtgagaacttgagggaagccacacccaggcaagccctggatggagtaggcagtgaggacagggagctggggaacctccactgggggtacaggcatctaatggtgggtcttcatgcagcatccagcaacatcatgcggggctgggccggaggggggtggaggaggggctccacacacccttcgtctggggcctccagaaccaagcaagagtcggctccccagcccaggtgcttctaccttgatttctcctgaataaactcccatgctgaccttgagcctctgttttctcatctctaaaatggggttaactggccgggtgcggtggctgtggcctgtaatcccagcactttgggaggccaaggcggggggatcacctgaggtcaggagttcaagaccagcctagctaacatggtgaaaccctgtctctactaaaaacataaaaattagccgggtgtggtggtgcgcacctgtagtcccagccactcaggaggctgaggcaggagaatcgcttaaacctgggaggcagaggttgcagtgagccgagatcgcgccactgaactccagcctgcgggacagagtgagactgtctccaaaaaaacaaagaaaaaaattgggtttaattatttctgtcccctcccaaggctgctgagagactgagaagaatgaggtgagtgtcgctagctatgtgtgtgtgtgacgggtgtagcccctggctccatgagccaagctctgggcacattcagcgctcgggcctgggctatagtgtgtgaaggagtaggagggcatgagggagggggtctgtgcaagccccgctccttgtgggctgagctctgcacgcttggaagtgagatctgtgcatgtgtgcacccagcctgtgcgctgcctcttgctgtggcccagtgccaggctctggcgctgccttgaggggtgttctcgggctctgccccccaccctgaagcttcacacagggtccattgaggctaggacattcctccgggcctgtgtcactaggggtggggggaaagggccggccccgcccccacagatccggaaggcctggctgccccaggaggaggagctggccacttcccagcacatctggaggtcatgaccccatttcggctgccagggggcgcgacagatgtttcctcccaggccaggccagggactggggtggaggccgcctaagaagaagaggagcctcagaataagggggagccccgcacacacttgcagtgttgagggggagggggtcacagtgccgccaccaggagtcaggagccgccgcttccactcaccggctggctggccaggctaagccgtcacacagagagagtaggaacggctggtcagagacagggggctggacatattgactcgggactgagctggagcccggagggaagttgggagggtgctggcggcgaacgtggcgaggaccccactcccatacacatcacccgggcccacggctaggccacctctcccctgtcgggcccgacagtagtgcctcccgtcccctgctcccgccagtacctctggggctcccgcccagccgccgccgcccgcgctggggtcccgctgccgctctcccgctaccgctcccggcgccggctccgcctgggggcggggccatgctgggaggcggggccatgccgggaggcggggccggccgggagctgtctgcggcgggaagcgcagcagcggggattccaggcctggcggaggtcagcaccgagcagtgctcattctaaggccatttcctctcctgagaaacttgtgcctgccttccagaccaaccgggagggctagcggaggccacctagcgtccagctcccggccagcaggtgctcaagagtctgccactattttatggagcacttgctaagcactgggccctgggcaaccattccactagcgcgctctcatttattctaaaaacaccttagataggtgtcatctctttacgccctggagcagctgaggtgcagagaaaggctttggccaagaacaagcctgataaatgtaggagccaccagacctggaagtctgaccatatggtgggaaatggcagacaatacccttcagataaaggcttgaaaagggagcagccatgcggtgaagaggacccggttctacctgaaccccaccttggtctgcccttgatctctactagacttcagccccacatccttcacccctctgcgtgcttgtccatcccaacttagccgcctgtactatcatgtacccattcccaggtagaaaaagaaactgccaaccaaaatcaaaaatagtgttattaattctgatgtctccgaagcacaaaaaaaaaaaaaaaaaagaaaagaaaaaaaaggaaagaaagaaaccacccttcccacaattcaggccccaggtccaggccaagggggccacacctgcaggcagtgcaggcccaggggctgaggtggtcctggccacaggctccaagtgggaccagcccatggtttggctcttagggcctggctgggaggctgactgcctccatctggggagcccaggccctggactggggatgagagagatcaggggtcaaggtcagaggtctgggtcactcagttttggtactctggccaaggcagccaaaggtcagggttcagacatgtaggccaaagccactcagttctgtggtccagcagagaggcagcagagcaggtccgttactgaatcctaggaggtggtccagtgggcgccaggtagctcagtactggtgttccagcaggggctgggctgccgggctctcacgctcctcaataggggcaggccagtcgcccagggcacccataggtgtgccactctcaggggcactgctgtccaagcaaggaatgtcctgggaagctctggggggtgaggcctcagtgctgacatcggggctgaggctgaggctgaggctgaggctgaggtctagaggcgcctgggggaggggggagaggttggcgggtgagcaggccttagccttctgggacccaaccctcccacaggtgccttacctgagatttgggggtacctcctttggggctccctgaggctggctccccgtcagatcctcccagccccttccggccccccaggctccactttccactggggccctcagaactgaggagacccgggccagggggccgtgaggtccggggaccctctgtggggataggcgatgcagggggtggtccagggagccgagggggaggccactgcagcagaggtgggggccgcccatcaccagagccactcagggaggaccgcggcccccagccagggcctggtgggaggggttggtcaccattgcctgtaggagacagataagacagcagaggcctcagctgggctgcactcctcacccacgggttcagcccagcctcgcctgctcacctgccgtgttctcaggtgtggggtgtgccacgggggggttattgctgagggaggtcaggccaccgcccccactacagtctgaatcatccacgttcccgccactattgcagccggcgccacagcccttgtgaagcctgggggtggagaggtagaaaagggatcaggagggacacggctgaggccagaggcctcacaagcatg

SEQ ID NO: 915520 - DNA, 4001 bp, Homo sapiens
cccgcccctctgtagccccgagctcaatatcttgatctcaaccctgacccagaggtggacccagacccagacctagacccacgcggccagctcccaggcctaaatcctgccttggctccacccaccacgccctcattctcccttctatgtcctggagccctctctccgcagtgctggtgcgaacaaggttcacggatgcagggatttgaggcctgagttttcaccccacagaaaagcccatagggaatctctccccagcctggcaggttgaaccagatggaggatgaaccaatacggaggcagagggaccagccctggctgggggtgaggagccagggattagccttaagaaggtggttgaaagtaggtccaggaggaccccagctcagctcttgagccctcccagggccagggactttacaggaaatggacagttcatgagccctactgtgtgcactgcaggtgacagggacctcttcttcagcccccctcctccactccctggaactgcctttcctcacctttgccatagaagtatttgcggtagtagccagcacccaggtctgcgtgctccaggctgtaggccgaggttcggttctgtggctcctccaggatggacacggccgcgttgggcagtgcagggggcacaggtggggatgctggtccacccaggcctagctcaccctcacccccgagctcacacacaaagccaggtgccccatgcagcaggtccgagctggcagcctggtcctcggctgaagccagggtcccagagctggcctctgagtggctccccatcccctgagacctcggagcccaatcaaagagcaggctttgcacgtcatagtgggcaaaccatcgaggctcaagcactggtgggaaggcaggctctggttcctctgctggcagccccagcagtgccagcgggtcagtgaagagccgggtggaagtggctgcaggtcggctggcctcttcgtggctgtgggcacgggcacgggggctggctggcgtggggggcctggcctcgcctgcatcgctgccgctgcgcaggagtgggccccggactggcctcggctcgaaggtgtgcggtgtcagcgggggccttgctggctggcgcagcttgcgggcaaagaggtcatctgtggacgcaggggccatgccccgccgagggctccccacaccgccggcccacatgggcatgctctgtgggcctgactctccgggggctgggccgcattggcgggcacgggtgtttggtgcccagcctgaggttgtggcagcagttcctgccctgaaggaggagggggctgctcagaggggcctgggcagaaaacaggaacccaggcccccagcctggtcctccaccacccgtgttggcttccggccccctccgagaccatcaaagctgcttccgctttccaggccacttccttgtctgcctagggctaaagtttccagccccctccccagcttagctgggcaaggctagaggctgggctgttgggtcttggtcctgagggtcctggagcctgggcagccctgggactgccagggtcccccagtcgccacccacacaccttagctttggcctgggcccagagtaagggtcccaccaggacctagcccaaccggacagatgacttgtattggctgggacgggaaacccaggggccactggtgtctgggtcctgcccacttaacaaagggaggacgtcctgtccccagagaccttcctccttgcccctcccacttccttcagggtccctggagagctgatcacccagagaggtctgatctcagtgccctggacctcaaggcctcaataccacaaggacacatgggttcccagggaggcagcggcagggcagcaggaatggcaagaggacttccttcagcacaggaagtagccccaactgtgggcccagccctctgccaggcccccacatcctgaggaaggtgctggggtcacagcagctgtcatgggaccccagtcaccctgccctgaaggacaggccaactcaccttcttgcaggctactgtgcccaggcttgggggcaagaggagtcacaatgacagggacccatagggacctctgcctacctggtctcactgatgcagacagggaggtctgaaccccatgtgacagatggtcagatgaggtccagaggagatgctcttgcctgaagcaattccgtgtcagagctaggatgtgagcctgggtctgcccatctccaggccctaagcagggctgcacctgcccactgctgtctgtgtgcgtaggttttggggggtgggtgttgggctgaggttcaaggtctcacaggatgcaagattgagacacccaaagccccagggacctgctaagtgcggaaacgtgacgccagaggcaggtgcaaatggtggtgtgagaacttgagggaagccacacccaggcaagccctggatggagtaggcagtgaggacagggagctggggaacctccactgggggtacaggcatctaatggtgggtcttcatgcagcatccagcaacatcatgcggggctgggccggaggggggtggaggaggggctccacacacccttcgtctggggcctccagaaccaagcaagagtcggctccccagcccaggtgcttctaccttgatttctcctgaataaactcccatgctgaccttgagcctctgttttctcatctctaaaatggggttaactggccgggtgcggtggctgtggcctgtaatcccagcactttgggaggccaaggcggggggatcacctgaggtcaggagttcaagaccagcctagctaacatggtgaaaccctgtctctactaaaaacataaaaattagccgggtgtggtggtgcgcacctgtagtcccagccactcaggaggctgaggcaggagaatcgcttaaacctgggaggcagaggttgcagtgagccgagatcgcgccactgaactccagcctgcgggacagagtgagactgtctccaaaaaaacaaagaaaaaaattgggtttaattatttctgtcccctcccaaggctgctgagagactgagaagaatgaggtgagtgtcgctagctatgtgtgtgtgtgacgggtgtagcccctggctccatgagccaagctctgggcacattcagcgctcgggcctgggctatagtgtgtgaaggagtaggagggcatgagggagggggtctgtgcaagccccgctccttgtgggctgagctctgcacgcttggaagtgagatctgtgcatgtgtgcacccagcctgtgcgctgcctcttgctgtggcccagtgccaggctctggcgctgccttgaggggtgttctcgggctctgccccccaccctgaagcttcacacagggtccattgaggctaggacattcctccgggcctgtgtcactaggggtggggggaaagggccggccccgcccccacagatccggaaggcctggctgccccaggaggaggagctggccacttcccagcacatctggaggtcatgaccccatttcggctgccagggggcgcgacagatgtttcctcccaggccaggccagggactggggtggaggccgcctaagaagaagaggagcctcagaataagggggagccccgcacacacttgcagtgttgagggggagggggtcacagtgccgccaccaggagtcaggagccgccgcttccactcaccggctggctggccaggctaagccgtcacacagagagagtaggaacggctggtcagagacagggggctggacatattgactcgggactgagctggagcccggagggaagttgggagggtgctggcggcgaacgtggcgaggaccccactcccatacacatcacccgggcccacggctaggccacctctcccctgtcgggcccgacagtagtgcctcccgtcccctgctcccgccagtacctctggggctcccgcccagccgccgccgcccgcgctggggtcccgctgccgctctcccgcta

SEQ ID NO: 915521 - DNA, 4001 bp, Homo sapiens
agccctatgcctcctgctttagggccagtggtagcaaggatttttgttttgttttgttttgttttgttttgagacggagtctcgctctgttgcccaggctggagtgcagtgtcgcgatctcggctcactgcaagctccgcctcccaggttcacgccattctcctgcctcagcctcccgagtagctgggactacaggcacccgccaccacgcctggctaatttccttgtatttttagtaaagacggggtttcactgtgttagccaggatggtctcgatctcctgacctcgtgatccgcccgtctcggccttccaaagtgctggaattacaggcgtgagccaccgcgcccggccgcaaggatttgttttaacagttttgcagagtatcacagatattagaatgcgctccacgtgtttgtaggtcctggtccctgctccatccatagcacctagaacagagtctggcacagaataagagctcagtcagggcttcttggatgaacgactgactcttcgggatctttgtttttttttgagacggagtttttgctctttcgcccgggctggagtgcaatggtgccatctcggctcactgcaacctctgccttccgggttcaagtgattctcctgcctccgcctcctgagtagctaggattacaggcgcccgccaccacgcccggctaatttttgtaatttcagtagaaatggggtttcaccatgttggcccagctggtctcgaactcctgacctcgttatccacccgtctcatcctcccaaagtgctgggattacaggcgtgagctaccgcgcccggccaactcttcaggatctattaaacttttttcttttttttttcccacaggtagataagagtcttgctctgtcacccaggctggagtgcagtggctcaatcatagctcactgcagccttgaactcctggactcaagggatcctcttgccttagtctcaggagtaactgggacaacaggcttgcgccaccatgcccggctaatttttaaatttttggtagagatgggggtctcgttatgttgcccaggctgctcttgaactcctggcctcgagcgatccccgtctcagcctccgaaagtgctggtattacaagtgtgagctaccacttcgagactcacttttcaccaacattttcagcagttgtgtcagacagcaagtcaatgtgccattatttacttaaatattcatccattatagggcatctgatacctaacaaccatggaccttaagattttttcctatgtagcctcagttcttagatgcaattactatggagacgggtacgatcacatgccagtgggagtattaaccgcacaacatttatgagggatcattaaagcgttaaatgcatatacttttggacctagcaatcccagtactaggaatttatgcaaacagtgaggtgccaacaaggttattcaccacagcatgatgcacaataactaaaggttagaacgtatttcaatgagggaatggtgaaataaacgacaaaacccccataagtgacgtccacagatcagcataaagacggaggccccggtgttggaacgcacgtaaactcccagacatgccgcaaaggaaacacggcaaggtgagaaagagtgggcgaggtgtcgacaacgaacacgcaagaagtgcttgtccttgcccaaaatacctcgaaaagaagaaactgggagctgctgccctcggctgcctccggaatgccctgggcacctcgggtctgggaggcctctgcaaggggcgcgccgggtccaagggctcaccgcgggccccatggctgcctctcagccccgcactcacatcgtccctgccgccaagcaccagccgacagccgcaggcctgaaacggccccacgcctcccccggcctcgacccgttcaactacccggccccacagccggagggctgccgcggcgcgccaaccccagaacgccatgttccgcgcagtccaaggagtcctccggactcgccccgcccccggcgccccggccccgcctccgcctcccacccccgcccccggcgccccagccccgcctccgcctaccgcccccgcccccggcgccccggtcccgcctccgcgccccgcccccgcctccttgccgacgcctccggcgcgcccaggtagacgtagaggcgagtagaggaagttccctagtctggtgtctcatctctcgccccggaggtcaaacctggagccagcatttctgtaccctgcgctcacacctttttcaacccggatggcggtgatagttaatactttctgagcgcttttactatggtcaggcattatatttacacctaatcctcgcaaaacactactgggaagatcctcatttgacaggagcaattccgggtcacaaaggctgacaccacaaagctagtccgtagcgggttcgaccacaggcgcccacactctttgacgcctcaatggcacagccaagtgcgcgggaagtgggctgcaaacgccggagagttttgtccggagcgcagagacgcgctgtaaccgagcaaccagcggggcccgcccccggcctgctacggcgctcccagcctgccccgcgccgctcggcgccggaagtgagtgagcatttccggcagccatccccgcggtgctgacatcccggttgttcttctgtgccgggggtcttcctgctgtcatgaaggacgtaccgggcttcctacagcagagccagaactccgggcccgggcagcccgctgtgtggcaccgtctggaggagctctacacgaagaagtgagcgccgagcagacgggccctgggccccggcgatagagggagacggagggggcaggcgggcggaggagcggacccttgatgggctgagggcgcccagacccaagttggggggaaacggggacgtgtagcgaccggctgtgccggcaaggtttgctgaggaaccttgagtggcagggtcgaggaataagagggatgacagaccacgagggccaagagctgtagccaggatgtttcggtctgagattcactgcttccttaacgggggactgagactgaggcttctgaactcctacctcgggtcttactaaaacggttcaggagtagcctttgattttagctcttgattccatctaacaagcaaacacactttcagggccaccacccactttgggaaacatgttggtgattcgtgcttagccttgtcatagtgtaactgtatctacagttatctttctcatggtctggagttgataaaccagaggctagtacagctttgctgttttccctattcattctgcagctggttgcacggggtgcaaccacttccgccgtcccattgtctttaccttccattgtatttctcatgggctttctgcccctagaaagatcttaaagtttaggtttgtttagaaacaggatgaattgcagagcaattaaattcttgctaagcactaacctccttttaatatgagtagaataaattgctggcattgggctggagctattccatagaaaatacatctcctgtagtaacctccctgttaaccctagcatttaatataatacctttcacatagatgttccatacatgttttgatgatgtttagcattcagcagccttctgctattagcagtttttgagagcaaattaatgtttggcaaataatggtttgtgttggatagcacttggtaattttcaaagcattttatctgcgttattaaatattagcctttgggttttggatgaagcgctatgtcactgtccctgaggttttaaatattagcttatttaatcctttattcatccttttcacagaggaggaaactgaagctcattttaattgccttccctgagatactcagctaataggtagaagagccagcatctcaagttagatatgtatgattccaaagttctcgtttccagtgaaacctcacaataaccctttgagttaatctagattaatgttctccatttcatacctgggaaaactga

SEQ ID NO: 915522 - DNA, 4001 bp, Homo sapiens
caattagtccagtggcctgatcataccactgtgacaatctttttccagtttcctttcgttgacacctcgtctttccacatggctgcagtcctatctgtatgcagtcctgcctcctgcttttgctcatttacaccatatgtggttattttaataatattacattttagtctaaattattgtctaatatcccactgggaacagctatcaaaatatagccgtgttgttgggcatttactcattcatttagcaaatacttattaaatttcttctacgtgccatgctctgttcaagggggaacggagaaaggctcagaggttgagctaagggagaagaccaggcagcccattcaggatataaatgagttcttgcccatgtggctccagctagtgaaaggcagagctgggatctgagcaagtcggcctgacagcctctagcactgctggtaggaagaagctggcttgctcctgccctgcccgcacatccccataacacacagagaggaggttcatggtgggacctggagtccagctgcctttactcggctcctcgaccctccatgtcaccttgggcaagttgattaatgccatgaaacctctcagtgtctttctctgtaaaatgggcataataattcctacttcctgggtggtgaagagtattaaatcagttaaacagtgaaagtgcttagcatagggcctgcaagtagctcaaaaaagaccaacctgcctggcgtggtggctcatgcctgtaatcccagcactttgggaggcctaggcaggtggatcacctgaggtcaggagttcaagaccaacatggtgaaaccccacctctacttaaaaaaaaaaaaaaattacaaaaattagttgggcgtggtggcaggcccctgtaatcccagctactctggaggctaaggagggataatcgcttgaacccgggaggctgaggttgcagtgcgctgagatcgcgccattgcactgcagcctgggcgacagagtgaaactccgtctcaaaaaataaaacaaacaaaaaaacaaccatggttattcccactgcggttgccatcggttttgcaagggctagcccccctcttctttcaaatcaggaaactagtgcaggcaggggacctggtttgtcccaggtcacgctgggggccagccctccttccctccacacccgccggagtatgccggggcaggcctcctgccactcacctggtcggcaccgaaggaggtgaggttgctccggacggagctggcggccaggccgagtagcagcaggcccgcgtagaggacgggcgcgcagtaggggctgggcgaggagcgcgggcagccggccgaggggcaggcaggtcccagcggcgacgcgggcatctctccgcagaaggagctgcggccgtcggggaaggcggtggcgggcagcaggcccgaggcggccaggtagagcagcaggctgagcgcgaccgcgcggtagcggcccaggtacacgtcggccagccagccgcccacgggcgccagcaggtaggaggcgcccaggaataccagcgcggcgcgcgtcgcctgctcgccggtccagttgaagttggtgctgttgaggtacagcacgaggttggcggtgacgccgaagaaggcggcgcgctccagcatctccaccagcagcacggccgcgcccgccgcccgccgccaccgtcgagggccccgcgcaccgcgaggcagcagcggctggcgctccccgggcacgcggggctgctcccgggcgcgcggcgcgggcatcctggctccgggctgggccccccgcggctcttctctcctctcctctccccgcctcagagccctgcactcctgcccccgggcctcggccctctcccccacccaactggctggccctcctttctcaccgctttggcccacccttccctcctgtcccctctccctttcttgccctacccttcctgtccctccgctcactacccggactctaccacctcctccctaattctcaactcccctctcccttcccccacccctaaggcttcctccccgcgcctctcctgcagctgtttctccctaactctcccctctcctccctccaccttgacccttcctcgcactcttgttcacactgcgaccctccctgcttcacttcgctgcccctccgcctccctttcccctccccgtttgtcgccccttcctgttgtcccctctccttatgactcctggcctgccctgggcgtggggtgggggctccctctgccccagtcaccctgctgccccttgccgtcttctccacctcctccctgtccccctcacccccactgcctacactcccctctcagtcccctgcagccctccccccaggctcagcctctgtccctctctcggcttcttgagaaactctgggctcccctcgcttcccctttcacaggccctatccgcagtcccctgcctgcatcacatggcgctactgggtgtttaggagaagtgaaagcctgggtcacagggctcctgcccggtcagctttctaaaaacctccctccttctctacctctgcctcctaccccaaacccccgctgctggcctccttagagccaaaaaattccaggaggaattttttctttcagtttcatttctcgccaggattccacttttgctttaccctcttccaatcaaactccacgcctccacccgaggcgccacgggtagaaagaagtggaaaggctacctgcatcatttggtcacactcagccatttcacagatgcagagacagacccagtggggctagggcaggaaggtggagaaagattggttcctggtaactgaactaggggtgaagccctgccccgggctcctgagtggcagggaaattcacagcgcaattcggattgcacagaggctgctgtgaggaaggaagtggggcactttcaacaagcctgcgggccatagaggaccacaagtgagtcgggattgagagggacaccgacctcagactaaatcagagtcagcctcagaactcctaagcaccagccccaccctgacctaggagcccgggggatctggcctctgctctcctctgatctcatctcagccccatgttcactcaagtccagccagccggcctcccaggttccccttccatgctaagctcctccctgcctcagggcctttgtctttgctgacccctctgccataactgctctccctccatatccttgcatggctggctgcttctctttattgaggtttcagcatatatgtctcctttgtagggaccttccctgattttcccatctaagtagtttcctactggattctcagcatcccccatcacattgtcttgttttaatgtcttcagagcacatattacttgttcagttagcaccagtagaataggccctccatcagatcagagaccttttctaactcttcactgttttattctcaatggcttcccagtgcttggcaaatagtaggtgctcaataagtattgcctgaatcaatgaatggaaagagtgtcccaaggcaaaatttgtaagaataataatatcaggaaagctaaagctaaataaactgagtctcacaaaagctatagataccagcaaaaaaagcactatagataccagcaaaaaagcgagggattttttgttgttgttgtttgtttgtatgtttgttttgagacgaagtctcactctgtcgcccaggctgccatgcagtggcacaatctcggctcactgcaacctccacttcctgagttcaagcaattctcctgcctcagccttctgagtagctgggattacaagcgcgtgccatcacgcctggctaatttttgtattttcagtagagatgggatttcaccatgttggtcaggctagtctcaaactcctgacctcatgatccacctgcttcggcctcccaaagtcctgggattacagttgtgggccactgtaagtttttaacatgttagagaagccaggccaagaggatggtgagaaagcaaagccctccatccc

SEQ ID NO: 915523 - DNA, 4001 bp, Homo sapiens
catagcttggaatactgctgtcaagaagtttgaggccacccgaagaaaaatgtcaggcttccgaattctataacgtagcacctggagaataagtcataaaggtatttgtggctaggttaatgtttattcttaaagtccgatcacaatgttagaaaacattgcaatttatttttactgggagaaaaaaattcagccaatgcggtttttttttttcatttcctgcatttgcttcgtgtgctcaaatatacgaagttgagctctgcaccggatggcagttgtactgggaaagaacatccctttccatggtagctgtgggactgcagggcccttgcggtatctactgccgcataggtgcataatcgtgcctacatgaagcccgccaaacctgaagagatttggaaaatctgggagtggtttgatcattttctttacatttctcatgcatttacagagacttcaatttcccaaatattaaaattagtgctcctttgtaattctttttccttttatgtctgccctgtcgtcttgattttgctctaattattaagaaaagctgtatccatataacatacttgaaatgatttaaagttttgcaaattacagcataattagtatagtgactacaggaggattaaataattaaatcatttctaggactttcaaagtaatgttgcttgttatatttatggctgttcttccaggcattgacatttcctatgcaagaaatagactctaggagatgaaaataattaaaaatgcatatacattgtttcaggctcagagaaaggaattgcttcaactatcaattattgatatattttgattcttcttcattcaatacagaagacatatttcactaggggattctctactatgcttttgaagctgagacctctctctttctctctctctctaacatatatatatatatatatatataaaacatatatatataacatatatatataactatatataacatatatatataacatatatatataacatatatatataacatatatatataacatatatatataacatatatatatatataaaccattactctttggaatttcttggttatttttttagatggttgtgttttatattcatttgtctgcatcaaaggaatttaattcggggtatctataagcaccaaaagaaacgctgtttgagcaggggctggccatttcttaactgtaaagaagataaatcctgtgtagtaaaggacaaaaactctgcaggcaccaaagcaaaaatcaaacacacacacacacacacacacacacacacacacacacaccagacaggttcatttagtgcaacattcctgcattaataagcaggtttccagagcacccccgctccaagcaatgggcaacaaaaagactttccgatcatattacaatctttctgagccaccagggtttacggaaacggccctgcagattttttcatgctgagccccaggtaagcaagtgttcgctttgtcttacctgtagatctggccgagtgattttccagcaaaattctttagcccctcttttcctggggccaaaatcctttgttttacggattccattcttgcaaagactgttgtcagttcttgccagatttaaatagtgattgctaggaaaggcgaggattgcgcatattgtcttaatctcttaaagtagttgcgggcttttccttctcagcagaatggtagtggctcgcctccagcaagagtgagagtgagagaagggagggagagtgagaatgagaatacaacagaatagctgcatgcaacccacgggtttcctaataggagagttggtagacacaatcagaaagtctcattggaaggggaggatccggtggcaaagagcgcaagcagtgccacggtatttgggtagatgcggttgagtccttttcctggaagtcggtcagctgaaaaacaatgtaaattcccggttttgaagacttattgctctcaaatctgatggcttttaaacggaggggccggaatatcacagaagccttgggaacagcaaagtcaaaagaatggtacttttaaaaatggtgtctttgctgtaaggagcagagcatattcaaaactcatgggagcatctcaggtctcaggtgagcaatgctgctattagtttttcctctctgcccatgatctcctcccatcacgccagcgtaagtctgctctgcggtagagtcaaattaagatggagaaggcttgctgctctttgaggacgtgagtaaataaaagatacacagttctgatttgggcagcctcggggaagattttttttttcagcggctgacagcgcccgtctgggcgggtctcggtacaatgtttcagcaccacggacagagtaagtttcaggaataggggactcttcttttggctagctaggttgccaactttctaggggagctgggcggatcgccctgaccaaggaccatacgggggctcttcaggaacggatgctatggaaaccattgggaagatgtcatcatctccagagtttgcagggagaatggtgcatttagctctgctagggaagacaactttattaaaaattcacaagttacttctagtttgctacgttttgtccagcacgctgatgccagtattgcagggaagaaagatttcaacatatttaacttatgcttgtggtgttccaagacacctaggctcccttgaatataaaatatgtgcacacaaaatacataattacattgttcatgtgtttgttttaactcctgacaggaaaaagatgaaagaaagaaagggagagaatgaagaatagaggaaaggagagataaagaaaaagaggtgggaggtatggagagaagaaaaaagaatagctataaactcagtgaagttgattaaataaaatacagttaatttaatataaattccttggaattttaagcatctttatttaactaatttacaatacactactgaaataccaatatactgatgaaatatgtggctataccttgtgcttgccaacaaattgtaattgataatttaaagatttatttttaaaaagatttattttaatttacatatattccattcaaatcttattttatttttctttgtatgtccttctcctaaagcataaattttgaaagacattcatgtaagagttttggctttatatatacaggtacagcatcaatgaatttatctcattaagcaagcaagaaaactgctagattaatgtaaattattaatctctttcacatgaatcacaaacttcttaagtacaattcaggccaatgcttacagaacagactggccttgaaccacattttcaaggtcaaaaccttggatgtcacataagccaacagagggagtcaattttacttaggatcctgagacaaaatctcaaaaatatggatctaaattgagaatcaaataagaatattacctgaatagttcaaatgatataatggctatgtattcactgaatggatagctggaaaaaaatgtcaaagtagctaaaaccatctgccattattaagtttgatagttgtcaaattatttccattgtgaaatataataaagaaaaggataatgaagacatttttatcttttttgataaatttgtgttaaaatatgtatcttcaataaaacagtgaatttaatttttctctaaaaccatgggatgcctcagaatactatctatttctcaagatcaagtataaggagacaaaaaaaaaaccctcattaaactatttccttgcaaaaaaaaaaagaaaagaaaaagattaaaagattcaagctattcaggacttgacttatctaggtgttttcaaaatatctgtatttttcaaatctttaataactaagttcattaaattatatttatttagagatattaatgattttggaattctgggaagttatacaaaaaaatagaatttacaacaaatatttgtgaagctggggtgatgatatgtaaatgattttcctaagcactccagcttaa

SEQ ID NO: 915524 - DNA, 4001 bp, Homo sapiens
caggttctacgaagcccaaaaagttttctgggagatactggtccaaggactctgtggacctttcctttgatgtgtgagtattcaaagaatccttttgccccctgcagccccttctgtctcttgctaaagacaattgtctttagttatcactgcgagggagctttccccatgccagctggaatcttgggaggcaggacacgactccagatcctcgggctgaatagggaagccaatgctatccctgcccgctggagtctggcgactcctgcccttgtcccaaaccacacgttttcccgcctcccgggaagcacccaaatctcttccacccttccttagagctagccagggagattccgccttccagggacaaggaccgatcggagcgggcccagcatctccatggcgactctgcaaacctggcgttcaaggccgcgcgcgctggtccttgccccgccccagggccctgtcttggctcattccttccgagccggcaccacctgcaagcccgcctcgggcctggggcgccgcgctccaggcgctgctaccccggtgtctgctcacactatgcccaatcccctattgttttgaaatcccaaaagtaacctcaagaggatttcttcctcacactctcaggcccccagcgcaccttaccctttttatcaaaataaaacaaccctccacctctcgcattttcaaaggattaagcagcaatctccaggaaagaaaatcaatcccctccccaccatcccatccccagccaagctacggctccgccaccacctccgaggcccgccgccgccgcctctctatccgcatcccggataggggcgccaccaccccgcgcgtgaccccgctttcccgcgggtacagataaaaatcccctcacccttccgtagatgccatggtctggggaacgccccctcctcttcagcactatccggcagctgtgggcgagggagaaagcggacgccggggtgagcgcgaagtgcggccgggagcggtatttaagaggagcctctgcccgcccttccacccgcctccggggtaagccctttagcgcctcaacgggcgcaggaggctcctgcgggcgctaatccgcgtcccggctctccacggcgcgcgacccgcgctcccctccgcccgcggggatggcgcttggcggggagctccgggggctccgagggtggcttccccgagagagcgatgcgcccagggctgcaggagggcgcacgccggcgatgcgcccctgcagccgctgccacctgtgctttgctgcggggctcgcgggcgcggcgagtggcgggagcagagagtggtggcagaggacggtgagcgtgcgtgcgcgtgtgcgggtgtgtgcgcgcctggggaggcggtggaggccgctgcgctctggctcggcgccggccagggagggattgcaaggtttagccccgccggagctggggatttgcaggcgatccctctctattttcgtcgagagctgacatcacccgcgccgccgcctcgggcaactcctttaaccgccgccccccgcccccatctccagtcgcggtccctcctctgccatccctccccccagcctctcgccataaattagccaaataagaaaagaggccccgccgctcgtccgggaaggcttgggcagccggtggcaggagcccaggatctaaggagtagctattgtttcccctgaagcccgcgtggccccaggtcaccccgtgcggggtgaagcgcaggcgaccgcgcggagacccgggatgcccctccgtctccgcctccctggagcagcccctggcgctccctcctcactccccggagcacccgcttcagctcacactcacccccaaactcacaggcaggcacacccaccccatcctcccacgtctgggggtcccaggtccagcggagtcgagcggctgaaacacgcgggtggtgcagcctaaacgcggcccagctgcgctccctcccccgccgaagctcgaataaatctctggccttcaattattcagcgagattaatattaatgcagctccctgggggcggcgggcggggtgcaggggaggccgggattttttttttttttttttaggccgagagaggtcggcctcgtgggtgccggctgagaaggcgcggagagttggccgaggggtgagtggcgggggacggttctccacccactcggcgctgctcgccgcctgcttccgtgtcccgggggcggcgcacagagacagatgggcttgtgcaagggagagttcgagccttccggacgcctttgcataaaaatgacgagacctgtgcagctttgattatctctggaatactgcaggaacctagggtcccactacttgccgaccctgtgagcgcagagcaggcaaagcctcactttcctcgtctaggcaatggaacccaaaagaactcacttggagggccacaggagaattaaacagactctctttttccccggggtagacgatcttcggatttgcgctgtgctggaccttgttagacgatggaacgcgaccggccacgtgcaaactctctgagtaggtcccggggatggtgccagaggagccggagtcccagcaggaccgattggtagttaaatgccaggcgctgatatccgaaggcttgagttcttcaccaccttctagctgagtaacctggggcaaattcctccatctctctcttcatcccacctgtaaaatgggactatcttctcccacttctctgtgctaagagaactaaatgaaatggagaggatatgtaaaactcctaaagtggcgtctggcacccagtaaaccctccaaaaatattcagtgcattttcagagtccttagaagatagtttattggacaaaatatccaagtatgaacagacagatgagaaaaataacaagaaaaagaggggaaaacacattaataaaatttaaaaaataaatctctgcttacctccttcctttactctcctttccaaaatctgaatccaaacgtcatcttccatccatgcctttctccatctctcccctccccccttctctctcaatcctgtctgcaccattagaataatcatgtctgtaccttattcatcctaggttccttcagaaccactctaactttgcattttctttatttaaaaaaaaatgccataagcatctcttcgtcttagggcatttgactttgggtactcttctcttccgaaaaattagttattgtttaacctggtaaatgtgtttaaaaataatttgtagatgaagagctatcttctttcactttggtattatgtttgacactctcctcttaagccccgtcaagggtaagtgtgtgtctttgtatctgaagttgtcacatatacaaactttacagtctaattgtctaactttacaagttagggttttctatttccctttctgctgaggtggcaactggaaaagaagccatcacaatctgtcccagacctagatattaataatcgcaggagcactagtctgctattagcaccccccttaacatgagcatgaatgaactactccatcacaatccctcaatctctgcacacaggcttcaggggctgagctgtgccattcattcacgctcactgccaagagcaaggtacctggtggtacataaatacaaggtaaaaggaaacagaaaaagggatggagttgttttcactcttttaaacattcaatttaaaaactcttcattatgttttcaatgctcaggacatgagagaatccaggtgaatcatccagcatggccgaattagatggagtcatcattccagtttcccactttctctgtaagccctgacatcccgttctacacgtgagaaacatttgcattcagctgccctggaagaccaggtctattaagtcacatggactatgccacagataattctggctaacaaacattagctagaagaaactggttctctttctttgtgccagagggcttttgccaatattcacaccaattattttttaacaaactggagca

SEQ ID NO: 915525 - DNA, 4001 bp, Homo sapiens
tctatttctagagatctgttttagcacaaggtaccaccctccttgtacacaggtgtcttcctgaaacatctttttggagaaataataatcaaaaaagtctaaactgcaaaatagggcaaagggagagacaaaatttcatgcaatgacaagatgccagatgcctttggaaggactctgggggacagaaaatgaatgaattccttctcctggacagagagacagttctagaaatattttccttctattggagattgcagtctagagatctggctttggataccagctcttcagcctgtttagagatccattcccctaaaacaagcctgcggagttggtaaaatttcttaggagaaactggaaaatgccaacaccaccacttgagcccagagaagcccctgatatttgcttttcacataacatggattttgtgatcgcttgcaagtgagtaactgcaattttgggaattaaccaaagggctgagctgcccagtcttttcattgccactcaggttctacgaagcccaaaaagttttctgggagatactggtccaaggactctgtggacctttcctttgatgtgtgagtattcaaagaatccttttgccccctgcagccccttctgtctcttgctaaagacaattgtctttagttatcactgcgagggagctttccccatgccagctggaatcttgggaggcaggacacgactccagatcctcgggctgaatagggaagccaatgctatccctgcccgctggagtctggcgactcctgcccttgtcccaaaccacacgttttcccgcctcccgggaagcacccaaatctcttccacccttccttagagctagccagggagattccgccttccagggacaaggaccgatcggagcgggcccagcatctccatggcgactctgcaaacctggcgttcaaggccgcgcgcgctggtccttgccccgccccagggccctgtcttggctcattccttccgagccggcaccacctgcaagcccgcctcgggcctggggcgccgcgctccaggcgctgctaccccggtgtctgctcacactatgcccaatcccctattgttttgaaatcccaaaagtaacctcaagaggatttcttcctcacactctcaggcccccagcgcaccttaccctttttatcaaaataaaacaaccctccacctctcgcattttcaaaggattaagcagcaatctccaggaaagaaaatcaatcccctccccaccatcccatccccagccaagctacggctccgccaccacctccgaggcccgccgccgccgcctctctatccgcatcccggataggggcgccaccaccccgcgcgtgaccccgctttcccgcgggtacagataaaaatcccctcacccttccgtagatgccatggtctggggaacgccccctcctcttcagcactatccggcagctgtgggcgagggagaaagcggacgccggggtgagcgcgaagtgcggccgggagcggtatttaagaggagcctctgcccgcccttccacccgcctccggggtaagccctttagcgcctcaacgggcgcaggaggctcctgcgggcgctaatccgcgtcccggctctccacggcgcgcgacccgcgctcccctccgcccgcggggatggcgcttggcggggagctccgggggctccgagggtggcttccccgagagagcgatgcgcccagggctgcaggagggcgcacgccggcgatgcgcccctgcagccgctgccacctgtgctttgctgcggggctcgcgggcgcggcgagtggcgggagcagagagtggtggcagaggacggtgagcgtgcgtgcgcgtgtgcgggtgtgtgcgcgcctggggaggcggtggaggccgctgcgctctggctcggcgccggccagggagggattgcaaggtttagccccgccggagctggggatttgcaggcgatccctctctattttcgtcgagagctgacatcacccgcgccgccgcctcgggcaactcctttaaccgccgccccccgcccccatctccagtcgcggtccctcctctgccatccctccccccagcctctcgccataaattagccaaataagaaaagaggccccgccgctcgtccgggaaggcttgggcagccggtggcaggagcccaggatctaaggagtagctattgtttcccctgaagcccgcgtggccccaggtcaccccgtgcggggtgaagcgcaggcgaccgcgcggagacccgggatgcccctccgtctccgcctccctggagcagcccctggcgctccctcctcactccccggagcacccgcttcagctcacactcacccccaaactcacaggcaggcacacccaccccatcctcccacgtctgggggtcccaggtccagcggagtcgagcggctgaaacacgcgggtggtgcagcctaaacgcggcccagctgcgctccctcccccgccgaagctcgaataaatctctggccttcaattattcagcgagattaatattaatgcagctccctgggggcggcgggcggggtgcaggggaggccgggattttttttttttttttttaggccgagagaggtcggcctcgtgggtgccggctgagaaggcgcggagagttggccgaggggtgagtggcgggggacggttctccacccactcggcgctgctcgccgcctgcttccgtgtcccgggggcggcgcacagagacagatgggcttgtgcaagggagagttcgagccttccggacgcctttgcataaaaatgacgagacctgtgcagctttgattatctctggaatactgcaggaacctagggtcccactacttgccgaccctgtgagcgcagagcaggcaaagcctcactttcctcgtctaggcaatggaacccaaaagaactcacttggagggccacaggagaattaaacagactctctttttccccggggtagacgatcttcggatttgcgctgtgctggaccttgttagacgatggaacgcgaccggccacgtgcaaactctctgagtaggtcccggggatggtgccagaggagccggagtcccagcaggaccgattggtagttaaatgccaggcgctgatatccgaaggcttgagttcttcaccaccttctagctgagtaacctggggcaaattcctccatctctctcttcatcccacctgtaaaatgggactatcttctcccacttctctgtgctaagagaactaaatgaaatggagaggatatgtaaaactcctaaagtggcgtctggcacccagtaaaccctccaaaaatattcagtgcattttcagagtccttagaagatagtttattggacaaaatatccaagtatgaacagacagatgagaaaaataacaagaaaaagaggggaaaacacattaataaaatttaaaaaataaatctctgcttacctccttcctttactctcctttccaaaatctgaatccaaacgtcatcttccatccatgcctttctccatctctcccctccccccttctctctcaatcctgtctgcaccattagaataatcatgtctgtaccttattcatcctaggttccttcagaaccactctaactttgcattttctttatttaaaaaaaaatgccataagcatctcttcgtcttagggcatttgactttgggtactcttctcttccgaaaaattagttattgtttaacctggtaaatgtgtttaaaaataatttgtagatgaagagctatcttctttcactttggtattatgtttgacactctcctcttaagccccgtcaagggtaagtgtgtgtctttgtatctgaagttgtcacatatacaaactttacagtctaattgtctaactttacaagttagggttttctatttccctttctgctgaggtggcaactggaaaagaagccatcacaatctgtcccagacctagatattaataatcgcaggagcactagtctgctatta

SEQ ID NO: 915526 - DNA, 4001 bp, Homo sapiens
aacacaatatccctagccaaggtctacacaccatttcatatatttgtatcttcaaggaggatgaattctctattttgatatttttgtattcagtatcctatacagagatgctgttcagagatctctgtggcaacaaaatggcactcactaaactcactgtaattcatttctgtatctaactctctggggaacagagcagcaccaacagtgtaaattgcatattgtaactcaataacacttctttgtgaaaaaaattaattgtaagctgataaaaacactgcagagtaatgataaccctgatctggagacactcacctgtctgagacatggccacctatgatgcctcccaccagcattccagtcagaagtaggaattgaaccactgatttcagtgactgataatcacataccaggtcccactggaagagaaggaagccaatacagcatagcttcacagcagcttttgacttctcattgttcacttgctgcaatagctttcagtggacacactctctagcctctttttactacattttcttacctataccattcaagtcttggcttaagcatggatttctctggaaatcctcacacaaaaccttccaggttatgttaatgtctgtctttatattcattcagcactgcatacctcagtggttctcaatttttgttacacattaaacacattaaggagactttttaaaccattgatgctagtatgaaatccactctgatttgcttctgtaacatgtagccaaagcaggcagattttaaaaataacacagatgtttccaatttgcaacttaggctgagaacaagtgaccaggaagaatatttttctaatcattagtcttctcttcaagctagttttgtgatagctgtatttatatctagttggttgagttcattgcctcaaattcaatgtaagtgcctgacaattaaaaaataagtagccaggtgcggtggctcacatctgcaatcccaggactttcgggtggatcacctgaggtcaggagtttgagatctgtctggccaacatggtgaaaccttgtctccactaaaaatacaaagaaaaaaaattagctgagtgtcatgatgcatgtctgtaatcccagctacttcagaggctgaggcaggagaattgtttgaacctcagaggtggaggttgcagtgagctgagatctcactattgcactccagcctgggcaacaagagtcaagctccatctcaaaaaaaaaaaaaaaaaaaaaaaaaagagcaatcactatttgccaaaagagtgtctgagtgctgactacactatctacacaataactagaggcttaaagcatgtttattttcttctaaacacctggattgtgtatccagaacaggttaacaggaccctttaccttagtcacaatggtcgaagggaagtagctttgatcatatacccagccatccacacagggttctgtgtctgcctcacttgtgctgtggatagtcccattcaggtgaagaagctgccactggggatggacaaagcgacgacacttctctggcctcagatttgagtctagtgggatagagattctcaagagggcatcttcactgaggattccagtttcattaccagatccagtattattgtccagcatgtggacccagcaacgatgaccaggaatggctgcagcaaagttctctagcagtatatgagggattaataacatgagagagggaagaataaaaaccagatgaagcatctgaaatctcccaaggcctccaacttgactcaagagctcctcaaaggccattgattgtgaacacgtgacccccaagaggaggcacaatggctttacggagataagttcaaagggagaaaatatttccttttattaattcaaattaagcttgtattgatcctcgcatcaatttctcatccatgggcccggactcaccagtgcaatacagccgtagtggaaagagcttcctcagttcttttgctatcaggaggtagatgttattttgtagtcatagagatcattatttcatagagatacttctagctgttgacaataaaatccgtttaaaggtttactctctccaaatatgtttgtcctcaagtgactcatgaaatttacattggactttggcatgtacatgttctctaaataagctaaaagaaatcggttaaacagtgttgttatttctaggaagtgaaatttgagagacacaaaagtaaactgctttataatttttccatgaaaagagcagaaagtcagggtttttctcctttagtactgaatttagattaaaatgatgaataaatgcaaatcccaattaccatgttttgctttttaaagcaaattggaatgtgatgccattactatcttttgttaactgatattatgcttcaggttaaatcacatgaggaactcacataactttaaattatatgaaatataaatagaagagaaaggcagtgttcagctcatataggagtttatttccttgggcttatttattcatttatatatagcacattggaagatcttttccatgttagttttgggaatccagataaattgtttattttattgttataaactatgcctctatctctagtgatgctcctcattttgaattatatattttttaacgttaacatggctatgccaggtttcttatagtttgcatcagataactttcccatgttttagatttttaatgaaatgttttttgagattattatagatttacatgcagttgcaagaaataacacaaggagtaatcatatactcatcaccctgtttcctctaatggtaatattttacaaaactgtagtataatattgtatcaacatcaagatgctagtatgatacaatgtagtataataccaggatcttgatactgatacaatctactgattttattaatatttcccttgttggtttatctgtatccgtgtatgcatatagtactatacaattttatgtgtgtaatttagtgtgcccatcatcacaatcaagatagtgaacagttacatctccacagatatccctccttctaggagaataatatggtatatatccttctcaggttggcttttgaaaaatcagaaactctacagatattcatctaagttgctgtatatatgaatactttgttcctttttattgctgaatattattccatagaatgtatatacaattgtttgtttttttaaaatcaatgttattgtgcatatttaagataagcaacatgatgttataagatacatatgtatatatatagataaagatatatagagatatataaaatgctaactatagtggaaccaattaacctatcaatcatctcacaaatgggaaaagttacccattcccccctttggcaaaagcacatataatctattcatttatcaaaaacacaagatactgttattaattacagttctcctgttgtacatgagatacttcaacttgttcatcctacatataggctactttgtatcctttgacttacatctccccacttcttcccacccctcacaccccagcccttgtaaacaccattccattccctatctctatgtacttgaccatacttgaccttattatttttttagtttttttttattattatactttaagtctgggatacatgtgcagaacgtgcagttttgttacatagctatacatgtgccatggtgatttgctacacccatcaacccatcatctacattaggtatttctcctaatgctatccctcccctagcctcccacccccagacaagccccagtgtgtgatattcccctccctgcatccatgtgttctcactgttcaactcccacttatgagtgagaatgtgaagtgtttggttttctgttcttgtgtcagtttgctgagaaggatggtttccagcttcatccatgtccctacaaagacatgaactcatcttttttatggctgcatagtattccatggtgtatatgtgccacattttctttatccagtctatc

SEQ ID NO: 915527 - DNA, 4001 bp, Homo sapiens
agaaagaaaatcccagctccagagcatgtccccgcacctgcttctggcccctcagcacctgtgcgcagacacactgggccttattctgctccttcaaatcccagacatacttctatgcatgacctttgctctgtggggctcctgaccttcacagattcctcctttcaccatcccagcctcgatgtcaatgtatcctctttggagaggccatccccaaccatctgcctgaaggaggctgccgctcctcacccctcgcaaccttgcttttgtccctcatgcagactgcgaggattgactcaggctccagaccctgactgccgggattgaatcaggctctgggacactctagctgtgtgcgctgggacagccccttaacctctctgtgttttccttttctccgttattaaatgaggactgtcataggacccatcccacaagattgtggcgaggttgtggcagcagggacacatttggaaatgtgtctgccactttgccggtgcagggcgaggggtggctttgctgctagaaggggtttaaatgtcaactgagtgaattcaccggtggaatggatgcttcttgaagtctccctgctcatgttggaaccggagccccgatccgaatctgggccatcatcaccgatcaggaaatgggcgtggggtgaccagaatgctttgcttggccaaactttagtcaggttcctgagccttctcctgggcccatctggcgcttcctcataaaatccagttttagcaaagaaccctgctgaatcagtttagcaagaacccccctctgcccccagcctcaacattgatcaggttcctcatcctccaccatctctagggtgacgtgtgtcaccctggcctgtctcagcaagaagcctgttgggtcagttcagccagaccccccttacccctgatttccccctgcagctgagttgtctggagtcacggctaatgggtcagtagggccgggaccaggcgaggctggcgaatgtccagatgccagcattcagaggtgcccacccaggtgccccccgcactaccaggagcctgggctggccccatctgtagactgatccctgccgcccactcccctgtgtgtggctgacgaggggctgagaggctcgagaggaggcgggtccctcccaggactggaccttggagtccaaccaacctgatccatgactctgacctccaaggtgacgggactcgagtggctctgggggaggccctaccttggccacgatggtggaggtgaagacgctgcggtcatagacccagccgtccacacacggctccgtgtcagcttcgctccagctggtggccgtggcattggggtccaagagctgccactgtggctggcggaagcggcggcactggtggggcccctggttggggcctggcgggatggagatggtcagaagggccttgggggtcatgtttgtggaaaccgcagagccattgtccagcatgtgtgtccagcatcggtggcctgggatggcggctgagaagttctccaggagcatctgggaaggtatcatgaggcaggggaggatgaaggtgagcacctgcagggtctggaagaggcccacgcctccggcttgctccaagagcttcgagaacgccatgaacagagctgcctcggctgagcggactgctgacctaactgctgtttggaaccgattgcagccacaagatccagggccaccaagaccttctgccttcctgcccctcagccggattgggggtggggcactgtccaataaccagttgagtcagtccctcagtcccgggaagccctgtgatgcctcggggaaactcctccttatcttgtgtccaggagtgactgtgcggatgccccagagctctgcggagggggtgaaggggactaagctcactgtgcccgggctgcctggggcatccgagctgcccaccaagtgtggaccagagggctgagccaccttctgagttctccagcaccaaaagtgaaagtcaggcagattctatttaaaaagacagggtgctttgatgttactgaattacagtttggaagaaatatcaactgggctgttgcctcactgagttggttaaagtttaatctcagcgtgggcttctgagtgaggaaggcagttcatgtctcaggacctgaggcctcagccactccctgctggccagctgatctcattcttaaatctttagaaccttctacgcgaggccctttaaatcagaaaacggtcagcctaaacttcatccctcctgacaactgttcaaggctctgaagccagatgtggggcctgggaagggccttccctagctggggagatggtgctggtgggcgtgggagaggacgtggggtgggcacgagctggcaggaaggcccaagtctgtgctcttttctttcctgatgtgaacctcctaccaggcagtgccggggagaccagcttgcagactcactatttcgggaagcttctattccgaggttttaggttgcctttattagacagtaagctcccccagtggaaaccatggctaccatttcctggcttctctttgaagcccctcgtgggcccgcagctgagcaggcgggcggttggggaagtgagcaaaatcacgacgctgtgacccagcatctgaggccagccccgcttccaggctccgggcgaggtagagtgaagccagccctcccccatggccatctgggtggtgcctcttagtgtgctcagctctgggctgacctcactgcctgcaccccttccttcactccttatggcagcccaggagagaaacaaggcaaattcccttaaacaaggaaactgaggctcagagagggcaggcaacttgcccaaggtcactcgccgcagtccagatcagagccagacgccacagcctgagctttctctgatgcccctgggcagctgctgtgtggtctccagcctgtcatggaccaaatcccggccaaaagctagaattcaggatttgggtcagaatgagggccagcctgaagtcacctcccagagtgcgagagggaagcggctgagtcagttccggagagaagtccgagaagtgctggaagtgtgggtgaggtgtgggtgggtgtctggaccctgaacctccgagaacctccctggagggcttggggaactcagccaggatggaggccggccagcaagctggggagtcggattccaggcctgggcttcaaagctggggctccttccttcctcggcctctccaggcaggaaatcattaggataaaatagcaaaaagagagggactgggggaggtggagaaccaacccaaattaaagcccaggaggccgcaggagaggggctccttggatagagccccagtccaaaacagcccaaaggcctaatctaacgtgcaaagaattgcaccctattcctgttttgagcaagcaccgtgctgtcgggggtaggcctggccctgagacatggccttccgtggtggcctcctctctctggctcctggcttctggcctgtggagtgaagtgtgttgctgtgttggtgtctgcaaacctcagcaagtgccagaagtcacgggtgtgctggctagaacgcagtttcttgagcgtctgctgcagggtgcgctgagcccaggagtgcacgttttaaagtaagtccccagctgactgcaccacaccgggcccgggccttgctttgaaaatctctgggctggaggtggctgccggaatccaaggtgtccaggaagcacttcaattctttctccttcctccgtccatatgctttcacattttttcttcttccctgccctttgcctgtcatggacacccctaggctttgcttacagcagaaggtcaaacctcctggacctgccagaaggcacccggaatctccaactgactttccacttccaggccaaggaatttttcatttgtattttctgtttttctggggctgcttggggcagggcttagtgcagctgctctgccacctggcggtcacacctggaactgtagcctt

SEQ ID NO: 915528 - DNA, 4001 bp, Homo sapiens
ttcagagcatgagagtcacacacgaggttccactgatgggagaggaggaggctgagctcaggaggttgggagagccccagcagagaggcagaggaaccgcatgggagggcccccagggagctgggtgcggtgggtggtctggtgacctctagggttttagagcaagaccctgtggaacagtgagggcacccacaggcatagtttggccttttgaggagtatatcctgccaccctctgcctgaactcttccatggctccctattgcccaatgggtctctagccacatctgcccctctctcctgtctctccacttggaagcagccacccaagctgacaccctcacccctctcccagaggttgcttccctcctgttctttataaagaggttcttcccacttgttgggatgagctgcccctctctgcttgcctggctttgcctggcgccccatctgggaggcagcctggggtaatcccttactctgtgtgctttggtctcggggaatccagtgaattgtcactgagtccccctgctgctgagttgcctggagtcacggctgacaggtcagcagggccaggacagggtgaggccggtgagtgtccaggtgccagcatttagaggtgcccgcccaggtgccccccgcacctccaagagcctgggctggccccatttgtagactgatccctgccgcccacttccctgtgtgtggctgacgaggggctgagaggctcgagagtgagtggggcctggggaggtgggtccctcccaggactggacctttgagtctgacccaccgtgatccatgactgacctccaaggtggtgggactcgagtggctctgggggaggccctaccttggccacgattgtggaggtgaagatgctgcggtcatagacccagccatccacacacggctccgtgtcggcctcgctccagctggtggccgtggcattggggtccaagagctgccactgtggctggcggaagcggcggcactggtggggcctctggttggggcccggcgggatggaaatagccaggagggcctcaggactcaagctccctaggatgctggcctgagccgtgctgttgtccaggaggggtgcccagcagcggtggctgggcacggcggccgagaagttctccagcatgctctgggtacacagccacatgatggagaccatcagagccatcgtctggagaacctggaacctgcccaggccacccacgaggtccaggagttcagaaaatgccatggaacctactcaaggggcccagaagaggggcccacttcacaaaggctggcccagggcaaagaggccagggcaacgggcctgtttcccccacggtggtgcccacagtggcttctccagcccagcggctaggcttcacagactcggggccggaggctcaggctctctggtcatctgcctgctggtgtcacttggggtggctccaactgggccctgaggccgcgtgaggtgattccgagacctccagcatctccccagagaggcagctgctccagacctcccgggaaagctgaatttggaaagtagggaatgtggagactgaagactttaattttagactggaattaaagtgtgaccggtgacacttatggaatcgagtttagcaatcatttccttggtcaaagtttaacccgcgttgaggcaggcacagacgcgagggaggtgcagcctcctctgcttgggggccagggccggcctgctctgtgccaggtcttggggaggcctaagtttttctcctggcggctgtgggatgccagggctgcctgctcccttcggtgcccctgtgtgcccacctcccagagtggctgagccaagagaaggtgggccaggggatccccctaatttggggctggggcagctgtgcaagtctctgtgtgggcttgggtcactggcagctgcccagcccctgcgcctcccaggctgtgtggcctggccccacccgtggctcctgcctccactcacctgctgtggttggcgtcctgtgcccgctttgctgttaccctgtcctgagtcctcggtggagcttcccagcatcaacagacaccccacagactccccaggttcggtgtgcccaatgccaccctgagatctctgtcccctccccaaatctatgcctcctgcagagccccacctcagctatggcctctcatgtcacagtgtctggcctggaacccagcgtcttggttcacgcctcctgctccctgcctcccaaatccaccaggggccaagcctggctagttttgcctcctaaggatttctctctcccacctcccccactccacagctgtccctgcccttgtctttctgcctcaactcctgcccctggacccaccacgcactgcgagcccttgggtcaaatcctgcttaaaagccaaggggctcccagtcaacaacagctagtggtgacttactagggcaggtgagtggacagcagtgtgtgctgatgcagggtgtggggttcaggaaaggctggaccgaggccaagagaacccccttggtctcgatagctaattctgtaggcgaaagggccagagaacacaaagcagttaaaaagtgtgtgtgcatggccgggcgtggtggctcatgcctgtaatcccagcactttgggaggccgaggtggggggatcacttgaggtcaagagttcaagaccagcttggccaacatggcaaaaacccatctctactaaaaatacaaaagttagctgagcatggtcgtggtgcacagctgtaattccagctacttgggaggctgaggcaggagaatctcttgaacccaggaggcagaggttgcagcaagctgagattgcaccactgccctccagcctggttgacagagaaagactcttatctcaaaaaaaaaaaaaaaaagaaaagaaaaaaaagaagtgtatgtatatgtgggtgtgtgcacatgtctgtgtatgtgtgcacatgtgtttgcacaagtgcatgtgtgtacatgtgtgcatgcgtatatgtgcagtgcagcagtgatggcaacccaggtgtttgctcttatgagctttgggcataaaactctccatttgaggcataaatgcccctcccatctgcttctttttgcttcaccgactcttcccgctgcccctccacatggcttaccaagccaacttctttgcctccctgggctctgcaccttgagtcatccactgcttccaccacatgccctgtacatgctttctcagttcccacccttgcttatgttggacctccagcctggaatgctgtctccaggctcacccttaggccacatactgtgtggaatgggcacagtccaaatactcctcctccagcgggctctcttcacttattcctgcctacaactagggctcagagttgtcagtggaatctcatctttacactgtcctgcattcttctcaaactcctgacctcaggtgatctgcctgccttggcctcccaaagtggtgtgagttgcggcacccagccatgacctgcattcttctattatggtccagttggtcttatttccagtgagctcctggtagtctggaacccttctttagaggctctttggaactgatttggacaacaaataaaggttccatggagacttgctgaagtgcatggatgatttttttaaaaatttcatttattttctaattatgaaataatttacacacttcctcaaaaattcagaacatattgaaatgaaaataaagatccctcatatactcatcaaccagtgagttacactactgtttacagtttggtgtaaatatgtgcagactttgttttagtaactgatatgtttagcttcatcagcttgagctgccaaataagctttacatttccttttgtaaaatccaaaagaaatacctctgccttttaattagcgattttaacctgttcacatttattgtaattattgacatgtttggacttactgtatgttttcttgtttaccacattttccctttaaatcttggtttcct

SEQ ID NO: 915529 - DNA, 4001 bp, Homo sapiens
gggctgagaggaggagggcagctgtctgagcccacgcacgccgggcttcccagaagcaaacacaggaagggccgaggttggccctgactctgcctgagcttcttggtgatgtgagactttgttcccaagcctctccagacttggtgaatataatttaatcattactattacagcttccagagccacacactgtggtatagactactgaatgatacactaaactaacatgaatttgccaatgaaatgtttccgcatttggcaacagagataataaaataagacagcattctatctcttgcaagaaaaagcttgagatcaatttgccgccacagatcatttagtggacaacaaggacccaagaagatggaggggagagatagaagctgcgggcaggtgcaaggagagcctctctgaggggtgatccgcccagagccacaccggattgaacagcccttggggcagggactccagagggcaaaggctgccgggtgagaggcaggaggaacagcgctaggaaggtttgaggaggtgctgcccccaggagggaagtggggtggctccccatggcttctcccggggctggcactgaagctggagcacaggatgtgctgacgggggtccagaggcagagtccttaacttactcagcttaagcgtggcatgagtcccaactgggaggggccctggcagcatgaaacccccacccccactctctgcgacggcccagatggagggcaggaggaacagcggttcagccctggctggggctgcaggggctggggtgtgttactcactggcacgatggagaactgcatgaagaggcaggtaagttctgtggcggccagcacgtaggtaagcaagatgaccgaggaccggcctagagcgctcatcctgccgggggaccggccctggtccctgggagcccgagctccctgcatcctggacaggcgcagcagggagacccaggagagatccaagcaggaggctggcggagcagggggcaaaagtccagttgatccgggcaggggtgctgagtcactgggtcccaggcagcacccgcctggccttgcctgcaagagaggacagcactgcaggaccccctccccagtggagctctcctgctacctggaccttagaggacacatcagggggtccccctcctccacttttgacagctctggtctccaggcacacagcctcccggggaggggagacagggacaagctgctccccccgacccctgcaggtgggccaggctcagtgcctggttgcctgacacaggaatgtgccatgccccacttttagagggaggcagaggctcggagtggtggctgagtccacctcaaatcatcagcgccttctgtggccagagggctgatgtgggtccctgtgcctggaggccctccgtaggcccacagtggccctgtccccaacacagtgcagctctcagggaaggtctaccttcccctgtggccagcagccagagctccaaggggcttctggaatggtcttgcgtaggggagacatagctcagccttccaggctccccagtagctctgccttacctcccacagcggagtgctgtctgtccccacccttccccgcccggcctccaactggtgggaactggattttgcggctgcagaggacttccccaaattttgccacattaacagctgactgcacatctgagccccgaggtaccgaacccaggctggtggggtagggcggggagacccctgagggtccgggagctgcgcctggcgccctcccccatcccgggatgcagggaggctggggggagcagggcagccgcagcaggcacgtcaggggcacctcattgggcagaggtgcgacgctgcgccggagttcggggttcggggctcagaggccgccctctccggagtgtgctcgagtacctgcctttgcaggggcgggcttgggcacgggtgccggtggggtgagcgctccagggtgacctagacaccggtccttccgggatgagccccggccccgccctttcgggagatgacttgcaacagggaccgcccctctgggtctgagttccagccctcgcgctttgcaatcgccagttccgggagcgcccgtgccacggtttctgcgctctcactggccgagcccgcccctcccctcgaaggacccgcccctgccccgcccaccagcgggctcgccccgtgcccggcttcgcccgccccagccccctccagcttgaatcctgcccggtgcccgggctgctggaggtggacactctgaccctcaggcagcaccggtgtccactttgggcctgaggaggggcagtgtgggcaggggatgggaccgggaggtggagggaaggagagaatggaggggaggcaggggcggggagagaaaagcggaggaatggtggtgaggggttaggggaagaagtcaggggaggttgtagagggtgtggtgtagcctggccctgccaaaggtctgcacagagccccagaagagtgaccaggagacagctctgggcccctcctcacttccctccccagacccggaggctgctaggagcagttgagagcccacttttccccatttcaccctgcctgccacttccccacccttgcaggggccaccagagatgccagcacacaggtaaacaagcctcatgccgccctccgcagcaggagccgctggagcacacacaccccacgctgcgcacacttggcccaagccctgcccttggcctgggcaccattctccgtgcccctgactgtcactaagtagggagatgctcattcaggactcctgccccacctcctccccaggcaagggctgggcacaggctcaaatgtcaaaaccagtgtccccctgccatgtgtcaatcatcgctccacagagcagaaaactgcaggggtgagacagggtgggacggacatcgcagaggcgagcgagagccggccaaagtcctggtgggcaggggggccagagccaggtggcccaaggccggctggctaagccattccaagtcaccgtgggagtggttcagcagctacccttcgttcagcagctcagatatgttgggcatcagaaaacaataccccaaaatgaaggcctcagaagcagcttcggaagaaaaagtgtttctctgaccttctcttgctctcctgtctctcagtgccattttccccgaagctggccttagaaactggaatccattttccccagggcaggtcatagaaatcagaaccccgcctttccacacagccagacatcaaacctaaaaatattgctctaactttccctccacctttgtgtttagaagctggccataaattatctgacctctcttgtttgactgtagggcataagaccccattccaggagggtcctgctccatgcccagaaggaaggaatgctgctcagaaagttcaagaaatctagaccaacagccctcgctgcgcttccccttgcggtccaggagcattagtgcaggtcccttggttcatctgtgttcccgcatggatgtccatactttgttgagcctaagcatcagaaatggcaatttcccccatatctttttttttttttttttttttttttgagacggagtcttgctctgtcacccaggctgaagtgcagtggcgcgatctcggctcgctgcaagctccgcctcccgggttcacgccattctcctgcctcagcctcccgagtagctgggactacaggcgcccgccacagcccccgctaatttttttgtatttttagtagagacggagtttcaccgtgttagccaggatggtctcgatctcctgacctcgtgatccgccccccctcggcctcccaaagtgctgggattacaggcgtgagccaccgcgcccagcctgtttcccccatatctttgggtctttgttctgaaaactcccattcacacacgtcaatcaatttggggaccaaatgccttttgtccaatcaatctgccctctgtgaggtggtttcttagcaagcccacgg

SEQ ID NO: 915530 - DNA, 4001 bp, Homo sapiens
ttgagagcccacttttccccatttcaccctgcctgccacttccccacccttgcaggggccaccagagatgccagcacacaggtaaacaagcctcatgccgccctccgcagcaggagccgctggagcacacacaccccacgctgcgcacacttggcccaagccctgcccttggcctgggcaccattctccgtgcccctgactgtcactaagtagggagatgctcattcaggactcctgccccacctcctccccaggcaagggctgggcacaggctcaaatgtcaaaaccagtgtccccctgccatgtgtcaatcatcgctccacagagcagaaaactgcaggggtgagacagggtgggacggacatcgcagaggcgagcgagagccggccaaagtcctggtgggcaggggggccagagccaggtggcccaaggccggctggctaagccattccaagtcaccgtgggagtggttcagcagctacccttcgttcagcagctcagatatgttgggcatcagaaaacaataccccaaaatgaaggcctcagaagcagcttcggaagaaaaagtgtttctctgaccttctcttgctctcctgtctctcagtgccattttccccgaagctggccttagaaactggaatccattttccccagggcaggtcatagaaatcagaaccccgcctttccacacagccagacatcaaacctaaaaatattgctctaactttccctccacctttgtgtttagaagctggccataaattatctgacctctcttgtttgactgtagggcataagaccccattccaggagggtcctgctccatgcccagaaggaaggaatgctgctcagaaagttcaagaaatctagaccaacagccctcgctgcgcttccccttgcggtccaggagcattagtgcaggtcccttggttcatctgtgttcccgcatggatgtccatactttgttgagcctaagcatcagaaatggcaatttcccccatatctttttttttttttttttttttttttgagacggagtcttgctctgtcacccaggctgaagtgcagtggcgcgatctcggctcgctgcaagctccgcctcccgggttcacgccattctcctgcctcagcctcccgagtagctgggactacaggcgcccgccacagcccccgctaatttttttgtatttttagtagagacggagtttcaccgtgttagccaggatggtctcgatctcctgacctcgtgatccgccccccctcggcctcccaaagtgctgggattacaggcgtgagccaccgcgcccagcctgtttcccccatatctttgggtctttgttctgaaaactcccattcacacacgtcaatcaatttggggaccaaatgccttttgtccaatcaatctgccctctgtgaggtggtttcttagcaagcccacgggtgcagtgtaccgctcgaggggattccagcccaaagagtgcaaacgtgtttgcatctggagtgcgtgtccccagatcctctgccaagctcgttttcaagaatagtcaccactggccgccctggggacttggggagagtgcagtcaagccgagagcccaggtccagccagagtttcctggaaggactgcacagaaaggccggctgtgtaaggtgggggtgggtgacaggagtctcagagtgtcttagatttgggactcctgggggaggatgggcatccacatgaacccttactcaatggggcaggtgtgagggactgtccccaacaggttccagacgcctcctgggttccctggggagggcttagaggatgaagcggcaggaggagatgggatgagttaccaaactgcccagaggtgtgcgagggaggctgagggtcctctggcgctgaggtgtggtggagatgctggaaacttaccactgtcttcctccaggtgaagcagggcctcaggtagccagggaactggttgagcagaggaaatcggagagacctttttttttgtcatgaacaggctcagtgtgaatgggggaacttcctggttctgagggaatgtgggaaaattgccctttaggctgggtgaagaagaaagcaagtggaaccctggcacccctggacttcctcctccagaggaagcggctttggttgtgggccagcgagcctgtgcgtccccagccccagggcattcaccgcttcagagaagcaaggcgacagttctgccggatgagaggatccaggctgactggaggaaggaagggctttggctcatctgggctcaggtttgggagaggtggcttctcagaggaggtgatgcctcagccagtcttaaaggtgagcacggattgtttgggtatgggaagggcatcctggctgagagaatagcatagataacggcttagaggtgagcccaggcttggagtgttcaggaagctgagccactggaaggggctgggaccaagggtgtacagtggggtgacggggcagaaagtgagtctagagagaggggtgaccctgggagcgctgggcagggacacagccagacgtgcactgagaagtattgctctgaacactgcatcctggaggctgggacctctgaggggtctcccgaatgagaggaggccagcttcagagctgacccctgcctacaccactgcctggacatttgaaatggctttgggcctatcttaacccgacacacatttattaagcacctactgtgtgcatgccccatgccagctgtttgggacgtcagctggcaaagctgaccgcctggtggtagcttgcatcattagagtgcatgtgcaggcttcggggaggcacatgatcccgggtcaccacaatgcctaaggaaatgactcactgcctatgagcacttgagttcttcctgtgtgtgcagtggacgccgctgcagggttctgagccccttctgttctccaaggagcctctggctgatgtgctgatgaggggttgaggggaggggcagtgcaggaggtctctgctgtggtccagatgagaggtggtgtggacttggatggggcatggggggatttgaggggcaggtttggaacctccctggaaggaggcctgacaggcttcctgctggttggggcctgggctgagagggccaactgagggggccttcaggtgcggctgggggcgacatgaggggaggcaaccctgcaggtccatccacgggaggggcctgtgggccagcagagagggcagagtgtgcagtgtgcagtttgcggcatgtggtctgagctggacgtgagggtgtcattgacactcatgtcctgtttagagctcccaccctggatgagatgaccaggagtggatggggctagagaggagaggggccaagggccaaggctggaccccagcatgaggaggaggtgcccagggttctgaccagggaaagggagggaaaaataaaggagctgggtctggagagagaggcaggtaagcgagtgaaggcctgggagcttccctggggccgagagctggagtcactggtggctttggcaagagcgtcatgagcatgggggctgaccctcgggattcaagcaggaggaatgggctggacacccttctgaagggttttgcaccaaaagggggctgagaaatgggactgtggctggaggggaagtgggatgaagagagagaacctttgtttacaattttaagatttaaaagagtgatgctgcagagaacggaagggtgatgtggagggagcggggagggtctggccttcaccatccctccatgattctgcagaggactgaagggtgacctggaaggagcggggagggctctggccttcaccattactccatgatgctgcagaggacagaagggtgatctggaaggagcggggagggctctggccttcgccattactccatgggtgaagtgaacgtgttctccttgaggctttgtactcttactcctatgattctccaaggacctgtctcaataaagccaacaaggttttgcctggggcgggact

SEQ ID NO: 915531 - DNA, 4001 bp, Homo sapiens
gtcccatcccctgcccacactgcccctcctcaggcccaaagtggacaccggtgctgcctgagggtcagagtgtccacctccagcagcccgggcaccgggcaggattcaagctggagggggctggggcgggcgaagccgggcacggggcgagcccgctggtgggcggggcaggggcgggtccttcgaggggaggggcgggctcggccagtgagagcgcagaaaccgtggcacgggcgctcccggaactggcgattgcaaagcgcgagggctggaactcagacccagaggggcggtccctgttgcaagtcatctcccgaaagggcggggccggggctcatcccggaaggaccggtgtctaggtcaccctggagcgctcaccccaccggcacccgtgcccaagcccgcccctgcaaaggcaggtactcgagcacactccggagagggcggcctctgagccccgaaccccgaactccggcgcagcgtcgcacctctgcccaatgaggtgcccctgacgtgcctgctgcggctgccctgctccccccagcctccctgcatcccgggatgggggagggcgccaggcgcagctcccggaccctcaggggtctccccgccctaccccaccagcctgggttcggtacctcggggctcagatgtgcagtcagctgttaatgtggcaaaatttggggaagtcctctgcagccgcaaaatccagttcccaccagttggaggccgggcggggaagggtggggacagacagcactccgctgtgggaggtaaggcagagctactggggagcctggaaggctgagctatgtctcccctacgcaagaccattccagaagccccttggagctctggctgctggccacaggggaaggtagaccttccctgagagctgcactgtgttggggacagggccactgtgggcctacggagggcctccaggcacagggacccacatcagccctctggccacagaaggcgctgatgatttgaggtggactcagccaccactccgagcctctgcctccctctaaaagtggggcatggcacattcctgtgtcaggcaaccaggcactgagcctggcccacctgcaggggtcggggggagcagcttgtccctgtctcccctccccgggaggctgtgtgcctggagaccagagctgtcaaaagtggaggagggggaccccctgatgtgtcctctaaggtccaggtagcaggagagctccactggggagggggtcctgcagtgctgtcctctcttgcaggcaaggccaggcgggtgctgcctgggacccagtgactcagcacccctgcccggatcaactggacttttgccccctgctccgccagcctcctgcttggatctctcctgggtctccctgctgcgcctgtccaggatgcagggagctcgggctcccagggaccagggccggtcccccggcaggatgagcgctctaggccggtcctcggtcatcttgcttacctacgtgctggccgccacagaacttacctgcctcttcatgcagttctccatcgtgccagtgagtaacacaccccagcccctgcagccccagccagggctgaaccgctgttcctcctgccctccatctgggccgtcgcagagagtgggggtgggggtttcatgctgccagggcccctcccagttgggactcatgccacgcttaagctgagtaagttaaggactctgcctctggacccccgtcagcacatcctgtgctccagcttcagtgccagccccgggagaagccatggggagccaccccacttccctcctgggggcagcacctcctcaaaccttcctagcgctgttcctcctgcctctcacccggcagcctttgccctctggagtccctgccccaagggctgttcaatccggtgtggctctgggcggatcacccctcagagaggctctccttgcacctgcccgcagcttctatctctcccctccatcttcttgggtccttgttgtccactaaatgatctgtggcggcaaattgatctcaagctttttcttgcaagagatagaatgctgtcttattttattatctctgttgccaaatgcggaaacatttcattggcaaattcatgttagtttagtgtatcattcagtagtctataccacagtgtgtggctctggaagctgtaatagtaatgattaaattatattcaccaagtctggagaggcttgggaacaaagtctcacatcaccaagaagctcaggcagagtcagggccaacctcggcccttcctgtgtttgcttctgggaagcccggcgtgcgtgggctcagacagctgccctcctcctctcagccctcagagcctggacctgggcatctaggcgggagtggggatgggcctttggcaccattccgggcctggcagaggctcccagcccgagggtgagcctaaggatccctccccgccgtgcctcaggcgccccgcccactcctgctaaatggctggggccaagccctgaatctcctccctacccgtggggaaggctgggcaggagccttgcttttctcatcataaaatgggtaataacagtccctccctgtaggattggtgcggggaagagtgaatgagaagtcagaacccttcccacagctgggcacagagcacaggtggagtggcttcagccacccatcgactctcatggggagtaactccgtgctgagtgcccaggagctgaccctgatgtcagaacctgaaatattgcagagtgtaaaaatcctcaacagcccactccctcggagctgggggtccacacgcacaggggctgcagtgggaagggggcgaggtcttcctcatagagaaggcaaccttggagcagggctggaaggaagcaggagaggccccggggcagtggagagagcagagtggctagagtggaccggttgaggccagaatgggaccacaccccacctgctgctcaaagaactccgggctggtgatggctgtggaggaggtgagaggtggctggattttgcatgtgttgtcaatggactgtagtgggtgtgagagaaagcagggctcagggagcactgaagatctgggcctgagcccataaggaaggaggcatggacaggaggagagggaaagatgggagcccagttggggacgggttgagtttgagacgattttcgaccccagtggagagccgaagggagctggacacaaggcagttcagcacagaggctctggggccctgcagcatggagacggtcatgggctgggctcccccagagggcagggaggctggaggtcggatgagctgggggaactggcagtggtgatggaggaggggcaaaggacccagcacagcccagagcagcagaccatcgtggaggagggaagaagccacgaaggcaactgtcactccagtgggaggcctgccaaagcggaccactggaggcagcagtgtggggtcaatggggacctcagggagaggggagacagcaggaggttttttgtccttgcaatagtttgctcagaatgaaggtttccagcttcatccatgtacaaagcacatgaactcatccttttttatggctgcatagtattccatggtttatatgtgccacattttcttaatccagtctgtcattgatggacatttgggttggttccaagtctttgctattgtaaacagtgccgcgataaaaatacgtgtgcatgtgtctttatagtatagtcccctggggcctgctccgagggctgggagagaaggaaagagatggaaagagaggaggctgcaaggtgaggcagctgctcagagctccgccctcaaatatgtgggagtagctgtaggggagggtcaagagaacgcaagagaagtaacaggatgtgagcatgctccattgccaccccctcaaaaggggattgtgcagagaaacggggagagaggagcactgggagcttggtccagtgggtgcccccacagaaggggactgtgcagagaaacggagagaggaaca

SEQ ID NO: 915532 - DNA, 4001 bp, Homo sapiens
agtccactcactcactcatctgcccactcactcgctcgcccactcactcgcctgctcactcactcactcactcgtttcttcatttcttcatgcattctttcattcactcattcattgtgacacaatgttcattgatcattaatcacctctaagtgacaggcctgagttgagggttggtgacaaacaagacattctggataagacacaagctcacatgtagaaagaccagggtgtatcatgacacggtgtgatgagggcctgaggtgtgtggcacagggagccatctacactccagagtgtggggtggagtccgggagggccccccaaacctgaactgagagaagaagggcagaggagaagggagaggggagagagagcgaagaggaggaaggggaaagaggtgcagagagagagacgtaggagccaacttcagagccatgagctggctgcacatcgtctgtcaataggggtcagttaggtgcagtgctcacacctgtaatcccagcactttaggaggtagagggaggaggattgcttgagcccaggagttcgagaccagcctgggcaacatagtgagacacccccccccacccccaccccccgatctctactaaaaataattttttttttattagctgggtgcggtggtgcgtgcctgtagtcccagctactggggaggctgaagcaggaggatcacttgagctcagaaggttgaagctgcagagagctatgtttgtaccactgccctacagcctgggtgacagagtgagacctcacctctaaaaaataacggggaacaagttagggcccattcatacagtgggatgtagtgtaaagactaggaggaatgggacagctctttctgaaggaataggagaggcctccaaagcgaagaaaaagccgggtgcaggaccacgtggggtgtatgccagcatttgcacaaaaaaaggatgaccaggcctgtcacctcagctacttgggagacagaggcaggagaactgcttgaccgtagaagtttgagaccagcctggccaacatagtgagacctcatctcaaagaaaaaaatgggggcacatgaagaagaaaacaaatacaaaacaggaaaagaaaaatgggggaatggaacatatacacccacttgcttgactgcatagaatcataaaatgtctctggtaaaaggcatagaaagcaggctgccctctggggattactgcaaggaggggcagagcaggaaaggggtgatccccggcagactcttctgtgcctttcgggatttgaaaccatgtgaatgtactatatgtattatctgtttaaaatgcacaaatcaactgtaacaaagaaaaatgaatgcagaggcctaggctttctggcccgcactgggtggctggggcccttatccccacgggctcacctgtctgccaagctgccaaacacggcagcccccaccagcaccccggccatgtagacggactgcgccaggtctcggagagtgcgggcctcacacaccagatcccactgcagggaagacatgggcgcttcagactgggcctcggcagcagcccccccacacacccagccccttctgacctccatcacgatggtggacgggaaaacactgcggttatagacccagccgtccttgcagccctccgtggccgcgcccgggatggaggagttggggctcagcagggcccactgaggcttggtgaagcgccggcagggctcaggggccccaagctggtccaggggtatggtggccctcagccaggcccccgagtcgttggtggaggcctcagtgtggttggcagggccccggcagtggtggggggggacagcggccgtgaagttctgcaggaagttgtggcaggccagcaggccgcagggcagcagcagcagggctgtgtggttgagctggaagcggcccatgctgcccagagcatccagcaggtctgtgaaggccatggccataggcctgacctgaggcccagtacccccggctttatgtagagaggccgggaggggccctgggagggggaggaacaggccaggggtgaggactgcagacatcctgtgcaccctgtgtcggagggctcaggttacaccccataggagggttcaggtgtccccacatctgcagggctcccctcccccatgccctttctctagctctctccatctctcaccccgagggctgagtcacagcctaccacccatatccgcaggtctggccgccctgcccactgccctcaccgacaggaccccagcagtgaatggagcaccatcaccttccctttcctccagaggacaccgaggcatgttcgggagccccgattctggctttggcacatgggacacagtccctgtctctaggctccaaatcacagctggagccttaagtgctgagagttcagaataatgggatgcagtgtttacagctgcttacccttcccccacttcccgagaaagcagggacttggctgcacaggtgacacgtgggaaaaagcccttttaaaatgcccaaataggccaggtgcagtggctcatgcctgtaatcctggcactttgggaggccaaggcaggctgatcacctgaggtcaggagttctagaccagcctggccaacatggtgaaaccctctctctactaaaaatacaaaagttagccaggcatggtggcgggcacctgtaatcccagctgcttgggaggctgaggcaggagactcgcttgaacccgggaggtggaggttacagtgagccgagatcacgctactgcactccagcctgggcaacaagagagaaactccatcagaaagaaagaaaggaaggaaagaaacaaagcaagaaagcccaaatagggcagtcaggaagaagccctgctcttcccacctctacctcagtgactcagagtttatgagaggttagggtcccaggtcatccagacgtggtgttcccatccccacatcaaataaaacccaatccagagagcaagtaagggtttgagcaagatggcagggccctgcagaccctcctgccctccagcccctcacacaccagcccaagctgcaggaagagctgagccactgccctcactgctgaagactctgagcccaacaggacctggactcccagtgaggaggtgacaagggcaaaacgcaagctcaagatagcagtgtgcgggcagccttccccatggggcacacaggggcctccacctccatctccaccccaacgctggggcccacagcagctgacagcagccaactcccaccctcccccacctcggcctctgctctgcatttgcagcttcgccccatcccctcttccttcccccaaaccactcttatctctggtaagaaaatcccagatcccagcaggccctggagcggcttatgtaagtgcaggtgtctgggtcacaggggctccccacagagggacctgaaggcggctctgtgctcgggggagctctctggggggccgggtgtgtgctaagtagaggtttgaatttcagccagagcctcacctcaacgggccgaagtgtgcaagaaaggtaggggtcaggcctcctgggcggcggggagggcatgtaggatcagcagagccatgtgggacctcagctgtgtggccctgtccctgcagctagggcccctccttcccaacctcccagggccaggggtggtcttgcccagatacccagtactccagtaggggttcaagcttcaaggtcaaggggaaggagatggaggggttggaggggaggggtgagctgaggccacgagctgcccccatgggccggggcctgcaggtgccctccaggcagtaggctggggagaaacacatcacagacagatgtggggccttttattatttggggttcctctatatggaacacgggacctccccaccccaagcctagtgcctctggcacccccataaccagtacacaagtccctgaagagtcccctttaaaatcactaatataaaaaaggagcgaaggagggaaggc

SEQ ID NO: 915533 - DNA, 4001 bp, Homo sapiens
tggggttcactcccattcccattatgtcccctgtcagcaggaagaagctggagtgatagatggccttttcccgtcttcatagcctacatcttaagattaaggtgttataaaacccaaagggagggattgaaactgcctttgcaaaattatgactgagaccgtgaaagagatctaacttaaccgactccatcttgcttctgacctccaagctgtccttgtgcattcctgggcataggctgaactaactttgggagaaacttagtttgtagtttatagtttgaacaaagacagcctttcccaaagcagacctccttcttgcctggggactagattaacgttagccacaggattagaaattatcatttagtagtcacacagctggaggctacaagattctgaccctccctaaactgctcctaagatcagtgcttgagatattttgcagatcccgcacttgatggatcagctgtcaccacccagatcgataaactggctcatctgatcttgtgacccccacttaggaagtgactcagcacaagaaggcagctttgactccctatgatttcagccctgatcagtcagcactcttggctcactggctgccccccaaccaccaagttatccttaaaaactctgctccccgaatgctcagggagactaatttgagtagtaataaaactctggcctccctcaaaaaacaaaaagcaaaaaacaaaaacaaccaaaactaagtatctcaacaacattttgtaggagaaacactttcacaaccagcagaatgcagaaaaatttgtcaaatcccaaagcgtggatatttatgttacagaattaacaaacttatttctcattgccaaaaatgtgttgattgtaatggttcctattttgattaataaagatgtgtttgagcctagttataatgatttaaaattcatggtctaataccacaatttacttttacaccaatataatactaatacacttggctgtatcgtagagtattaatagataatcaggtgctgccacctgctaaaggaatgaagaatgagctgactgcaggtcccatctaaggactaaaggtataaagcaagtcaatttttttgtgttaactccaaacactttaatcatataaacagaagatttacatggggcctcttacctcagtcacgatggtggagaggaaagagcttctgtcgtacacccagccatccacacagggctccgtgtctggctcatttgtgttggggaaggtcccgttcaggtgaaggagctgccactggggatggataaagcgctgacacttctgtggcctcaggtttgagtccagtgggatggagattctcaggaggtcatccttgctgagggtcccggtatcattgtcagacacagtgtcattgtccaggagggggacccagcagcgatgactaggggtgaatgcagtgaagttctccaacacaatattagggaacagtaggatgttggtgatgcaaaagaaagctatcagacaaatctggaatctccccatgccacccacttgatccaggagcacatcaaagcccattgagactgaacaggtgatccccaagaggaagcacaatgactttatgaagagaagttcagagggagaaaatgtcccctttcacaaagttaccatagtgccatgtggatcctgacactgctttcttcttggtgggccctgcactgagtggtgtgacactactgcagaagagcagtggaaggactttccccaagtcctttaactttaggcagccaaatagtttcagaagtcacagatataattatttggcaaagagactgctagctgttgacaactgaatcttcttaaaagactactctgtgaaagatcctgatctctgagtttcctgataagtcaacggtggattttcaggtggatgcagtccccacgtgacctaaaatacacctgttcaatagtctgccattcttcttagaaatgggatattagaaaatccaaagtgaattgctttatgatgttcttgtacaaagatcagagagcagggctttttttggactaggactgagttttactaaaagttaataaaaactattcttagttaaaggaaagtggaatgttgagtttaaacattgacttttgctaagtgtagttctgcttcagttcaagtcataccaatgacagggctttaaagattttttaaaatagggaaattaggataagaaacaaagagaaaggaaatagtgcttttatgtattatagtagtatatttcaccagatttattgattcattcaaatatcattttgggctttctggtgctattgctgtaaataaagcaatgttaacttacatatatttatttataagtttaaaataaaatttgagctcaatgtctcatataaatgataggtttgtaaataattgtactgtaatgtcatcatataactataaggaagatacacagtgtgctatggaagattaaggagaaactgtttaatgatacctggatagatgccatggagcaggggagtcatccctctacaaattaactttacctactctttttttttttgagacaaagtatcactctgtcaccaggctggagtgcagcggtgggatcttggctctctgcagccttgacctcctgggttcaatcaattctcatgtctcagcctcccaagtagctgggattacaggcattcacccacatgcccagctaatttttgtattttttatggagaaggggtttcatcatattggccaggctggcctcaaactcctgacctcatgtgatctgcccacctcagcctctgaaagtgctgggattacaggcatgagccaccatgcccagccagcttgacctactcttgtgggaagattcttgagataatgaagcagtggatgagggactgcaagagtcaatttttaaatgagggaataataagtacacaattacagttaaaggtgtggcataattgtgtacctacaaggatattcaaaagctagcagctaaatagcatgcacggatataatgggaaaagacaggttgattaaaaagaaacccaaagaaacaaacagaatctccagaatttattctgcctacaagaagttcttatttttgaatttcaaactggtcacccgtgaaacatcttaagatgcagattcctggatgggtgcagtggctcacacccataatcccagctactcaggaggctgaggcaggagagccacttgaacctgggagtgaaggttgcagtgagctgagattgtgccactgcactccagcctgggtgacacagcaagactctgtctcaaaaaaaaaaaaaaaaaaaaaaaaaaaaaaaaaaaaaagcagattcctgtccagcctgcagagattctctgttcaggaaatgactttcatggatctattccaaacaggaaatctaatacatcacagggttttgttgtaaattgttagaaatgttttagttcactagggctgcataacaaaataccacagacttaacagaaggtgactttacagaagtttattttctcacagttctgaaggctgaaagtctaagatcaaggtgtcaacagatttgatttcctctgagcctctctctttggtttgtcaatagctgccttctcgtcatgtcctcacatattctttcatttatgcatgtgcacacctggtgttccttcctcttcttataaggacactagtcatattggatcagggccccaccctatgggtctcattttaacctatccccaaatatggttgtattttgaggtattaggggttgggactttgacataggaattttgggagtgggagacacaattcaccccataatggggttagacaatcacaattatattttactaaagttactgacacagtgtaaaaatagtaagaagtgaacgttccagcaaggcaaaccattcagaaccacaagaataaaatgatgtaaagaatgattacagctgtgaattcactgagtattcgctataagtcgattctgt

SEQ ID NO: 915534 - DNA, 4001 bp, Homo sapiens
tgttttctcattagatcctgtgctccccatgtccactggctcttagcccagcccagcagtagaacttgcctagaagttgcagtccttgtggcctacacagtctttcaagtttgtttaggacgagagcactttagcctgtgatggcaaggcttaccaaaactcatattctggacactgggatgggtgattcacctctgtggctatggctggtctaaatgcttccttcatgagtgctggctgagttctgccctgtgttggcagcactgagtcccaatgcaaagtcccgtaattgctgtgctcttcctcccccaagtgcacagattctctgtgccacatggccagtgctgggggatggagatggagtgttgtcagcaattcaagactgtctttcctacccccttcaatgaagttaaaatcaggtactatgatcattcacttgatttttggttcttatgaaggtgcatttttgtgtagatagttttcaagtttggtattcctgtggggaggacaatcagtggaagcttctgttctgtcatcttgctctgcctcccctgggatttatccaaaccctattttgaaacacccccaggtcagatggagatgaaatttctgtgtcttgtgcacagcacacacattttaaaaaatagcactcaccacactcaccataattttccttttgtgtctacaaatccctggggaccaagggagcaacaggatagtgtgatttccaaaaatatttctagatgaaaagtgtttcatgaattgatgaaaatacccttgaagagagctatgctccatagacactcacctgtctgacaaatggccatataggttgcctcccaccatcattccagccatgaatagaaatttagctactgaattcagtggttgagattcgcataccagatcccactggaagaaaaggaaaccctcatatcaatgcttatagcccctcagtgtaaccttatcaaaatgtcttaaaatagcctgcaagtttcattctatcttcctccctagcttcccttttctgcattacctgatattcactgttcaggtctcaacttaagcacaactttctcttggaagctattcctaaacttttagatattattagtgcccagttttattccatactaaatggttctcaaccttggccacacagtgaaatcatttgagaacctttaaatatttttggttgcctaaatttcacccctagactttctcatatgattgttgtaagatatagtctggacttggaggttttcagtgatttcccagaggtttataattttcaaccacaggctgagcattctttacttagcagaacattttttaacacattattcataaatgcttgcttaaattttggttttactaaggataaaagcactatgatagcagggtcacatctacttttgaattcattagactcattaaatgtgcaggtatctggcattcagtagagaagcaattaatgtttcctgaaagaatgaagaataagcacctacatgtgactaaaggctggaagcacaatcatttcttgtgttattctaaacagccaggtcatgtacacaagagaggaaaatgaggcctcttaccttagtcacaatggtggaagggaaggagctttggtcatatacccagccatccacacagggctctgtatctggctcactcgtgttggggaaggtcccattcagatgaatgagcttccactggggatggacaaagcgacgacacttctctggcctcagatttgagtcgaatgggatggagattctcaggagggcatcctggctgagggtcccagggtcattgtcagggatagtgtcattgtccagtatatgaacccagcagcgatgatcaagtatgaatgctgcgaagttctccagctgagtttgatggtatactatgacgttgaacattataaggaaaaccatctgaaggatctggaatctccccaggcctccaacttgatctaggaggtcctgaaaggccattgaggctggacaagtgatccccaagaggagacaaaatgactgtatccagataagttcaaagagaaaatatttcctttccttaaatcacactaagtgtgtgtgttgatcctgaccccactctcttcttaatgggccctctctcccatctgcagcagggtcacggaagcaatttcctcaagtagttttggggtcaggtaggtatctgttttctttagggtcacataagaaataattggctcagatacttccaaccattttcaatgaaatgtgtttaaacattagacatctacttattgatgtctttagtagctccccaatagcagcattgaactttggtctgcacatttttttgtaaacaaactaaaataaatctgctacttggtatgcagtctttccagaacgtgtaatctgtgggactcaaaggcaaagtgctttttcttttctctgtgaaaagaacagaaagcaaatgtctttcttgttaagtaccaatttttgattaaggattaataaacacaatctgagttgaattaaaatgagtaatatggtgcaaaccttccattttgttgactgatgttctgcttcatgccaaagcataccacaaactcacactggaagtaaattacttcaaatgtggggagagtgggtagtgataagaaccagagtagtaagccagtgctaagctcatatggaggtttacttttactggcttattgattctttcagatattatttgtggggacattttctgtgtcagtatcttgaataatgtgtacaaccaggttcaaaaatcttgcagttcagtgagtaagatagagtacataaacaattgtaatctgatattgtaaatattatgtgagacgcacaatgtgctatggaagaattgcagacaaaatataggagaaaattgcaccttgattaggactaaaattctttaaaatgtatacctcattgaggtataattcatttaccatacagttcacccttttaaaaaaaatttatttatttatttttattatactttaagatctagggtacatgtgcacaacgtgcagatttgttacatatgtatacgtgtgccatgttggtgcgctgcacccattaacaagtcatttacattaggtatatctcctaatgctatccctcccccatcccctaaccccaagacaggccccggtgcatgatgttccccttcctgtgtccaaatgttctcattgttcaattcccacctatgagtgagaacatgcggtgtttggttttttgtccttgagatagttggttgagaaggatggtttccagcttcatccatgtctctacaaaggacatgaactcatcattttttatggctgtatagtattccatggtgtatatgtggcacattttcttaatctagtctatcattggtggacatttgggttggttccaagtctttgctatcgtgaatagtgccacaataaacatacatgtgcatgtgtctttatagcagcatgatttataatcctttgggtatatactcagtaatgggatggctgggtcaaatggtatttctagttctggatccttgaggagtcaccacactgtgttccacaatggttgaactagtttacagtcccaccaacagtgtaaaagtgttcctatttttccacatcctctccagcacctgttgtttcctgactttttaatgatggccattctaactggtgtgagatggtatctcattgtgggtttgatttgcatttctctgatggccagtggtgatgagcattttttcatgtgtcttttgactgcataaatgtcttcttttgagaagcatctgttcatatactttgcccactttttgatggggttctttttttcttgtaaatttgttggagttcattgtagattctggatattagccctttgtcagatgagtagattgcaaaattttgctcccattctgtaggttgcctgttcactctgatggtagtttcttttgctgtgcacaagctctctcatttaatt

SEQ ID NO: 915535 - DNA, 4001 bp, Homo sapiens
taacaatggagtttgcaatcctgctttttttttttttttgagacagagtctcgctctattgcccaggctggagtgcagtggcgcaatctccgctcactgaaagctccgcctcccgggttcacgccattctcctgcctcagcctcccgagtagctgggactacaggcgcctgccatcacacctggctaattttttgtatttttagtagagacggggtttcaccatgttagccaggatggtctcgatctcctgacctcgtgatctgcccgcctcggcctccgaaagtgctgggattacaggtgtgagccactgcgcctggcccgcaatcctgtttttaaatgaggggtcagggcggcatgagcctgagaaaaggttgttctattggcaggaaggtgagacccgagagaggctggagggcaggcagggctcaggaggggcaggctgggaggggaggctggaaaggggttgctgggctgggtggccggaggggagtgggctggtaagaatctctcactcagtgtcatgcagttgagggagatgccagccagagccatgcccgagaggagccggaaggcgcagtagatggggaagttgggtgcgaaggctgcgcaggtccctgacacagctgtctgcaggtagttcaagatgagtaccttccggcggcctagcctgtgggaggaggggagacttgtagcagggccctggagactgatgggggtcaggctgagccaggagaggagggctcaccctggatgatgcctgggctggggccttttgaggacctctgaagtatgaggctggtgctgtagatcctcaaaccagcgccggctggcaatgccaagctcccacctagacaccctgagcccagctgagcccctaatcccagcccagcccagccccttgaccctacccaggactgacctgtctgcaaggtagccgaacaccatggctccgagcagcacccccaccatgtacaaggactgggccagctggcgtagggccctgtgagagcacacaaggtcccactgtggggagaggagcaagggtcaggcagagatgagcctggcttcagagaatccccttcccccacttcagctggtcctctggggtccatgtcaccctcttcctccggcactttgccctttgcctctctggtcctgacagctgagagcatttttctttttaactcagcagttaaaaaactcagcagttaatttctccatgtactttttttttttttttaacaaaggcccccatcttcccatcttggcccctggatggggagccccaggtgctcacctcagtcacgatggtagatgggaaggtgctgttgtcatagatccagccatcggtgcagggctctgtggcccctgtgccattggcttctgtgccattgagaaagggcagtccccactgcggggaggtgaagcggaggcaggactcaggctgcccctgcctgtcccggggcagccagacctccagccccccgttcttgctgaggttggcatcggcaggcgggcggcagtggtgggtagggatggcagcagtgaagttctgcagggtgttgtgagaagccatcaggagcagggggaggaccaccagggtgacctggatctgctggaagcggccgacaccccccacctgctgcaggaggtcattaaaggccattgggccaggcccagcccagtggctgggggctgaggccttccagtcccaggacctctgtctgtctgcctgcctgctgtccttcgctggaggagcagcactgccgttgcctccgcagctgggttgctccgggagctgagtccgagctgctctgtggggggacagcagcctccttggctgctcctccttcttccccggtctccctgatctgtccctcccttttcccttgcagcttctcctcactttgggggtcagggcagctcagctttcagggtctgctggagacctgacccttgcatgggcagtttttaatccttggcctggagggaatgagttaaagtgtgacttggtatcagaaggattaaccctccaaggattccttgtgtcagtggaatttctccaagtggttataaagggcaggagagggtggactgaataggagcagggagaggggtgtattaggggggcatctgggggcagggggggccagagtgggatctattggacctatttgtcttccttttaggaaggagactgggctctgggaagtgtggtggcctcttgaggagtttctgccctttttagtggatgagatccaaatagtctgcttttgggaagggttgccagggaaattacagggtgcccagtcaaatttgcattttaggtcaatgaagagtttttaaaagtatgagtatgtctctaatattgcatgagacatacttatactaagcaattcttcattgatttgaaatgcaaatttgactgggcaccctgtatctttatttgctaaatgtgacaaccccagtctttgttcttctggggacagctcacatcttatagaaccatggttttattcatttggaagaaacaacagaagtcagaggccgctcttggagtgggacctaagaccaacgtcatacacaatgtcgggtgattcttccagtgattcttctgacccttccaagggtcagatttttcccttagtcatattgtcttctgtccatagtgtcttttttcttttcttttcttcttgttttcttctcttctcccctcccctcccctcctttgtcacctccccttcgctcccctcccctctcctcccctcttctcttctcttctcctctcttctctttctttttgagacacagtctcactctgttgcccaggctggagtgcaatggtgcaatctcagctcactgcaacctctgcctcccaggttcaagtgattatcatgcctcaacctcccgagtagctgggattatgggcatgtgctaccacgcctggctaatttttgttatttttagtagagatggggtgtcaccatgttggccaggctggtctcgaactcctgacttcaggtgatctgcccatctcagcctcccaaagtgctgggattataggcgtgagacaccatgcctggcctctttaatttatttttgagatagggtctcactctgtcatccagcctggagtgtagtggcacaatcttggcacactgcagccttgacctctccaggctcagattatcttcccagttcagcctcctgagtagctagaactacatgtgtgcaccagcacacatgtatttatttatttttaagagatgtggttttgctatgttgcccaggctggtcttgaactcctgggctcaagcaatccacctgcctcagccttccaaatggctgagattacaggagtgacctaccgcacccagccatagtgttattttttaaaacaatgagcatgaactcactgtgtttttagccacaactctaagacaatcacgtgaattcctccaacagagttttggctcctgagttacatgtgatcagggaagtgtggagctctgatttgatgggtttccatgggatccagttggttggatcccagattgaggacagtgagagagagtagatggcagcttcttgttattaacttatgcacttcatattatataaaacatggactctggagtcagtctacttggacccacatcctcactccacacttactggctgtggaactaggggcaagtgactaaactcctctgtacctcagtgtcctcatttgcaagatggggataatagctatgttggctgccttgagtttttggagcattaaatgaactaatataggtaagaagcttaaagtagctcatatgccctgtaattcagtggttactggctcttcttatttgtttctggtgaaaaggtgggactatcacattgattttagaaagaaaatatgcctaagtatatcttatcctaagaacggtgatttttgactggcggtgattttgccccccaggggacacttggcaatgtctggagatatttt

SEQ ID NO: 915536 - DNA, 4001 bp, Homo sapiens
tctcatcttcatcctatcataggctcctgactggcctgtcagttcattgaagagtctgatttaactctggatttccccgaggtggcaggtgagagagtcaatgaatcagtgaagggctgtgggaatgagaggtgaacccatgagtgactgtgtgtgtgtggatgagacattttctgggtctgctgtggagtgtttcaagcctcccctctgtgcggtccctcctccacagccctcccaccttggggtctttgcacaagacggacttttcctcctttccctcactgcctgtttggcccttgactgatgtttatatctcagttccaggggcatttctgtagggaggattccttcaacacccattccccacgccctcactctcacacccaccccagaggtcggtcatagtgcaaggtcactttgaagttgcaattttacacttatttgtgtggtgttttccttaatgggtgctatctccaccgggctgtagaccccctgggagcaggcatggtgcatttttgtattcccagagcttagctctgtgcccgtcacagaacaggccctcagtagcagtttgttgaagcactgcttggactctgagtgggaagaagccaagggtcttggtgcatgagcttctgcactcaggtccttcctctttgcctgcccagtgacctgtcctcagttcctgggaacaccagaccccagcctcctctgctgcccaccagcggtgcagggtatgggggtacgtgggtaagtggagggagagggtttgcccaggcatacctctgtcacaatggagtccttggtgctgttgtagacccagccatccaggcatggctccatggccctctgggtgtcattgggcaggctggcattgggcggatgtacaaaacggaggcacctctcaggcttcccatttgggcccatggggagcacccaaggccctgtggaggcattgtggggcgggcgacagtggtggacaggggtggcggctgtgaagatctgcagcaggttgtggttggccatgttgaggatcgggaggcccagtatggctacatgcaggaactggaaatggcccatgcttcccacacggtccaggatctccgagaaggtcatggcactggggcaagacgagccagagctgtgggcagggcataggccagggagaggtatatttgtgcctggtagtgcgtgggtctatggaacgatatgtgggagggtgaaccaggtggatatgcgagcacaggtgtgtggagcagagcatgtgtaagtgtgtaaagatgtggaagctcaggcatgtggagccgcagattcttgtgtggatgtctgaggaagagcccagctgcacggagggctgtgggatcaaaggtggaagtgtgtgtccaggtgtgtggacacaaaggtatctatgggtatgtgctcatttaggctgcagcataaggacacagctgcgtgagctcgggtatgtgttgtgagcgtgtgcacctgcggacacgagcatgtgtgtgctcagctaggctggttgcacatgctgcatgcatggagcagtgcaggacacgtagcagggaccaaggggcccagccttggatgttggctacaaaggacagattagagggtgggtggtgaatgtccccagttgctccaggcagatacacagggttagcagagttcaggttgtctgctgggaaaggcctccccaagctcagagcctcctggcttctggcagttccctggggctgggcccaccatgctggagtatctgtaagagcccgaagcaggtctcagagggcactaggggcttggctagtcgcaagtggagcctggccttgggagatccctgggattcctaggtgcctgggctggggaggccctccatccctcctcacctggtggccgggtctggatccgatggggctggtgatcagtgtagttgaggtccctgctctgtcctaggggccggcagctgctgtagtagggcagctcagctctaacaagctgtgtttgtgcctcccccaggggggcttatataaggcataagctgtttcccgggctaatgtttgactttcttttgcggattaacgtcactggcagggagagtgctgtggacccaccaagcccagctctcctcaaagggctgcctcagcgagggccgctgggggtggggcagcgtggctgagcctagcagggctgctggctggacaccacgggcccaaatgggaagtctgagacgtgcctccgttttgtacatccgcccaacgcgagcagccctggcaggctcaccgaggggagattctgggaaggaatctggcctgacctctgagggttcaaggtccctctcaactgatgttcagaggacttgatgctgaggacaaccaatgggaaaggcactggtgcccgtaagcaggcagcattctcctgtgtgctacctcccctgcctggcacctcccgagtaggggaaggggatttgcctctcaggaagtgttagggcacacccagacagaaaatgtcactttcatctatccctgaggacgcagggctgccatctcctgggcccctggggcagccaggacctccgtgtctgtgtctctgacacaggtgaactgcccccttccatcccaccctcaatggacaggcttctctcctgatcagccgcttccccctggggaccaaatgtagtccctgctgttttattttcactctgaatattattttaattatataataatgtgtgtttcctgcataaaacatgggaaatacagacaagccaaacaaaacaaatcaaaacaaagcaaaatgtccagtctcacctgagagcctatctgttcttctggtcttttcctcagcagagacttcagtctaagacctcaacttctagccaccaacattaggctcttttaaccctcacggcagccctgtgactagtctagcattaataattagggaactgaggcaaagggagattaagtgacctcctcaccatcccccagccaggaagcacagggcaggggcagggtggccctaagcctattccctcccttagaaccaacattctctacgaagcctatgggggcactgtactattaatatattgcctctcccttaaagagccacctagaggtctgggcggggtggctcaagcctgtaatcccagcagtctgggaggccaaggtgggtgggtcacgaggtcaggagttccagaccagcctggccaatatggtgaaaccccatctctactaaaaatacaaaaattagccaggcatgtggcacgcgcctatagtcccagctacttgggaagctgaggcaggagaatcactggaacccaggaggcagaggttgcagtgagccaagatcgtgccactgcactccagcctcggtgacagagcaagactacgtctcaaaaaaaaaaaaaaaaaagtcacctaggctggtcttcaacatcactcctgcctgcctttacctctctgttcctacctccagaaacccctgggagctgccccttcccacctgctctaggggctagggaggggcccctttagggctccccttcttggttggggagggctttccattctcctcctgggcccccctctccaccaaggcagtatccagcccccagggtccagactgagcttccctcctaccgcagggcagggtcagctggtcaacctgggtccagccctgcccctcggcttcccacctgggcccagcagttattgatgttctcagagtggcctgaggcagggcgagatctggagtcatcaaaggaagattaaattatgctccaaggcagccaaggggttgttttaggaagattttcgactgtgaggcttgcagtgagctgggctgccgccctgagctccccctgttctgggcatttggcctcttggagattttctggttcctaattggcttgggttatccatctgttcctgtcctagtggaatgttgtttaaaggagcctggtgactccccgctgaggctgctggagttaagccagagtatac

SEQ ID NO: 915537 - DNA, 4001 bp, Homo sapiens
tacctcacatggttctaaaaagctgtttttgcaaagacaataatcaagtttctacacataatttttcaacacaccaccaatgataccttcaaatataccctacaggttttagaggaatgcgtgttcatcacacttggaactatgatgtaatgacaattctctgggcacaagctatcagctcacagtgtccaggtaggactggacctggtactcctggccaaggctgaatcctatgtgatgaaacgtcttcctttctattcccttagttaactctttctcatatttctaaaccacatgttgtggtaccttctctctaaaacctgtcttgaaacacccccagttcacatggagatatcatttctgtgtcctgcatacagagctcaaattttaaaaatagcactcaaaacacggactaaaaatttccttttctgtttggggatcagggcagcctcaggagaatgtaatttgcagtaagtaattctagatgaaataatgtttcataagttgataaaaaatgcccttaaagagagctgtgttccatacacactcacctgtctgataaatgaccgcctaggatgcctcccaccatcattccagccatgaatacaaatttagccactgaagtcagtgattgagagtcacataccagatcccactggaagagaaggaagccagcacatcaatgcttattacccctcagtgtaacttgatcaaaacttcttagcatgatctgcaagtttcctaatattaagtctctaacttcctctgtggcttcctttctcagcattacctgacctttgttattcaggtctcaacttaaacataactttctcttggaagactttcctaaacctataggtttttatttcatactaaatggttctcaaacatgaccacatggtgcaatcacttgaagacctttaaaaacttttagaaacctaaatttccctcttagaccttctcatatgattgttttagggtatactctgggcatggaggcttttctcaatttcccagatatttctaatttgcaatgacaggctgagcatcactgacctagcagaacattttaacatattatatataaatgcttgtttaaactttggtctccctgtgacttaaagcattataatagcaggatgccttctactttggaattcattactcaaaatgtgtaggtgtcagacatttaataaagaagcaattagtatttgctgaaagaatgaagactaaggacctacatgtgactgaaggctggaagcatgattattacttgtgttattctaaacacccaggtcacatactcatgagacgagaacagagcctcttacctcagtcacgatggtggatgagaaggagattctgtcatacacccagccatccacacagggctccatgtctgcgtcacttgtgttggggaaggtcccattcaggtgaaggagctgccactgaggatgaacaaagcgacgacacttctctggcctcatgtttgagtccagtgggatggagattctcaagagtgcatcttggctgagggccccagtgtcattgtcagagacagtgtcattgtccaggatgtggacccagcagcgatggccaggtatgaatgcagtgaagttctccagcataaaatgaaggtatgtagcaacagcaaagattgagagaaaaacagtctgaaggatctggaatctccacaggtcaccagcgtgacccaggaggtcctgaaaggccattgaggttgaacagttgatcctcaagtagaggcaaaatgactgtatccagagaggttcaaagagggaaaatgttttctttccctaagtcacactaaatgtgttttgatcctgaccccactctcttcttgacgactgtgcttcccctctgcagcaggaccgtggaaacagtttcctcaagtcgttttggggtcagataggtagccgttttctctaaagtcacgtaagaaataatttgctcagatactcccagtcgtttacaatgaaatgtgtttaaaattctactttttcatgtctttagtagctcccaaagtcagcactggactttggtctacacttttctgtaaacaaactaaaataaacctgctacatggtatgcggtcattccaggaagcataattttggcgactcaaaggtgaggtgctttttttacttctctgaaaacaacagaaggcaagtttttccttgttaagtaccaatttttgattaagagttaatctaaaaaagtcgaagttaaactaaaataagggtactgtggtacaatcctttcattttggtgactgatgttctccttcatgtcaaatcacaccacaaattcatgctggaaatacattgcttgaaatgtggacagaatagatggtgatgaaaagcagaggagtaagctcatatggaggtttacttttactggcttattgatttttcagatagtatttgtgaagaccttttccatgctagttcctaaagtaacgtgtgtgacaagttcaaggatcttatagttgagtaagtaagagagagtacataaacaattgcactccaacattataaatattatgtgagatgcactatgtgctgtggaagaattggaggcaaaatatgggagaaaatgtcaccttgattaggactaaaatttctattaaaatttaaacctccttgaagtataattcatttaccatacaatttacccttttaaagtatacaattgaatgtgttttgatcattcaaagagttgtgcaatcatcactactatatcgttacagagcattttaatcaccacataggaaaccatacccattagcagtaactctccatttttattcacacatcccacttagcaaccgctaatttactttctgattctaaggatttgcctattgtggacatttgatttatacattgaatcataaaatacttgactttgtatatctggcttaattcatttaacataatgtttctttttcttttttttaaattatacttcaagttttagggtacatgtacacaacgtgcaggtttgttacatatgtatacatgtgccatattggtgtgctgcacccattaactcatcatttagcattaggtatatctcctaatgctatccctcccccctacccccacctaacaacagtccctggtgtgtgatgttccccttcctgtgtccatgtgttctcattgttcaattcccacctatgagtgagaacatgtggtgtttggttttttgtccttgcgataggttgctgagaatgatggtttccagcttcatccatgtccctacaaaggatgtgaactcatcattttttatggctgcatagtattccatggtatatatgtgccacattttcttttttttaaaattatactttaagttttagggtacatgtgcacaacgtgcagattagttacatatgtatacatgtgccatgttggtgtgctgcacccattaattcgtcatttaacattaggtatatctcctaatgctatccctcccctgtctccccaccccacaactggccccggtgtgtgatgttccccttcctgtgtccatgtgttctcattgttcaattccaacctatgagtgagaacatgcggtgtttggttttttgtccttgcaatagtttgctgagaataatggtttccagcttcatccatgtccctacaaatgacacgaactcatccttttttatggctgcatagtattccatggtgtatatgtgccacattttcttaatccagtctatcattgttggacatttgggttggttccaagtctttgctattgtaaatagtgctgcaataagcatacatgtgcatgtgtttttatagcaacatgatttataatcctttgggtatatattcagtaatgggatggctgggacaaatggtatttctagttctagatccctgaggaatcaccacactgacttccacagtggttgaactagtttacagtcccaccaacagtgtaaaagtgttcctatttctccacatcctctc

SEQ ID NO: 915538 - DNA, 4001 bp, Homo sapiens
cctttcccccctccctgggccccccagaggccagctgtttcacccaccggcagcgccgttgcccagggccacgcggctggctcacacccacagatcctcagggactcgtaaccttcacctcggctttccagggctgggccatccaccaccgacccccgctccgccacctgcccgctggtcctgctctcactctgccccaggcactcactctggatggctcttccacactccagcccagcactcacacagaaggggaagctgccgggggaggaggcgaggggccgcagggattggccgtggggcggggtggggcgggcttgggtgggggggcactttctctttcactttgggcaagcagaggcttccggcagccttgagaggagagatgagcaggggtgggtctgactcaggctgacctggcacagcgaggccacccaccgacagggacctcagcgcgtggccaccacacccccagcacacatgtgttcctgtctgctgcctgtgggttgaaccctatagcatttcctggcctggatctgtctagggctggtactctgagaatgaggctttctccgggccagggtaccctgtatgtacctggacagggaatccggtgctgtggagcagagatgggctaacacccactcgtgtctgtgggatgtgtgtctgctaggggcagatgcatgtcagggaagcctcatgctgggccacaaaaaaggcctgctgtccacagggaagagctagctgggtgccagaggccactgttgccacccacaggccctgctcacctggcaggtccagagggcacacgagctggcatgcccagagccctctgccccaccacccgtcccactcagggcttcaccgtcagacctgcctttccctgcctcagccagtggtggtgacaagctgacctctgaacttctacctgatccctcctagccccccccacccctgccgccccactcttcgggtgcagactggccacagctctccgggctgcgctgggcccttcatctccactctagtccctcccaggggtgtaccctggccctccagggactgagcaacccccttcctcctgggagcctatctccagtctgggatgaggacacctgcatgataggggcaatcctggaagtcaggccgaccgaggtggggagcggccattcgtcccaagaagagaagcaggcccagagatcccagggcggagaggcaggcctgggcccgcacgtcacccagtgcagcggagaggagcttctgggtggagaatgatgacagtgaggggctctgcctggggaagaaccggcaggggttccctctgaacgccaaccccgcctttctctgccctcactcggcagttcccacccctggtttatgagacagctggccagggccctccccctgcactgatgttgctatagaaaccctgcagccccagccgggccccgggctgtgagccgtcactgtccccccttcatagtcaggtgaactgaggccacaggcaagccagggagacagcaggagagcagagaccaccccacaggaagataccgctgcttccgaatctgcaggggtaaaatcctccacccaagaagccgccaggctcctcctacccccaagaaaggcaatgggggtgaggctccgagtctggccggcggctccccattcaatctcccgctgtccccgtcctcttggggcggtgctttctatcctgctggctggagggtcccggaaggggactccaactgcgcgatgcctcggccagaggacaaaggagaagcgggttgggggccgctctctgcgctcggaggccggctcaggcccctgccctactgctggggctcagccgaccgctccgtcctccgcctggccaccgcgactccggccacgcacgtgtccacagatgtccggtgaactcccacgtgtgcgtcccacacgggtcggcctttcttccttgggctcgggccccggacacccaccctcggggacacgtatgtgcggggagcgcgcccggaaccgtcggggccgagcacggcgtctcacgccagagcagccgcggatcggagcatccgctggtccaggaccccccctcccgcccgccaggccacgttgttcgggcagctgtcacctccctcggccgccgcagcacctctcgcccccgcagcccggccgcgttcggatgggcgcagcagaagggagccgccgggcagacactcaccacgctcgccgccgccgccgcgctcgcctgcccgccccgcgctcggccagcacctaggcggggaggcgcgtccgctcggcgccgcgcgcgctccgccctcggcctcctccgggcttcggctccccctcctggccgtcgaggctactgcgcccagccaggccacagccacgcgcccacccgccccctggccgtgggttcccccgggcagggtggcagttctgcgcgcagaggccgggccgcgcgtccccaaggtcctttcttggtttccgggcctcaggcccctgcaggcacaaggacccgcggggcgcgggcaggtggcagagcgccggtggatgagggtgccctgggggaggcgtggcctccagggcagacacaggtgatccgtggaactgctgggccagcgcaatggagaagtggaggcacaaccccacccgccgaacagcgactttgtatccaaagcaccccacttggggctgggcgcagtggctcacacctgcaatcccagcacttttggaggccgaggcaggcggatcacttaaggtcaggagttcgagaccagcctggccaacatggtgaaaccccgtctactaaaaatacaaaaattagccagcgtggtggcaagtgccctagtcccagctacttgagagggtgacgcagaatcgcttgaacctgggaggcagaggttgcagtgagctgagatcatgccactgcactccagcctgggtgacagaaactccatttaaaaaaaaaaaaaaagtagcccatgtgggttactttgtagcacagctcctccctcccaggaagatgaggacccacaggaggccccaggcacagtgggagaggacaggaccaggatgtggggcacctgtgcacacaggcctccctccccgcaggggccaggcctctaccccaccaccctccgccctccaacggcttctccatccaacaaataaatcaagctctgaggtgaaagaaacagtgcagttttgttgctcacagggacccgtccccacacactggagagacttgaaggtgggggctctgcccatccactggggaatatctgggccagcctaaaagtctgtggggcctaggcctgggcaggctctgggggctgtggagccgaggagccaggcagagcggggtccttgggggccaagcccatgcgtcggatgctgtcctggtacttgcggcggccgagctccaagactgcgcgcacctcttcagccacgtcctgccggtcactctgctccagggcctgcaccaggagccccacagcccctggctgcccagcctggcgctcagcccaggagaagagcatgtgacggatctgctcatccagatcatccctgcaggcagaggatgggcgacagaggggtcctgtccacctgcccaggaccccccaccacactctgcctcggagtgtgggggagttcccggctcctggggccaggtgcggccagacctttcctttccagcctggtgtttgcccttcccccacctcccctggaagaaacttctgtcagaatcaggtgggccctccaggcagccagggctcagccctggggctggcagccagcgggcagtgggagcctcaccggaactcgtgccggatgcgctgcacctcccggtaggacacccccaggtgcagggccacggctggccagtccagacccagacgcccagccacactcagcaggttgctctgcgtcagaaagccggtctcggcatctcccagattcaagggtgccaaggagaggccagccccccgccgtggccc

SEQ ID NO: 915539 - DNA, 4001 bp, Homo sapiens
cgaggggccgcagggattggccgtggggcggggtggggcgggcttgggtgggggggcactttctctttcactttgggcaagcagaggcttccggcagccttgagaggagagatgagcaggggtgggtctgactcaggctgacctggcacagcgaggccacccaccgacagggacctcagcgcgtggccaccacacccccagcacacatgtgttcctgtctgctgcctgtgggttgaaccctatagcatttcctggcctggatctgtctagggctggtactctgagaatgaggctttctccgggccagggtaccctgtatgtacctggacagggaatccggtgctgtggagcagagatgggctaacacccactcgtgtctgtgggatgtgtgtctgctaggggcagatgcatgtcagggaagcctcatgctgggccacaaaaaaggcctgctgtccacagggaagagctagctgggtgccagaggccactgttgccacccacaggccctgctcacctggcaggtccagagggcacacgagctggcatgcccagagccctctgccccaccacccgtcccactcagggcttcaccgtcagacctgcctttccctgcctcagccagtggtggtgacaagctgacctctgaacttctacctgatccctcctagccccccccacccctgccgccccactcttcgggtgcagactggccacagctctccgggctgcgctgggcccttcatctccactctagtccctcccaggggtgtaccctggccctccagggactgagcaacccccttcctcctgggagcctatctccagtctgggatgaggacacctgcatgataggggcaatcctggaagtcaggccgaccgaggtggggagcggccattcgtcccaagaagagaagcaggcccagagatcccagggcggagaggcaggcctgggcccgcacgtcacccagtgcagcggagaggagcttctgggtggagaatgatgacagtgaggggctctgcctggggaagaaccggcaggggttccctctgaacgccaaccccgcctttctctgccctcactcggcagttcccacccctggtttatgagacagctggccagggccctccccctgcactgatgttgctatagaaaccctgcagccccagccgggccccgggctgtgagccgtcactgtccccccttcatagtcaggtgaactgaggccacaggcaagccagggagacagcaggagagcagagaccaccccacaggaagataccgctgcttccgaatctgcaggggtaaaatcctccacccaagaagccgccaggctcctcctacccccaagaaaggcaatgggggtgaggctccgagtctggccggcggctccccattcaatctcccgctgtccccgtcctcttggggcggtgctttctatcctgctggctggagggtcccggaaggggactccaactgcgcgatgcctcggccagaggacaaaggagaagcgggttgggggccgctctctgcgctcggaggccggctcaggcccctgccctactgctggggctcagccgaccgctccgtcctccgcctggccaccgcgactccggccacgcacgtgtccacagatgtccggtgaactcccacgtgtgcgtcccacacgggtcggcctttcttccttgggctcgggccccggacacccaccctcggggacacgtatgtgcggggagcgcgcccggaaccgtcggggccgagcacggcgtctcacgccagagcagccgcggatcggagcatccgctggtccaggaccccccctcccgcccgccaggccacgttgttcgggcagctgtcacctccctcggccgccgcagcacctctcgcccccgcagcccggccgcgttcggatgggcgcagcagaagggagccgccgggcagacactcaccacgctcgccgccgccgccgcgctcgcctgcccgccccgcgctcggccagcacctaggcggggaggcgcgtccgctcggcgccgcgcgcgctccgccctcggcctcctccgggcttcggctccccctcctggccgtcgaggctactgcgcccagccaggccacagccacgcgcccacccgccccctggccgtgggttcccccgggcagggtggcagttctgcgcgcagaggccgggccgcgcgtccccaaggtcctttcttggtttccgggcctcaggcccctgcaggcacaaggacccgcggggcgcgggcaggtggcagagcgccggtggatgagggtgccctgggggaggcgtggcctccagggcagacacaggtgatccgtggaactgctgggccagcgcaatggagaagtggaggcacaaccccacccgccgaacagcgactttgtatccaaagcaccccacttggggctgggcgcagtggctcacacctgcaatcccagcacttttggaggccgaggcaggcggatcacttaaggtcaggagttcgagaccagcctggccaacatggtgaaaccccgtctactaaaaatacaaaaattagccagcgtggtggcaagtgccctagtcccagctacttgagagggtgacgcagaatcgcttgaacctgggaggcagaggttgcagtgagctgagatcatgccactgcactccagcctgggtgacagaaactccatttaaaaaaaaaaaaaaagtagcccatgtgggttactttgtagcacagctcctccctcccaggaagatgaggacccacaggaggccccaggcacagtgggagaggacaggaccaggatgtggggcacctgtgcacacaggcctccctccccgcaggggccaggcctctaccccaccaccctccgccctccaacggcttctccatccaacaaataaatcaagctctgaggtgaaagaaacagtgcagttttgttgctcacagggacccgtccccacacactggagagacttgaaggtgggggctctgcccatccactggggaatatctgggccagcctaaaagtctgtggggcctaggcctgggcaggctctgggggctgtggagccgaggagccaggcagagcggggtccttgggggccaagcccatgcgtcggatgctgtcctggtacttgcggcggccgagctccaagactgcgcgcacctcttcagccacgtcctgccggtcactctgctccagggcctgcaccaggagccccacagcccctggctgcccagcctggcgctcagcccaggagaagagcatgtgacggatctgctcatccagatcatccctgcaggcagaggatgggcgacagaggggtcctgtccacctgcccaggaccccccaccacactctgcctcggagtgtgggggagttcccggctcctggggccaggtgcggccagacctttcctttccagcctggtgtttgcccttcccccacctcccctggaagaaacttctgtcagaatcaggtgggccctccaggcagccagggctcagccctggggctggcagccagcgggcagtgggagcctcaccggaactcgtgccggatgcgctgcacctcccggtaggacacccccaggtgcagggccacggctggccagtccagacccagacgcccagccacactcagcaggttgctctgcgtcagaaagccggtctcggcatctcccagattcaagggtgccaaggagaggccagccccccgccgtggcccctcggaccctcgaagtctctgttggaaggaaaaagtgcattaagccctgggctccacccccaactccaccatgtcaccctggtcacccctgggcctcggtcctgccccgcccctctgctgtccctcagtcccaccggcagcttgatgggcagagtggccatccacagggcgtctgcgcccttcctctgccgggcagcctcagcctcctcgggcacccgcacaggcaccgcgccacggtagaaggacacctgaaggggcatcgaatggggttcgg

SEQ ID NO: 915540 - DNA, 4001 bp, Homo sapiens
cgggagaggctgagaactaccactcaccagagatccagtcccccctgcacaggcacagcccccacaaacacgtccacgctcacacaccaggcccaggctggccgccctgccctgcctcccccaccgctccctgccacgactcgcgggcgctacccaggcctgcccatatcgagcccagccgagccaaacctcaccccggtacatgccgaagtagccctcggagcggacggtcttgatgaggcagtcggacctgtggccaaggggacagggtgagccagggccagctggggccagccggaggccagggtccctggactgtctagggctgatagaagaggccaagtcctcagcccagccccgaccccagtcctgacccacgtgggatctcccctaggcccgcctgcctcccgtttcccttctgtcaaacagggtggggggcacaggagcagagcccccacctctcctgctgccacatgctgggcccactccccgcgaccgcccggcacactcacatgctcgtgtacacgcgctggccgttctgctggttctgcagcctggtcttggccaggtcgatgggaaacacgcaggtgacaccgatcagcccggcgatgccgccattgatgagcttggctggcaggctgtgtggacaggggtgtcaggaccggcttccttgaccatgggtcagggtgggggtgaggcacgcagccaggactggagtctgacctgatctgcttatcagccatttaactcgattgcacccaggtaggagccgcagaggtggacgccaggccaggcggggtggaggtggaggtggaggaggccttgagggagggtgggacccaggggggttgggtggtgctccaccttcaggggaatttccaggcgtcagcaaccgccacttctgtcctagaaggatgagggaatgggaatgagtgagggtggggccacccgaagagtaatcctcccccagcctccctctctcacgcagcccctcacccaccaccccagactgaagccgtcactgcgtcctgagggtgcagcagcgggaggcacctgccacccagtcccatgctcacccctgggaccacctggcttcctttcagtccccccctccccaccgccagcgtcttcccagccagcctcacacgccgctcacgctcggggctcacgtgcaccccagccagctccggcttttaaagggccaggcacctctgggggcagtgccaggggccggggccagggtgcctaccggagcacctcgacctggacagctgtggtgaccatcccccacatccttcagcacagagagagcagcagccggcacctgcccccttcgagctaggggctggggtcccgggcgccctaagaccccccgacctgggctcagctatcccaggtatagctctcctcccatggcagctccacctagggcctgcagagctcctccccacgatgcccacaccccccacagccagccccttgcccgccccttcctcccctccacccctcccaggagtttcactcatggacacacagaagccagtgatgggacccctggaagccttgggggtgggggatggctggccttctgaggccccctgtggctggcacccccatccactacagaggaggagaggacaggcctctcccactaagcagcaaggctggggagccacagccagcctcaggggcctcccatagggtcatggccataaaatcccagcttcgggggcctttcccccctccctgggccccccagaggccagctgtttcacccaccggcagcgccgttgcccagggccacgcggctggctcacacccacagatcctcagggactcgtaaccttcacctcggctttccagggctgggccatccaccaccgacccccgctccgccacctgcccgctggtcctgctctcactctgccccaggcactcactctggatggctcttccacactccagcccagcactcacacagaaggggaagctgccgggggaggaggcgaggggccgcagggattggccgtggggcggggtggggcgggcttgggtgggggggcactttctctttcactttgggcaagcagaggcttccggcagccttgagaggagagatgagcaggggtgggtctgactcaggctgacctggcacagcgaggccacccaccgacagggacctcagcgcgtggccaccacacccccagcacacatgtgttcctgtctgctgcctgtgggttgaaccctatagcatttcctggcctggatctgtctagggctggtactctgagaatgaggctttctccgggccagggtaccctgtatgtacctggacagggaatccggtgctgtggagcagagatgggctaacacccactcgtgtctgtgggatgtgtgtctgctaggggcagatgcatgtcagggaagcctcatgctgggccacaaaaaaggcctgctgtccacagggaagagctagctgggtgccagaggccactgttgccacccacaggccctgctcacctggcaggtccagagggcacacgagctggcatgcccagagccctctgccccaccacccgtcccactcagggcttcaccgtcagacctgcctttccctgcctcagccagtggtggtgacaagctgacctctgaacttctacctgatccctcctagccccccccacccctgccgccccactcttcgggtgcagactggccacagctctccgggctgcgctgggcccttcatctccactctagtccctcccaggggtgtaccctggccctccagggactgagcaacccccttcctcctgggagcctatctccagtctgggatgaggacacctgcatgataggggcaatcctggaagtcaggccgaccgaggtggggagcggccattcgtcccaagaagagaagcaggcccagagatcccagggcggagaggcaggcctgggcccgcacgtcacccagtgcagcggagaggagcttctgggtggagaatgatgacagtgaggggctctgcctggggaagaaccggcaggggttccctctgaacgccaaccccgcctttctctgccctcactcggcagttcccacccctggtttatgagacagctggccagggccctccccctgcactgatgttgctatagaaaccctgcagccccagccgggccccgggctgtgagccgtcactgtccccccttcatagtcaggtgaactgaggccacaggcaagccagggagacagcaggagagcagagaccaccccacaggaagataccgctgcttccgaatctgcaggggtaaaatcctccacccaagaagccgccaggctcctcctacccccaagaaaggcaatgggggtgaggctccgagtctggccggcggctccccattcaatctcccgctgtccccgtcctcttggggcggtgctttctatcctgctggctggagggtcccggaaggggactccaactgcgcgatgcctcggccagaggacaaaggagaagcgggttgggggccgctctctgcgctcggaggccggctcaggcccctgccctactgctggggctcagccgaccgctccgtcctccgcctggccaccgcgactccggccacgcacgtgtccacagatgtccggtgaactcccacgtgtgcgtcccacacgggtcggcctttcttccttgggctcgggccccggacacccaccctcggggacacgtatgtgcggggagcgcgcccggaaccgtcggggccgagcacggcgtctcacgccagagcagccgcggatcggagcatccgctggtccaggaccccccctcccgcccgccaggccacgttgttcgggcagctgtcacctccctcggccgccgcagcacctctcgcccccgcagcccggccgcgttcggatgggcgcagcagaagggagccgccgggcagacactcaccacgctcgccgccgccgccgcgctcgcctgcccgccccgcgctcggcc

SEQ ID NO: 915541 - DNA, 4001 bp, Homo sapiens
cctcccctccacctgcccactgcctagccctgccctccacagcagaggctggttctggagtttgggggaggtcgcacccccaggaggcaggttcagaacgtccctctctttctcctaagaggaatgccacccagaagctgggctgggaccacagcacaacaggcctcagggcccgggactgcggcccacagccaggtggggcagaggcccagaggggactcaggacagcaggtgaggtcaaaggtgaacttcctttgtaagcccaacagggtgggcctggagagcagggctcaaggtatagggtgctcacctggctctcccgccctctgcaggtgtcaggcagagtggccttggaaggcagaggcagcaccctcccacctgtgccttcctctcttcttcccatcggccactccccagaggactggggacagctggctctggggtgctccacggaacccagactttttttttttgacacagggtcttgctggtgttgtccaggctggagtgcagtggcatgatcatggctcattgcagcttcaacctcctgagcttaagggctccttccacctcagcctctggagtagttgggaccacaggcgtgcgccaccgcgcctggctaatttttgtatttttagtagagacggggtttcaccatgttggccagcctggtctcgaaatcttgacctcatgatccacctacctcagcctcccaaagtgctgggcttacaggcatgagccaccgcgcccagcctctcatttcttataaagacagggtcttcctatgttgcccaggctggtctcaaactcctggccccaagtgatcctcctacctcagcctcgcaaagtgctgggattacaggtgtgagccaccatgccctgattctttttttttttttttttttttttttgtggcagggtctcattctgtcacccaggctggagtgcagtggtgcagtcatagctcactgcagccttgaactcctgagctcaagcaatcctcctaagtagctgggactacaggtgtgagccaccatgcccagctaattattttgatttttttgtagagacaggggcctccctatgttgcccagactggtctcaaactcctgggctcaagtgatcctcccgccaggccggaactcagactttggtctctgctcctcccatgtcacccatcttcccgaggaagtgacctaccattgggtgtgatgtgacagaaggaagaaaaatgtctcaccagagatccagccagccacaaattcctccaccggcattgtctgggcttgcgggaactggtggctccagcagaggagacagagttgaattcccccctctccctcccctggcccacgctgataacctcccactaatgtttaaccctggcgggaaggtgagaattggcctggtgcccagacctccggcaactggcagaggagagcgagccagttccggtgaccctggccacctggaggagtcgtgcagagtacagtctcacgggccaggcgtgccgggaccacagaggccctgatccccgagcccggccaatgatcctcgctctgaggatggcaactgggttcctgccccatggtcgggcccctccagggctgccttagtcagcaagaggcaagcccctgcctgcccagccagcccagctccactcccattcatctccaccaaggggcatggccgcccccatgccacagagagaggccgggtgcggaggtagcgtggccaccagggggtaggcccagcccgcatttgccgctgcgtggcagggtggggaggagccactcccaggagtgactcaccaggcctggctgttctcttcagggttgtttacgactcccccgactcccccgtgtgagtcagaaacacagccttcctcggcttcctccttcccaggggaaagataggggttttgattatttaaagtgcgtgttgatctgcaatggcaccattctgctcagtcaaaaccaaaaccctttcaaggatctgtgagccacagggtgccgcccattctcctctgacctcacgtcctgccacccacccccttgctttctctgctgcagccacccgagcctccagactcttcttcagtcagccttctgtctccaggcctgtggactggctcttccctcttcctgggcactcttgccctggcacccctccagctggggctcaaatgtcaccacctgggtgaggtctgccccgcctccccagccggaggcactgctggctcttcctctctttctccatcacagttatcacgccaacatacgatgggaagaacttgtctgtctggacagggatctctgggtgttctgtgcacagcgggtggcacagggtgggctctcaataaatcctgagtgactgaatgaacggaaatgtcagccagcagcatcagcggcagcctggggctccagttccctcttcccatcaccaaacggccctgggaaacatcaaggcccagtgacacctgcaccctcccctccagatctccccgcagctcctagtctcccatgggggacgcccaaggcccagtccttctctcccttctcctctcactgtggccaaggcagaacccacccacccctgctgctttctcccgggtggacagattcgggaaacaggacctcctacctcctgcctctggagctgcctggggctccttgggccacccccaaagatcatcctaaaagaccatccccaaagactggcctctcgtggtggcttgggctgcagtcctggttctgcttcttattcctgaaactgcctttgcaaaaactataactgatacaggccaggcgcagtggctcacgcctgtaatcccagcactttgggaggccgaggcggaaggaccacctgaggtcaggagttcgagaccagcctgaccaacatagtgaaaccccatctctaccaaaaatacaaaaattagccgggtgtgatgacgggcgcctgtagtcccagctacttgggatgctgaggcaggagaatcgcttgaacccgagaggcagctgttgcagtgagccaagatcatgccactatactccagcctgggcaacagagcgagactccgtctcaaaaaaaaaaaacaaacaaacaaacaaaaaaaaaaccctcctgtctctcgtacagccagctctgcatgaattaaactctccttattgcaattcccctgtcttgacaaattggctctgtctaggcagagggtaaggtgaacccaatgggcggttacattatctctctcagtgatgttgagcaacctcttctgtgggccttggggtctattattgtttgccaaagtaggacagcagtcgggctaattgatgtctaagcctctcagctctaaaggctggaggccgcctcctccctcacttcagaatgggtctcattctcttttccaatctcaccgcctcaccccagtttgagaaagaccctcattcccacttccctacagccttgctgaagggaagcccacctaagcatggcgtcatcttgtgaatctctagctcacaacctccaaaatgttcttactgtctaacacgcctgccccatatctgtcatcctggggttcaaggcctcccccatggtgccacccacctgctatgctctcacacagcgggggtctttcctggggtcctaaccatgctcgtgcagttcccactacctggaatgcctttccttccccaccatcagcctcccggactctctcccagtgcccctccttgactagacccgggttctagcctccccaccaccaccgcagacactcccaggtgtcagtctttgacataaaacagagatgtgatactcacctcttagtgagttctaaggattaaagcactttaaaaagtggctggcacgtaaatggcaactgctaatacttatttccactctcaggacgcatgagaatgacacaggaaacaggggaaagggcctggcccagtgccccacacacagcaagtgagcagagacttttcctgcctgtagcatttcat

SEQ ID NO: 915542 - DNA, 4001 bp, Homo sapiens
gggactaagaccccaggccccacctgaggatgcacacccaagagggaagagccagccaaagacgtacgtgtcctcgctggagcccatacccgggtatcccaccgcctatgagccgcgggactctgggagaatcacccaggttcccacctctccgagagctttactcttctttcttcaactcataatgtcgtcgccgggatccagagcaggccctgctgccagctggccacgcagaactgcagggccctgatgggggtcatgcctgggcacctgcagaggagcttctcccctcccctccacctgcccactgcctagccctgccctccacagcagaggctggttctggagtttgggggaggtcgcacccccaggaggcaggttcagaacgtccctctctttctcctaagaggaatgccacccagaagctgggctgggaccacagcacaacaggcctcagggcccgggactgcggcccacagccaggtggggcagaggcccagaggggactcaggacagcaggtgaggtcaaaggtgaacttcctttgtaagcccaacagggtgggcctggagagcagggctcaaggtatagggtgctcacctggctctcccgccctctgcaggtgtcaggcagagtggccttggaaggcagaggcagcaccctcccacctgtgccttcctctcttcttcccatcggccactccccagaggactggggacagctggctctggggtgctccacggaacccagactttttttttttgacacagggtcttgctggtgttgtccaggctggagtgcagtggcatgatcatggctcattgcagcttcaacctcctgagcttaagggctccttccacctcagcctctggagtagttgggaccacaggcgtgcgccaccgcgcctggctaatttttgtatttttagtagagacggggtttcaccatgttggccagcctggtctcgaaatcttgacctcatgatccacctacctcagcctcccaaagtgctgggcttacaggcatgagccaccgcgcccagcctctcatttcttataaagacagggtcttcctatgttgcccaggctggtctcaaactcctggccccaagtgatcctcctacctcagcctcgcaaagtgctgggattacaggtgtgagccaccatgccctgattctttttttttttttttttttttttttgtggcagggtctcattctgtcacccaggctggagtgcagtggtgcagtcatagctcactgcagccttgaactcctgagctcaagcaatcctcctaagtagctgggactacaggtgtgagccaccatgcccagctaattattttgatttttttgtagagacaggggcctccctatgttgcccagactggtctcaaactcctgggctcaagtgatcctcccgccaggccggaactcagactttggtctctgctcctcccatgtcacccatcttcccgaggaagtgacctaccattgggtgtgatgtgacagaaggaagaaaaatgtctcaccagagatccagccagccacaaattcctccaccggcattgtctgggcttgcgggaactggtggctccagcagaggagacagagttgaattcccccctctccctcccctggcccacgctgataacctcccactaatgtttaaccctggcgggaaggtgagaattggcctggtgcccagacctccggcaactggcagaggagagcgagccagttccggtgaccctggccacctggaggagtcgtgcagagtacagtctcacgggccaggcgtgccgggaccacagaggccctgatccccgagcccggccaatgatcctcgctctgaggatggcaactgggttcctgccccatggtcgggcccctccagggctgccttagtcagcaagaggcaagcccctgcctgcccagccagcccagctccactcccattcatctccaccaaggggcatggccgcccccatgccacagagagaggccgggtgcggaggtagcgtggccaccagggggtaggcccagcccgcatttgccgctgcgtggcagggtggggaggagccactcccaggagtgactcaccaggcctggctgttctcttcagggttgtttacgactcccccgactcccccgtgtgagtcagaaacacagccttcctcggcttcctccttcccaggggaaagataggggttttgattatttaaagtgcgtgttgatctgcaatggcaccattctgctcagtcaaaaccaaaaccctttcaaggatctgtgagccacagggtgccgcccattctcctctgacctcacgtcctgccacccacccccttgctttctctgctgcagccacccgagcctccagactcttcttcagtcagccttctgtctccaggcctgtggactggctcttccctcttcctgggcactcttgccctggcacccctccagctggggctcaaatgtcaccacctgggtgaggtctgccccgcctccccagccggaggcactgctggctcttcctctctttctccatcacagttatcacgccaacatacgatgggaagaacttgtctgtctggacagggatctctgggtgttctgtgcacagcgggtggcacagggtgggctctcaataaatcctgagtgactgaatgaacggaaatgtcagccagcagcatcagcggcagcctggggctccagttccctcttcccatcaccaaacggccctgggaaacatcaaggcccagtgacacctgcaccctcccctccagatctccccgcagctcctagtctcccatgggggacgcccaaggcccagtccttctctcccttctcctctcactgtggccaaggcagaacccacccacccctgctgctttctcccgggtggacagattcgggaaacaggacctcctacctcctgcctctggagctgcctggggctccttgggccacccccaaagatcatcctaaaagaccatccccaaagactggcctctcgtggtggcttgggctgcagtcctggttctgcttcttattcctgaaactgcctttgcaaaaactataactgatacaggccaggcgcagtggctcacgcctgtaatcccagcactttgggaggccgaggcggaaggaccacctgaggtcaggagttcgagaccagcctgaccaacatagtgaaaccccatctctaccaaaaatacaaaaattagccgggtgtgatgacgggcgcctgtagtcccagctacttgggatgctgaggcaggagaatcgcttgaacccgagaggcagctgttgcagtgagccaagatcatgccactatactccagcctgggcaacagagcgagactccgtctcaaaaaaaaaaaacaaacaaacaaacaaaaaaaaaaccctcctgtctctcgtacagccagctctgcatgaattaaactctccttattgcaattcccctgtcttgacaaattggctctgtctaggcagagggtaaggtgaacccaatgggcggttacattatctctctcagtgatgttgagcaacctcttctgtgggccttggggtctattattgtttgccaaagtaggacagcagtcgggctaattgatgtctaagcctctcagctctaaaggctggaggccgcctcctccctcacttcagaatgggtctcattctcttttccaatctcaccgcctcaccccagtttgagaaagaccctcattcccacttccctacagccttgctgaagggaagcccacctaagcatggcgtcatcttgtgaatctctagctcacaacctccaaaatgttcttactgtctaacacgcctgccccatatctgtcatcctggggttcaaggcctcccccatggtgccacccacctgctatgctctcacacagcgggggtctttcctggggtcctaaccatgctcgtgcagttcccactacctggaatgcctttccttccccaccatcagcctcccggactctc

SEQ ID NO: 915543 - DNA, 4001 bp, Homo sapiens
gagccaccatgcccagctaattattttgatttttttgtagagacaggggcctccctatgttgcccagactggtctcaaactcctgggctcaagtgatcctcccgccaggccggaactcagactttggtctctgctcctcccatgtcacccatcttcccgaggaagtgacctaccattgggtgtgatgtgacagaaggaagaaaaatgtctcaccagagatccagccagccacaaattcctccaccggcattgtctgggcttgcgggaactggtggctccagcagaggagacagagttgaattcccccctctccctcccctggcccacgctgataacctcccactaatgtttaaccctggcgggaaggtgagaattggcctggtgcccagacctccggcaactggcagaggagagcgagccagttccggtgaccctggccacctggaggagtcgtgcagagtacagtctcacgggccaggcgtgccgggaccacagaggccctgatccccgagcccggccaatgatcctcgctctgaggatggcaactgggttcctgccccatggtcgggcccctccagggctgccttagtcagcaagaggcaagcccctgcctgcccagccagcccagctccactcccattcatctccaccaaggggcatggccgcccccatgccacagagagaggccgggtgcggaggtagcgtggccaccagggggtaggcccagcccgcatttgccgctgcgtggcagggtggggaggagccactcccaggagtgactcaccaggcctggctgttctcttcagggttgtttacgactcccccgactcccccgtgtgagtcagaaacacagccttcctcggcttcctccttcccaggggaaagataggggttttgattatttaaagtgcgtgttgatctgcaatggcaccattctgctcagtcaaaaccaaaaccctttcaaggatctgtgagccacagggtgccgcccattctcctctgacctcacgtcctgccacccacccccttgctttctctgctgcagccacccgagcctccagactcttcttcagtcagccttctgtctccaggcctgtggactggctcttccctcttcctgggcactcttgccctggcacccctccagctggggctcaaatgtcaccacctgggtgaggtctgccccgcctccccagccggaggcactgctggctcttcctctctttctccatcacagttatcacgccaacatacgatgggaagaacttgtctgtctggacagggatctctgggtgttctgtgcacagcgggtggcacagggtgggctctcaataaatcctgagtgactgaatgaacggaaatgtcagccagcagcatcagcggcagcctggggctccagttccctcttcccatcaccaaacggccctgggaaacatcaaggcccagtgacacctgcaccctcccctccagatctccccgcagctcctagtctcccatgggggacgcccaaggcccagtccttctctcccttctcctctcactgtggccaaggcagaacccacccacccctgctgctttctcccgggtggacagattcgggaaacaggacctcctacctcctgcctctggagctgcctggggctccttgggccacccccaaagatcatcctaaaagaccatccccaaagactggcctctcgtggtggcttgggctgcagtcctggttctgcttcttattcctgaaactgcctttgcaaaaactataactgatacaggccaggcgcagtggctcacgcctgtaatcccagcactttgggaggccgaggcggaaggaccacctgaggtcaggagttcgagaccagcctgaccaacatagtgaaaccccatctctaccaaaaatacaaaaattagccgggtgtgatgacgggcgcctgtagtcccagctacttgggatgctgaggcaggagaatcgcttgaacccgagaggcagctgttgcagtgagccaagatcatgccactatactccagcctgggcaacagagcgagactccgtctcaaaaaaaaaaaacaaacaaacaaacaaaaaaaaaaccctcctgtctctcgtacagccagctctgcatgaattaaactctccttattgcaattcccctgtcttgacaaattggctctgtctaggcagagggtaaggtgaacccaatgggcggttacattatctctctcagtgatgttgagcaacctcttctgtgggccttggggtctattattgtttgccaaagtaggacagcagtcgggctaattgatgtctaagcctctcagctctaaaggctggaggccgcctcctccctcacttcagaatgggtctcattctcttttccaatctcaccgcctcaccccagtttgagaaagaccctcattcccacttccctacagccttgctgaagggaagcccacctaagcatggcgtcatcttgtgaatctctagctcacaacctccaaaatgttcttactgtctaacacgcctgccccatatctgtcatcctggggttcaaggcctcccccatggtgccacccacctgctatgctctcacacagcgggggtctttcctggggtcctaaccatgctcgtgcagttcccactacctggaatgcctttccttccccaccatcagcctcccggactctctcccagtgcccctccttgactagacccgggttctagcctccccaccaccaccgcagacactcccaggtgtcagtctttgacataaaacagagatgtgatactcacctcttagtgagttctaaggattaaagcactttaaaaagtggctggcacgtaaatggcaactgctaatacttatttccactctcaggacgcatgagaatgacacaggaaacaggggaaagggcctggcccagtgccccacacacagcaagtgagcagagacttttcctgcctgtagcatttcatagttcttaaggcaatgctgtcatcttctgtggttttatttatttttttggagacagagtctcactgttgtccaggctggaatacagtggcaggatggcgctatcagagctcactgtgagctcacactcctgggctccagcgatcctcccacctcaggctcctgaatggctaggaccacagatgtgtgccaccacacctggctaatttttgggttttttacagatggcgtctcactatgttccccaggctggtcttgaactcctggcctcaggcgatcctcctgcctcggcctcccaaagtgctgtggttttaaatgtgctgttctcctgggcttctttctctttcccctcttccttaactcaccaattaaaccacaacagacactttctgagggcagggccacgtctcccctcagtctccatcccctgacctagcacaagccccgcatccagtaagcattcaaaacaacactgaactcttctgctcctgcttcactccagctgggtcaagaggccatggagatacagtgtgtcctggtctgagggtcccagagctgagaaccaggaaggagatgcctgcccccactggacacccttccctgcagcccacatctgagcttcctcaagtccttaagtcacattggcaaggcaaatgtgatgtcatgggctcagctgtggggcagtgtggatcataggagggcaggcagagctggttcacataccaaagaaggctggactgggtcaggagctagagctgctttccaatcccagggaaccagggcaaagtgaacccactgccctctgttcctgatcaccaagcccactgctgtcacttgggacaacttctggttcctctggccccagaaggtgccccatggacttatttttctccctgagttccacatctcagatgcacacatgttgcattaccaggacatgtcagtgacatggccctgagggtaggtggtttcacacctgcctctttggggccccaagtctcctcccagcctgggaaaacctcaaggtct

SEQ ID NO: 915544 - DNA, 4001 bp, Homo sapiens
cccacatttctgccttccctgaagagcctccctgctgtttcctcctgtgtccccagtgcctgctccacagtagatgcacattaaaagtttgttgaatgaggctgggcacggtggctcacgcctgtaatcccagcactttgggaggccgaggcgggaggatcacgaggtcaggagatcgagaccatcctggctaacacggtgaaaccccgtctctactaaaaatacaaaaaaaaatagccgcgcgtggcggcgggcgcctgtagtcccagctactcgggagggtgaggcaggagaatggcgtgaacccgggaggcggagcttgcagtgagccgagatggcgccactgcactccagcctgggcgaaagagccagactctgtctcaaaaaaaaaaaaaaaaaaaaagtttgttgaatgaatgagtgaatgaatgaaattcatggtatttcaaagaaaatcaaacgttcgataaccgacttttggggtgactgactcaggaataacgacacacagagaggggtggcagcgcctttgctcattccagaccctgtgggctggtggccttgcccctctgagatgtgggcattgctgaagttctactttcctagccacgggggaagcattcccctctccgagcttcagcccataatgagctcaacgaggggtcacaggtgcgcggtgaggaagcgcccgctaagcttcatccaaagggctggagggaggggtgctggctgtggccacgaggctgccacgccgccaggagtctcaccgggatggcggtgatgaagaagttccagggaaggagggtgcccagccccaggatgaagaagctgatcccgaccaggtggtagctgtggggatcggtgggaaggtcaccccgaggacgcacccgcctccgcaggccctcccgcctcccaggccaccccctccggagcggactacaaccccgatcaccccggttccggcggccgagggagtcggctgatgggaattgtagttcgatccggtcttctctgagcctcggagcgccttcagggagcgggtctgcaacgcccccggccacttgcaacgcacccgggcccactcacctgtcccgcggggcgtctcctcgcgccatggccgccgcggcggatgcgcctggggtgaaaggggcagagaagccgcacctgcacctgcgctggggcggagggccgcagaccggtggggcggggggcgggtctccccagattccggtgcagggcggctggagtcgcacaggtagcctcgggcggatttcggcgtgtctcgcgctccgcaggctgggacctgggctccgccccgaggcggggacagagggtcgcgccacccgtctctccttcccccacccgcctcagggactcgactctggctcgggccccgccccacctaggggcctgcggaacccgcccgctccccgcacagcccctccccgcagccccccgtcctctccgcgggggcgggtcccggatccctgcggcggaggggaaggcgggggtagggacgaggtgtaacctcacctccaccccccgccgagagctctgtaggggcagcactggtgcggggctcttcccgcttcgtcagctccgaggtgatgccagagccgctcctgcgacccctaaagctggaacccaccggggcgccccctaactagggagccgctgcggagtccccgcccagagcgtaacccgagccgggcccgggcgggggaaccagagctgccacaggtcgcccgcgatcctggcgggcttcgccgcgctgggtccccgggagtgcctggaaaaaaacagcattactttcaactccctactctttttctgttaaaaaaaaaaatttgaaaagactataaatcattaatttgctcctactctcataatctacgaataggtgtgggttctctgcaatccccgggcgtatcggggacgctggagaagtgagaggctccaaaacacaaactagtttttttgagactgagtgtcgctctgtcgcccaggcggaagtgcagtggcgtgatcttggctcactgcaacctccccctcccaggcaggttcaagcgattctggtgcctcagcctcaggagtagctgggactacaggcgcatgccaccacgtccggttaatttttgtatttttagtagaaacggggcttcaccagctctactgaagaggtggccagtctagtctcgaactcatcttttgaccaggctggtctcgaactcttgacctcaggtgatccgcccgcatcggcctcccaaaatgttgctattacaggcgtgagccaccacgcccggccacaaactattttcttaagcaatgacattttatagccattcccaggttgcttatgtttttcctccagccgactgagagtctgtaggggcagaggctgtgcttatctggtccattggtttactggcagcatctagcgccgttgagtgataaatgggtggttgcagtaaaatgcaggtgattttagggagaacagagacagcattaaattacaccgaaagagaaagttattcttcccattttctttcaagcctctgaatatgtcaagggtgttaacaggttgctaacacttcttaatctgccttcccatcccttcccctcagttagcctcagagggtctgctgacaattttatcaaaagttattaacttgtatttttcttatatttatttttatagcaactttattttcagggctactcatactggtttcctatttatgattatgatatcaacttttctttgaaaaatcaatttatttatggaaaatgagttatttaaagaaaagcgaggccgctggtgcagcacagctatggcacaggttgtgaaggaaggacttgagaatggaggctagggagcactgaatttgttgagacagtgaagggagaggatgagggcatttcagggagagaacagcctgtcccaagacaagggacaagagagtgctgacacattctgggacatacaaatagatccctttggctggcattggtgggaggaggggacagagcctctacaacagccaggctggttatggcaagtctgagggctgattaaggagttcagatttcatttcaaagcacagacggtcagctggagccgattccatcgtccttgtaataaatattttgttactatcctgcaatgaaactcatataaaacaaaacctacctatacacaataacatttgatgtcgagataatatcctgattttactgcagatgaatcataagggaaattatttagtaataacatggtgtgtgtgaatgtgttaatattcatggtacatgaagctgtcaaatgcttgcccttctttctaaaactgcagtgaatccacggctacaaactcacatgcgatacaggcatgcagtgaaactggccactcagagacccactagtttgccaggattttcttttcttttcttacctttttttttcttttctttttctctttttttttcttttttttttttttttcagacggagtctctctctgttgcccaggccagagtgcagtggcaggatcttggctcactacaacctctgcctcctgggctcacacgattctcctgcctcagcctcctgagtagctgggattacaggcgtgtgccatgatgcctggctaatttttgtatttttagtagagacaggatttcgccatgttggccaggctggtctcgagctcctgacctcaggtgatctgcccgtctcagcctcctaaagtgctgtaattacaggcataagccactaaacccagcctcttttctttaaaaaaaaaaacaattttttttttgagacacagtcttgctctgtcacctaggctagagtgcactggcgcaatctcagctcactgcaacctctgcctcccaggttcaagtgattctcctgcctcagcctcccctagtagctgggattacaggcacaagccactatgcccggctaatttttgtattttttagtaaagatggggtttcaccatctt

SEQ ID NO: 915545 - DNA, 4001 bp, Homo sapiens
agcagctgctacattcattcattccacgggtatttattgagcgcctactgtcagccaggctttggcctaggtgctgaacaactgcattctctctagagcacatagcctgccactcctctgcttaacctcctcactcctcaacaccccgattcatgcctccctattgcctgcagggcaaagccccaaatggaacagctcttcagaatcagatcctagtctccctttgtgccccatcttctgctccatcctgctaagctccaggcagccctggctgtggatctccctctaaacaggctgatcgtctcttgcctgcctgcctttggcatggctgtcgcctcggcctggaatgccctactgaccacacccctccacatgcactttgcctaccctactcccaatttacaaatctcctcttccatgaagcagaaggaactttctccctcccctggggacccactgcactctgctgcaagcctggaatgtcacgcatcatgttacattattaatagctctttggccccctcttgctctcaagcccaggggctgattcatctctgggtttccagggcccagcacagagccagtacccaagaagcatttgcaaagttgttgcagtgaatacagatgaataacccggtcccaaagacaatgcaaaccccacatttctgccttccctgaagagcctccctgctgtttcctcctgtgtccccagtgcctgctccacagtagatgcacattaaaagtttgttgaatgaggctgggcacggtggctcacgcctgtaatcccagcactttgggaggccgaggcgggaggatcacgaggtcaggagatcgagaccatcctggctaacacggtgaaaccccgtctctactaaaaatacaaaaaaaaatagccgcgcgtggcggcgggcgcctgtagtcccagctactcgggagggtgaggcaggagaatggcgtgaacccgggaggcggagcttgcagtgagccgagatggcgccactgcactccagcctgggcgaaagagccagactctgtctcaaaaaaaaaaaaaaaaaaaaagtttgttgaatgaatgagtgaatgaatgaaattcatggtatttcaaagaaaatcaaacgttcgataaccgacttttggggtgactgactcaggaataacgacacacagagaggggtggcagcgcctttgctcattccagaccctgtgggctggtggccttgcccctctgagatgtgggcattgctgaagttctactttcctagccacgggggaagcattcccctctccgagcttcagcccataatgagctcaacgaggggtcacaggtgcgcggtgaggaagcgcccgctaagcttcatccaaagggctggagggaggggtgctggctgtggccacgaggctgccacgccgccaggagtctcaccgggatggcggtgatgaagaagttccagggaaggagggtgcccagccccaggatgaagaagctgatcccgaccaggtggtagctgtggggatcggtgggaaggtcaccccgaggacgcacccgcctccgcaggccctcccgcctcccaggccaccccctccggagcggactacaaccccgatcaccccggttccggcggccgagggagtcggctgatgggaattgtagttcgatccggtcttctctgagcctcggagcgccttcagggagcgggtctgcaacgcccccggccacttgcaacgcacccgggcccactcacctgtcccgcggggcgtctcctcgcgccatggccgccgcggcggatgcgcctggggtgaaaggggcagagaagccgcacctgcacctgcgctggggcggagggccgcagaccggtggggcggggggcgggtctccccagattccggtgcagggcggctggagtcgcacaggtagcctcgggcggatttcggcgtgtctcgcgctccgcaggctgggacctgggctccgccccgaggcggggacagagggtcgcgccacccgtctctccttcccccacccgcctcagggactcgactctggctcgggccccgccccacctaggggcctgcggaacccgcccgctccccgcacagcccctccccgcagccccccgtcctctccgcgggggcgggtcccggatccctgcggcggaggggaaggcgggggtagggacgaggtgtaacctcacctccaccccccgccgagagctctgtaggggcagcactggtgcggggctcttcccgcttcgtcagctccgaggtgatgccagagccgctcctgcgacccctaaagctggaacccaccggggcgccccctaactagggagccgctgcggagtccccgcccagagcgtaacccgagccgggcccgggcgggggaaccagagctgccacaggtcgcccgcgatcctggcgggcttcgccgcgctgggtccccgggagtgcctggaaaaaaacagcattactttcaactccctactctttttctgttaaaaaaaaaaatttgaaaagactataaatcattaatttgctcctactctcataatctacgaataggtgtgggttctctgcaatccccgggcgtatcggggacgctggagaagtgagaggctccaaaacacaaactagtttttttgagactgagtgtcgctctgtcgcccaggcggaagtgcagtggcgtgatcttggctcactgcaacctccccctcccaggcaggttcaagcgattctggtgcctcagcctcaggagtagctgggactacaggcgcatgccaccacgtccggttaatttttgtatttttagtagaaacggggcttcaccagctctactgaagaggtggccagtctagtctcgaactcatcttttgaccaggctggtctcgaactcttgacctcaggtgatccgcccgcatcggcctcccaaaatgttgctattacaggcgtgagccaccacgcccggccacaaactattttcttaagcaatgacattttatagccattcccaggttgcttatgtttttcctccagccgactgagagtctgtaggggcagaggctgtgcttatctggtccattggtttactggcagcatctagcgccgttgagtgataaatgggtggttgcagtaaaatgcaggtgattttagggagaacagagacagcattaaattacaccgaaagagaaagttattcttcccattttctttcaagcctctgaatatgtcaagggtgttaacaggttgctaacacttcttaatctgccttcccatcccttcccctcagttagcctcagagggtctgctgacaattttatcaaaagttattaacttgtatttttcttatatttatttttatagcaactttattttcagggctactcatactggtttcctatttatgattatgatatcaacttttctttgaaaaatcaatttatttatggaaaatgagttatttaaagaaaagcgaggccgctggtgcagcacagctatggcacaggttgtgaaggaaggacttgagaatggaggctagggagcactgaatttgttgagacagtgaagggagaggatgagggcatttcagggagagaacagcctgtcccaagacaagggacaagagagtgctgacacattctgggacatacaaatagatccctttggctggcattggtgggaggaggggacagagcctctacaacagccaggctggttatggcaagtctgagggctgattaaggagttcagatttcatttcaaagcacagacggtcagctggagccgattccatcgtccttgtaataaatattttgttactatcctgcaatgaaactcatataaaacaaaacctacctatacacaataacatttgatgtcgagataatatcctgattttactgcagatgaatcataagggaaattatttagtaataacatggtgtgtgtgaatgtgttaatattcatggtacatgaagctgtcaaatgcttgcccttctttctaaaactgc

SEQ ID NO: 915546 - DNA, 4001 bp, Homo sapiens
ggcctttgcacagcagcgtggtcaccaggcactggtagaaggtgacgaagatgggggtgtccagccgcagggaggggctgtccagcaggtacttattaaggaacaccatggagatggaggtgacccagtagagggagaccaccagcgcgatctgcaatgcccgcagcagaaagggcttctccccgttggcctctgcctctgcagaggggtctgaggccccggtcagcgccatgtgcaggatcctggaccgcttcagaggggccctattcatggtagcagaggagctgggtcaccccgcggccagaactctgattccctggagtccagggcagtgagctcacttgtgctctccgcaaggaagccgcagccctccattgtcacatgtgggctggcctaaaggcctccccattgtcctcatggattgagaagttctgctttggggtgagcccagttgtgctgctccacaacctactcccaccccgagggggctctgagacaagacacagggcaagggagaggaataggataaggcggtgaggccaggacagagaagacctgtgaggggagaagaggctggggcctaacagggaggggtcgcagagagaagggaggggagaggaatggcagggcggggcaggagtaggtacgcggggcgaaggtgcaggaaaaggacgcgtggcagagtgggaagaggtgccgagagggcgtcatgggcggctgtgggagggaggggcgggcagggggagggaggcgtacagggagctgccggaggccgggcgcggctggagggagggctgcggaagggtcagaggggctcggggcttggggctgaaggacgcgggagggggctgggccggcgcccacgtctcgctgccttcccgggctctgtcgccggctcagcccaggagcctccggacatccgaggccgactccccgggaggcgggccctggactcacttcctgacacgcccccacgtggccttaaagggcccgcacgccccgccttgcccttaaagcgacagccccagagaggcggagttcgccagtccccagccccgcccctgcgctccgctgcccgctgctggcgggggacctcggcagccacaggtttttctgggtgcttgagcctcgccctgcttcctggaagggctccatcaacctcgcctgcccaccctcagctccgtccgccccggagcctccgtcccccgacttggctaggcttggctcgcaggtccacttcccggaaccccgacccaggacccgggcggcgctacatcagcctggacccctccacctccggagactcgcgttgcagccccgcgtccctctgccaatccgagctcactcttccataacaatgttgtggtcccctcctttccccccattttcaccgcccccaggccctctcccaagcccgagacccccggcagcgctccccgaggccggaggccacgccgcctctctcggacttcagtttgtcctccctgtgctcctgtcgaggtcctctgggcggcccggatccgagattccaaaggctcaagacagcatctcttaccccttccagaaaatactgtttccccggccggtccagccgcatcagctcccgcgtccctgcctgtgtccccgggccgcgaaggcgacctggcgctcacctcctccggtgcactgggcgcccgccccgcgaccccgtgctgcatctgcagcgccgcaccctgggccgcgcccgcgggatcgacttcctgctttccgccccgggcccgggcaccttgccagcctcgccggcctgttcgcggcatgggccccgggggtgccggcggagaggcggtgatccggacggtcgtgggaggaggccctctcctctttccaaggctactcctgtccctggtacccccgcccgcccgggacccggcttcagttaccgcagctggcacgtcccgggacttggctgtatccctggcccgccgcgctaccggcttgcacttccagaagtgcgtgcggggaccgctcggattcttccagctggcagtgagggggagggttccccgccccttccagggccggggcctgggaagtctagcctgtggtctgccactcaccaggcagccggggagaccaggaggatcgacttctcttggttcgcgctctagcacctgcgttgggcaggccactttctccgacggcctgagttatcttcatggtaaaactaaggggctaggcttgacctgtgggtcccaaccttcttgcccagaactctaggtggtatggtcgaacatagatgtttgtaatatttcaagcaccatttaattagtgccatttaattaacgggtaagatgatgtcatggctgggatttgttttaaaatactaagaatacttaccaaaaatattttttatttttatttatttattctttttgggacggagtctcgctccgtcgcccaggctggagtgcagtggtgctatttcagctcactgcaacctccgtctcccgggttcaagcgattctcctgcctcagcctcccgaatagctggaattacaggcgtccaccaccacgcccggttattttttgtatttttagtagagaccgggtttcgccgtgttggccaggctgttctctaactcctgacctcaggtgatccgccggcctcggcctcccaaagtgctgggattacaagcgtgagccaccgtgcctgacctcaaaaagattttttttaaaaggttgatagattaaataagataagccattgatagttgtagctaggcgtagatacacaaggacccattataagagtttccttacttttgtgtacatttgcaaatttccagaataaaaaggtaaaacctatatagtacgcttaaactctcagatcctaactgcacaaaccttcactggagctgagcgcagccctgggtgggctgtagggaaatgggagggctgcaggctgcagtgaagtaaacagctgccccacaacgagccgggcccacaccctaccctcttccactagccccgggtactagcactcccctcttcctcctcaaggaatgagactctgcttcctagttgtgggctgttctccacctggaggataccatctggttaccttgtcacttttggaactaaaatatccctttggggaaagaaagactcaagagggactgagctggtctcctcaaccccacctggagagtctacctctgggattttcctttgaagctgtgggttttggttcattaagagcaattcgtatctgttccagtctctcctctcttatgcccgagagttcaccatgacaaacaatttagtgacagacagggcaaacttgtccctgagaggccctggtgatctggaagggccttctccttagcacattagcaggaacttgtctgatgactgctgccaccttgaactggagggaagagatatatcttgtatataggccagatgcacttcgctgagagaggcccaggggcagtcagtgctgcgtgtgtgggggacagtgtgggctctctatggaggccaaagtatacccctgtctccaatctctcacatcatacctgaaattctgtcattagtgtcactcccttggattaaggttgttaacaggccagtacagcaagtttcctggattctaatcattttatcccttatgagggaaaggaggggtggggatgtttcttagggggtctaaggcccctgggaattgtgtaccttgcataaatggtttgcttttgaattttctttaaggaatgttaattgtttaaaccatccacaaagggtgaaattttaggtcttgccaacagtgattatccagggtgtgaatttggtgtgaggtagagcataagatcatcaacgtggcagctgaagggctgtaatagttcctttatgggtgtagtctcattttcttgccttggctgggagccactaataatgtcagcaggaaattatttctgccagtcacagtgaacagaactaacttcccaggttcaggggtcagtggatct

SEQ ID NO: 915547 - DNA, 4001 bp, Homo sapiens
gatgaccgctggtagtgatgccacaacccaggggatctctgggagaacaaaggagatgctatatgtgaaataattagcataatttccccatcaataattattattttctgagggtcaagtccaggaagacagctgaggcctctcaaagcatattgcttgctactgtctcaggcgctatcctgagctggcagagagtgatggtatatttattaaaagacgtattgtcctctactaagagcactggctgggaaatcaggacacctgagctcttgagaaacaataaagtacagtggtcgggcatgtgaactgtgaagccagattgcttgagttcagatcccagctctgccacttattagctgggtgatcttggacaagttagttaacttctctgtgccttggtttttccctctgtaaaatgtggattataatcccatcttgttatgaagattagctgagttaatatggctaagatccatgtgcctggcacattttaatcactcaacaaatgtcagttgcttttgctgctgttgttactattattattactattgttcttgccccggctgggctcctaacttgctgggtgacctttagtaagttacttgctctctctgtgcccccaggctctttctcctatgactgctgcaccaaaggagctgggacagatgaagtcctaggatgcctagaagagttgttcttcactgcttcagtccccatgaccactctatcccccgtggccccagctgccactcaccgatgatgataccgcaggtgagcagggcatagaaggaggtggtctgcttgagcagcaggtaggagagcagcacgttgaagacggtggtgagtgagcggcccacattgtagaaggccacaccgacgtacttgaggcagaggttattgaaggtgatcatgccgatgaagaccaccgacaggggcaggacgctgcgggccaccctgaggtccaggcgcaagctggggaagtccacggcaccagggcagcaggcggccagagcgctgaggcctttgcacagcagcgtggtcaccaggcactggtagaaggtgacgaagatgggggtgtccagccgcagggaggggctgtccagcaggtacttattaaggaacaccatggagatggaggtgacccagtagagggagaccaccagcgcgatctgcaatgcccgcagcagaaagggcttctccccgttggcctctgcctctgcagaggggtctgaggccccggtcagcgccatgtgcaggatcctggaccgcttcagaggggccctattcatggtagcagaggagctgggtcaccccgcggccagaactctgattccctggagtccagggcagtgagctcacttgtgctctccgcaaggaagccgcagccctccattgtcacatgtgggctggcctaaaggcctccccattgtcctcatggattgagaagttctgctttggggtgagcccagttgtgctgctccacaacctactcccaccccgagggggctctgagacaagacacagggcaagggagaggaataggataaggcggtgaggccaggacagagaagacctgtgaggggagaagaggctggggcctaacagggaggggtcgcagagagaagggaggggagaggaatggcagggcggggcaggagtaggtacgcggggcgaaggtgcaggaaaaggacgcgtggcagagtgggaagaggtgccgagagggcgtcatgggcggctgtgggagggaggggcgggcagggggagggaggcgtacagggagctgccggaggccgggcgcggctggagggagggctgcggaagggtcagaggggctcggggcttggggctgaaggacgcgggagggggctgggccggcgcccacgtctcgctgccttcccgggctctgtcgccggctcagcccaggagcctccggacatccgaggccgactccccgggaggcgggccctggactcacttcctgacacgcccccacgtggccttaaagggcccgcacgccccgccttgcccttaaagcgacagccccagagaggcggagttcgccagtccccagccccgcccctgcgctccgctgcccgctgctggcgggggacctcggcagccacaggtttttctgggtgcttgagcctcgccctgcttcctggaagggctccatcaacctcgcctgcccaccctcagctccgtccgccccggagcctccgtcccccgacttggctaggcttggctcgcaggtccacttcccggaaccccgacccaggacccgggcggcgctacatcagcctggacccctccacctccggagactcgcgttgcagccccgcgtccctctgccaatccgagctcactcttccataacaatgttgtggtcccctcctttccccccattttcaccgcccccaggccctctcccaagcccgagacccccggcagcgctccccgaggccggaggccacgccgcctctctcggacttcagtttgtcctccctgtgctcctgtcgaggtcctctgggcggcccggatccgagattccaaaggctcaagacagcatctcttaccccttccagaaaatactgtttccccggccggtccagccgcatcagctcccgcgtccctgcctgtgtccccgggccgcgaaggcgacctggcgctcacctcctccggtgcactgggcgcccgccccgcgaccccgtgctgcatctgcagcgccgcaccctgggccgcgcccgcgggatcgacttcctgctttccgccccgggcccgggcaccttgccagcctcgccggcctgttcgcggcatgggccccgggggtgccggcggagaggcggtgatccggacggtcgtgggaggaggccctctcctctttccaaggctactcctgtccctggtacccccgcccgcccgggacccggcttcagttaccgcagctggcacgtcccgggacttggctgtatccctggcccgccgcgctaccggcttgcacttccagaagtgcgtgcggggaccgctcggattcttccagctggcagtgagggggagggttccccgccccttccagggccggggcctgggaagtctagcctgtggtctgccactcaccaggcagccggggagaccaggaggatcgacttctcttggttcgcgctctagcacctgcgttgggcaggccactttctccgacggcctgagttatcttcatggtaaaactaaggggctaggcttgacctgtgggtcccaaccttcttgcccagaactctaggtggtatggtcgaacatagatgtttgtaatatttcaagcaccatttaattagtgccatttaattaacgggtaagatgatgtcatggctgggatttgttttaaaatactaagaatacttaccaaaaatattttttatttttatttatttattctttttgggacggagtctcgctccgtcgcccaggctggagtgcagtggtgctatttcagctcactgcaacctccgtctcccgggttcaagcgattctcctgcctcagcctcccgaatagctggaattacaggcgtccaccaccacgcccggttattttttgtatttttagtagagaccgggtttcgccgtgttggccaggctgttctctaactcctgacctcaggtgatccgccggcctcggcctcccaaagtgctgggattacaagcgtgagccaccgtgcctgacctcaaaaagattttttttaaaaggttgatagattaaataagataagccattgatagttgtagctaggcgtagatacacaaggacccattataagagtttccttacttttgtgtacatttgcaaatttccagaataaaaaggtaaaacctatatagtacgcttaaactctcagatcctaactgcacaaaccttcactggagctgagcgcagccctgggtgggctgtagggaaatgggagggctgcaggctgcagtgaagtaaacagctgccccacaacgagccgggccca

SEQ ID NO: 915548 - DNA, 4001 bp, Homo sapiens
ggacggacacggacggaaggaaggaacaaagaaggagggagggagggagggagggaactggagtacagataactgacttgtggaaggaaggacggaaggaaggagagagggaacgaaggaaggagagagggaaggaaggaaggaaggagagagagggaaggaaggaaggagagagggagagagggagggaagggagggaactggagcacagagaactgacttgtccaaggtcacccagccaggatttgagtccagaatgtgagtgcccttagccattacactgaattgcctcccagctgagaacttttaacaaatgtatcaggacatacacaactggatgctacaaggtggttttcggccaactttcccctttaaacacatgcatcaatttcaaactatttatatgataaaaaatgcttacacctttatcgatctcgtttttaaaatggtatggcttttcaggactatctttcacaatcgttaaagggaaattcgctttgttaatatgaaaaaaaaatcaaatatctgtttcatgagttgtcagtggccaacgctgtttagactacggcttgaacgcatcaccccttaaagatcatcttgtggccttgggcaaattgcttagccttctttgtttctccagcggcaaagtggatataacaatagtaccatctcctaaagtggtgaggattagctgatattatccatataaattgttatgcacagtacctgacacagagcgagtgcccaataaatgtctttcactatttaggtcctgggttctctcatttccagagtgcaagtcctccagcaaccacagaaacgctttctagagtcgctgcccactccttaaaaacatttgtccctacttcgcacagagcatagtgataccacaaacaggcttccctggaccccagccctgggggtggctatatcacctcgctcaggcccaggaagagagagccggctctggtctcccacccggcagcagcacaaaacttaaccaggatttctcacttcggtcaactcttgaatcaccgcgcccagtctggctggctcggcagcagatggaatgagggcgccggcgccaggaagtggcgctcacccacctgcccagcccgaggtgggcactcctccttcacagcatccccggggacctcgtccctccaccgcggaacgccccagaggaccgacctaatagtgccacagggtgggtttccccccaaatcctccaaaatacatcgccacgatttcgaaacgggagccgagggagacgcaccaagtgcttcccgacgccaggtgaagcgcaccatacctggtgtgcgtgttgagccccgaaccgaagtccgtgcggccgccacctctgcctccctgctgggggcctcagagagtgtgctccttgtccacgtgcgcgcagggcccgcagccgcccccacgccccagcggagctgcagcacgccccttccactcaccaggtgaagagtttgccttttatcctgcgcagcaggctggagaactcggccgccgctccctccgcgaggggctctggggcgccggggcccgctggcgagtctgcctccatcggcgcccttgcgcgtctccggcgcccaaaacccccgaagtgccgggtcccggaagacgggaggcggtgcctgtgcggccggctggggctccgctctggccctgcgctccctccctcgctcgcttgctcgcgtccctctcgctcctccgctcggctccttcagcgaccaatcattaactgtcaagccctaagggccagacaatacatttgcagattacaacctggcacctccagggtggcaggaggagaaagggcaatttttttttcgtcttggcagccgagccttattgttgagcggcacccagtgtgccttcaggtttttagggttccttgtttgaaatcacaagatacagtgacacgaggttattgtaggtgattcctaagctaagaagcggtgagtgagcagtgagttagaagcagtgagtgagccgggactctcctaactggaaggactggctgacccctcctcttccctcccactctccctccctctggctgatttgtacaaaatcgcttcattaaaataactgaaggctggcagggcgcgttggctcacacctgtaatcccaacgctttgggaggccgagacgggtggatcacctgaggtcaggagttcgagaccagactgggaaatatggtgaaaccccgtctctactaaaaatacaaaaattagccgggcgtggtgacgggtgcctgtagtcccagctactcgagaggctgaggcaggagaatcgcttgaacccaggaggcggcggttgtgagccaagatcgcgcctttgcactccagcctgggcaacagagggagacgtcgtcttaaaaaaaaaaaaaaaaaaaaaaaaaacctgaaggcgcttcaggtctgtgtcgcttttccctgcaaaacatgggtaagatcctaaaaagatcttggaaacgtgcctttgtggcgtggatggaggcgtggctcattcctcgcggtgtgttggttttgtctttcagtattcagttgtctccgccgtgccagggagagagacggtgccaacccccggcgctcggcttggatgccctgccctggccacgccttccgaggcttccacgggctaaagagggattaagagacactaagctggggtcgaaaagttcctgtcactgaccccctgcttccggaaaggaggagatccagaaaacaaaagaaaaggtgttgggaccttttattttttcctggccacctgctttgggggttggggtgggtcaaaataaacgtaggttcaaatagacaggctgtgcagacgagctggcaattctgtaagaggagtctaagaaaaaaaacagctttcgaaaatgaaatattacttcaggaaccccaagtttagcagctgcaggaacctcaaaaaaacctttgaaactaagaacgtggtcatccgtagagactaattaagtattataatacaagcatattatgaaacaagaggacattagaagcacatttaagatgtcacttttgtaaagtaaacaactcatttaaccctgcatattgacaacgttgaattctacctgagccctgtgctcctggaaagtaatgacaattaagaaaccttcctaggccgggcgcggtggctgacgcctgtaatcccagtgctttgggagaccgaagcgggcggattactcctgaggtcaggagttcgagaccagcctgaccaacatggcgaaatcccgtctctactaaaactacaaaaattagcccggcgttttggtgtgtgcctgtaatcccagctacttgggaggctaaggcaggagaaccacttgaacccgggaggcagaggttgcagtgagccaaaatcgtgccactgcacttcagcctgggcaacagagtaagactgtctcaaaaaaaaaagaaagaaagagagaaagagagaaagaaagaaagagaaaagaaaagaagcctcccacctttttttttttaatcaaagattttggttgaatttctcttcctccctcatacctctgaactttcacccaccctgaccctgagccgcaggtaacccctccttaatagcccctcctgagaagttggcctcagggtgaaacattctctaatctattatccagtggagagccaccttttcattccacttcccaccagtagggaataggccccctcctactgcaggaacccttccccacagtccccacccatccccatttgcaataatccctacaaataaagtctctccttaaccaaatttgattttttatttgcaatatatacagtagtcacctccttacctgaggttttgatttccacggttttagttaccacagccaattaccctctgaaaataggtgactagagtatagtaagatattttgagagagagaccacattcacataacttttattacagtatattgttataattgttctattttattatgagttgtt

SEQ ID NO: 915549 - DNA, 4001 bp, Homo sapiens
ctgccactaccatactgctctgaaggacacccatatctttcctgaattactgaaatattcttctgcttttacttttgcccccttacagtttattcgtcacatggcagtcaatgcaatccttttaaaacaaggcagatcatgacactcctctgttcaaaccctgcattgttctccccttccctcagggtaaaagtcacagtttacattacctacaagaccctacataatttggccccatcgccacctccatcactctgcttcagccactttgtcctccttgctattcctttagttattctttctgcctggagtagtcgttccccagatatccatttggctaatttccttacctcttccaggtctttactcaaattgtaccttttcaataaggcccatcccaaccattttataaaatactgtaaactgcctagcccccaccctcattcctgatttcccttaccctgctcttgttttccatagcacttttcacctaacatactatataattaactggttattgtctttactgcttactctctgcttcccattactaaatacaagctccattaagaacaggaatttttatctgttttgctcacgatgtatctcaagtgcctaggggaagctcaatgaatatgtgttgaattaatgaaaatataaaacttaaaaaaactgaaataatttgaaactttttttcagttaaagaaaatgtacatgctgaacatctttccacatcacttttaatggtaggcaatgtaaaactataccacaatttaaccaatttcctttcattgtactttagttaacagcttttctctatatactataatgaaaacctcttgatataagtatgggttacattacttatttcctcgggaaatattctgaaggagaattgctgggtcaaacgataagcactttttttttttgagacagagtctcgctctgttgcccaggctggagtgcagtggcacgatctcggctcacggcaagctccgcctcccgggttcacgccattctcctgcctcagccacccgagtagctgggactacaggcgcccgccaccacgcccggctaattttttgtgtttttagtagagacggggtttcaccgtgttagccaggatggtctccatctcctgaccttgtgatgatccggccgcctcagcctcccaaagtgctgggattacaggcgtgagccaccgcgccaggccgatatgtacatttttaaggctaaatatattatccctttcctgccagcaatgcatgagaatacccatttctccatatcctcactaagacaggttattaatgaatgaaacctgagttcacatttgggttctgccattaataagcttaaaattactgtatctataaaatggaaatcatgatagcacctatctcagttgctgtgaggattaaagacaatgcataggtaaagcacttagcacagtgtttgcacacagtaagcacgcaataaaatgttaagtttattgtttctaccattattacggcctgaaaacaattccattgcaaagtgccctgcaggctattagaggaataacaacaacctatcagttacttataatacggtattttttaaagttcaacggttttcttgaagattccatttagatttaattttttaattacatttaatcagcatcgaatgaaaaatactcccaagtacagtacgtataactgggagagcgatcattttaccaccctgatccttacttttttattttggacagcgggaaaccgtaaacaaacacgccctgtcgccaagaaacaagatgggaggaaagcagcaaaaaacaaacaaactttgccaagtgagcaagctacaggtatctcctgttcattctggtcagcacgacctgttcgaaactctgggataacaaggagtaaaatgaggattcatctggagattccgaatggggctgcagcatttgaaaagcagaacaatgataacttccttaaagcatcattgggaaaaaaaccgtgagtcacggcgcaggctcttgcgtctttgacgtgtacccacagggccccgccccactcaacacacacactcacccacacgcgcgcgcgcaaacacacacacacatattttaacgccctattcaggcctgggcttcgtctgaccaagttctcggggtcagataaccggttcctttgcggatgctgaccacggggtcagttagcaatcgggcctcaactcaggccaagcgcggggcccctggaggtgtgggcgcacccgactcccgcacagacccccgcccacgtcagccccggctccctgcccacgcacaacaccgacctagctcctcgcgcctcgccgccccggcagccgccggcgtcgccgccgcttccatctctcgcgggtctccaggacgccgccgcccgagtgctcactctcccgccgctgcgtggccggcgtcaggcccaggcctacctcccctgcccggagggacccgcgcctggtgcccgcctccctgccccggcgctccccaaccgcgcggcgaggagcatgcgcagtgggacagcccggctcggcgggcaccgccggcgaggggcgggaggggccgaagacccgaggactgctgcgaggccgggttgggtaacccgagaggagggttgggtaacctgagatcagcgagggtgggaccttagagctagccgagacccgggcccatagctccctgggggttttaaagatgacggcgaacttaaatttggggcgcctgtccgtatgcaaggcgttagcgttctgtaagtcaccttggagaatgcgaagaaggacgggatttgtcccctacccatgctgaggttctgactactctggttattcgtctccctgtttctatagttagagttacaggagacacttaaatagaatttaattaagtcatatacaatttcactttcaggatatttcaatgtccttccagatatttgacgttgaccgtggtgctgaaagaaaattaaggtaaagactaagtgtactgatgtagtttcaagtactcctaagcaccatacatacattatctttaattctgactacaatttgtgagataattctaatatttacattaacgctaaagatgaagggattaaggcacggaggtaagtaacgtgtctggggacaggaagcttgtacatggcagaagtagaatccttctgccttcagagctggagctctcgaaaaatatgcaaagctggcctcccagatgggtaccaatgaatattcgatgaatcaatggatgaagcaagcttttggtttaaaaggaaaatatttattttaattttaaaatcgctttcttttttttttcacttcatagttcttggaagtcagtacaccagacaatcctttttatttgtgtccgtttcattcagtggggttgctttaggaaagggtttttttgggggggagtgggtctgattaacagtcactgatgtaactatatggcaatggtgttaaatatttaaaattctgagattaaaaaggtacgcagttacatactatctacatctttcctcctgttgcatcctctgtaggctttcactagataactagtgataatgacagtttgccaaccccctttcttttcctttaagtgaacccaatttgttcacatacatacacatgcaaatcccaaaagaaggttttatttgaagtgttcctgacaaataaaggggtaaaggagattttttttaaaaaagaagaagaagaagaaatctattctggaacatagctagagcaatgttccctaacctgtgttggggtggatcacctggttaaagatcagcaggagagaagataggcatcagacagaaattataggaccaaggtaattttccataaaccactcattataatgagaacatgtgggacagcatcttaaaagaacattatcctttgagagttaaaagggatcaaaagtcattgtcccctaatctcagcttcagggaaagcagatctggcaatatggaaggaag

SEQ ID NO: 915550 - DNA, 4001 bp, Homo sapiens
tctttactgcttactctctgcttcccattactaaatacaagctccattaagaacaggaatttttatctgttttgctcacgatgtatctcaagtgcctaggggaagctcaatgaatatgtgttgaattaatgaaaatataaaacttaaaaaaactgaaataatttgaaactttttttcagttaaagaaaatgtacatgctgaacatctttccacatcacttttaatggtaggcaatgtaaaactataccacaatttaaccaatttcctttcattgtactttagttaacagcttttctctatatactataatgaaaacctcttgatataagtatgggttacattacttatttcctcgggaaatattctgaaggagaattgctgggtcaaacgataagcactttttttttttgagacagagtctcgctctgttgcccaggctggagtgcagtggcacgatctcggctcacggcaagctccgcctcccgggttcacgccattctcctgcctcagccacccgagtagctgggactacaggcgcccgccaccacgcccggctaattttttgtgtttttagtagagacggggtttcaccgtgttagccaggatggtctccatctcctgaccttgtgatgatccggccgcctcagcctcccaaagtgctgggattacaggcgtgagccaccgcgccaggccgatatgtacatttttaaggctaaatatattatccctttcctgccagcaatgcatgagaatacccatttctccatatcctcactaagacaggttattaatgaatgaaacctgagttcacatttgggttctgccattaataagcttaaaattactgtatctataaaatggaaatcatgatagcacctatctcagttgctgtgaggattaaagacaatgcataggtaaagcacttagcacagtgtttgcacacagtaagcacgcaataaaatgttaagtttattgtttctaccattattacggcctgaaaacaattccattgcaaagtgccctgcaggctattagaggaataacaacaacctatcagttacttataatacggtattttttaaagttcaacggttttcttgaagattccatttagatttaattttttaattacatttaatcagcatcgaatgaaaaatactcccaagtacagtacgtataactgggagagcgatcattttaccaccctgatccttacttttttattttggacagcgggaaaccgtaaacaaacacgccctgtcgccaagaaacaagatgggaggaaagcagcaaaaaacaaacaaactttgccaagtgagcaagctacaggtatctcctgttcattctggtcagcacgacctgttcgaaactctgggataacaaggagtaaaatgaggattcatctggagattccgaatggggctgcagcatttgaaaagcagaacaatgataacttccttaaagcatcattgggaaaaaaaccgtgagtcacggcgcaggctcttgcgtctttgacgtgtacccacagggccccgccccactcaacacacacactcacccacacgcgcgcgcgcaaacacacacacacatattttaacgccctattcaggcctgggcttcgtctgaccaagttctcggggtcagataaccggttcctttgcggatgctgaccacggggtcagttagcaatcgggcctcaactcaggccaagcgcggggcccctggaggtgtgggcgcacccgactcccgcacagacccccgcccacgtcagccccggctccctgcccacgcacaacaccgacctagctcctcgcgcctcgccgccccggcagccgccggcgtcgccgccgcttccatctctcgcgggtctccaggacgccgccgcccgagtgctcactctcccgccgctgcgtggccggcgtcaggcccaggcctacctcccctgcccggagggacccgcgcctggtgcccgcctccctgccccggcgctccccaaccgcgcggcgaggagcatgcgcagtgggacagcccggctcggcgggcaccgccggcgaggggcgggaggggccgaagacccgaggactgctgcgaggccgggttgggtaacccgagaggagggttgggtaacctgagatcagcgagggtgggaccttagagctagccgagacccgggcccatagctccctgggggttttaaagatgacggcgaacttaaatttggggcgcctgtccgtatgcaaggcgttagcgttctgtaagtcaccttggagaatgcgaagaaggacgggatttgtcccctacccatgctgaggttctgactactctggttattcgtctccctgtttctatagttagagttacaggagacacttaaatagaatttaattaagtcatatacaatttcactttcaggatatttcaatgtccttccagatatttgacgttgaccgtggtgctgaaagaaaattaaggtaaagactaagtgtactgatgtagtttcaagtactcctaagcaccatacatacattatctttaattctgactacaatttgtgagataattctaatatttacattaacgctaaagatgaagggattaaggcacggaggtaagtaacgtgtctggggacaggaagcttgtacatggcagaagtagaatccttctgccttcagagctggagctctcgaaaaatatgcaaagctggcctcccagatgggtaccaatgaatattcgatgaatcaatggatgaagcaagcttttggtttaaaaggaaaatatttattttaattttaaaatcgctttcttttttttttcacttcatagttcttggaagtcagtacaccagacaatcctttttatttgtgtccgtttcattcagtggggttgctttaggaaagggtttttttgggggggagtgggtctgattaacagtcactgatgtaactatatggcaatggtgttaaatatttaaaattctgagattaaaaaggtacgcagttacatactatctacatctttcctcctgttgcatcctctgtaggctttcactagataactagtgataatgacagtttgccaaccccctttcttttcctttaagtgaacccaatttgttcacatacatacacatgcaaatcccaaaagaaggttttatttgaagtgttcctgacaaataaaggggtaaaggagattttttttaaaaaagaagaagaagaagaaatctattctggaacatagctagagcaatgttccctaacctgtgttggggtggatcacctggttaaagatcagcaggagagaagataggcatcagacagaaattataggaccaaggtaattttccataaaccactcattataatgagaacatgtgggacagcatcttaaaagaacattatcctttgagagttaaaagggatcaaaagtcattgtcccctaatctcagcttcagggaaagcagatctggcaatatggaaggaagaaaagtttgacttgtagtataggcctgaaatcttttgaagagggttgggctgaggtaggaggcccaatgtctttacagtgatgtggagataaagcaagtgataacaatgatcataagattcaagagaaatatgtttttcatgcatctctacttgagaacatatttactaggacttctactccaggtcttataaattagaagcagatataaagtacagctgtatcaaaatagagacattatacagaatgtgacaatttgaaccctggaaattcatttcttttcctgactttaacttcttgcatcacatcttaactacttccttctttgcaactgcagcactttgttcgtatctctgttacaacacttctccacttataattattcctctttctgggctttatactatgctgtatactattatgtgcaaggcactgtgctaggcctgttgaggaattaactgtatttgtctttgtccaaacaggcctagcacagtgacttacaaataccagtcactcaatga

SEQ ID NO: 915551 - DNA, 4001 bp, Homo sapiens
tctttgaagtggtaggtaactgagaagccatgcaaaatatacctatgaagataatttcagtagtcttccctcacaacctgtagaagaccaatttggtctcaatattcctaacctataaatgaatatgttctttagattctctttttaaaattgtggtaaaatatacataacataaattttgccattctaaccatttttagtctacatttaggtggcattaagtatgttcacattgtctctcaaccatcaccatcatccatttccagaactttttcatgttcccaaactgaaactccatacccattaaacaataattccccaatccccctctctagattctcttttgaaccgattataacatcttctgcctcctttattatgagtaaaagaaaatctttaacatgggttcattcttatgtctttgtgagagtcaggattttaatctttttctgaaaaatatcttttaacagtctccaactcaaaaaagactaggtaaataatctaaacgagtgaagaaggttagaattgatgagagctctcaacaattaaaaagtgtgtagggtagccaattgtctcattttgcccaggattgagagggttgccgacaaaagactgtttcaaaaccaggacaaattggccactttaatagcacctgccctatctaaaggggactcctcaatcctattcatttaatttggaaatttaggcccagtattgctacatcatccatttttcttttctttcctttttttacttctagagacagggaggggtgtgaggggggaatggaggggtggtctcacgatgttggccaggctggtctcgaactcctggcctcatgtaattctcccatcttggcctcccaaagtggtgggattacaagcatgaaccaccatgcccggtccacgtcgtctattgttcaagagaagtctggaatctagctatttttgttaaattttatgatttgtaaataatggcaactaacacaatattttaaaaactgtgcagaccaaacggactgctccaatggttgaccgcctctaaggaagagtggctgaaacccctccaccccaccttgcagcccaacatgtggtccctgcggtcaggaagagaacctctgtgaagcccttctcccactgccgaggggctgccctgctctgctctgagagctgtgccctttccaggtgctgaaaggcctcgagacgagctcccaggaccactgagttctggccttggtgttcgagggctaaaggagaccaagagggacactcacaaaccccagtggcaacccctttcctctaccatcccctggcctcggttccccagccttcgagcccaggttccccagctgcccaacgacagaaaggcgctctgaaggcgccccggatgtgtgttaggaggggaggatggaaacgggaaacgatggagaccctccctggcagcctgttcttccccagtgtcaccgagccagcgtcgcggggtctgggggagcgcgggcggagttgggcagggagggttatcaacctccgaggcgggcgccgctggaggagctcgggaccaagtccccccagcacccctggccacgcggcgacgccggggccgatctggggtgatctccgaggccccccgcggcccctgcaagccccgagcccaggaggtcccggcacgcctccctcccctgccccgctcaccagctgtccctggagaaggcccggaagaaccagactcccggagccagggaggaccgcattttgcctgaccggtacctaaggctgagtcgacggaggaggctacagagctgggcgcgtgtcccgggctggactggctgtcagcggggtttaaatgccccgccggccggcccgccctggccccgcggcctgagtacggcagcgcccgcccccttgcgcccgccctcggggtcgggtccagcgcaaacccgccagtcgtccctagcccggccgctggcaccacagcgctcctgtgctttgcttccccgccactgcccgacagctctgaggtgctggggctcctcattccgccctgcactttctgcctcaccacccgctggggaaccgaaagcagcaatctcgacgctgtccggtgtgacgtgcctgcctgcccgcactaccccgcagcgcttcctgtcctaaaaagccatgggctccgacacgggcgggacacgagacgctggagggctggaagtcacactcagcggccctgcatgactaatctcggtactctcaccttctgggagcgcaggagtttttttcgtgggcgggggcgggggggggacaatattcggccccaaacacaccacaggctcaggctggggcttcctgccctgctcatattccacaggaccccactcttccccggcttcacagacaccggcccccacgcgctcccgccatgacaatgtggcagtcactcctgctctcctttctggaggcaagcagccaccaggcagggacttctgtggtcctgaaagtgactgcctctagcctgaagatttcagggtatgtttccactgataattgtgagatccttgtacatgaacccaagggtgaaatacagaaggctgcaaagggaagtattcccctgaggaataaagttaatagaacataaaacaggagtgtcggagcaaatgggtttcagccctaaccccaccctgcccctaattcctaggagtgcccaggccctacgcgcaaggtcagagaagtggagtaacaactccaccaaacagattaggacctagaataatgggcttggctcgtaccagccctagaatcaagaaaaagagggtaagcagagttgtaaaagcctctgttaatcccaggcagtcagggggcataggtctagtggcagaaatgaagacggtaacacgccaacgacaaaaggtaaaggaatagagaaaagaagaaaggcataagtagaagggaggcccaaatagggtgcagaggcttgaaacaccaaaggaccagtgtcattagcggcaattcactaaatcaaacccctgattagaccactcactgtacttgggggtatattcatttcactcttacaagtcagttaggtggctattacccacctaggtaaggtgactttatgtcctggtttgcctgggacaatcccaggagacacctgctgtcccagaatctatgatggacccattctagggtcaataatcacaggtaccccaggttaaggtactcctttaaggggcagcaaataaactagaggaatgagctgatatccccaggaagggaattattcctacgctgcttatttctgagggactaaagggaaggataaaattggaatccagttgagccaaggaagcagctgaagttccttgatgctacatttgaggagtaggtggacatcaccagaggaatggaagagaccatctccagggcttcagaggtgctgtccagacttcagcagtgtggaacatctgtctttccatttcagacagaagccaagaataagggtcactcctgctcatttgtcaggaagctgtgttcctgcctcacaggggaccatgcctatctgaggctgggactctaagaaaggcattaggaatatgccctcatggtagtacggctattgttcacagtgcaccaagtagctgggagcagggccggtactgaaacagactttgccttgtcacagttacttcctgtgaattccagccacgtatccctgttcaggggccagggtggcagtgggaacactcccaccaatgttggaactctttcttgctcgctcctgttggtgagctggatgatctctgtgcttcctgctgcttgggggagtgacaaagagggatattgtgcctcagggagtcccttcactcacctacacaacctcaccactctcgactcaccttcttgttattatctggcccccctcccacacactacctcctcaaaccctgcagaatgtggagaggatctgaaggaaataaagagggagggaaggagctactcaatcaaatgcta

SEQ ID NO: 915552 - DNA, 4001 bp, Homo sapiens
tagccagcactcaccctgaagcctccacatgcacccacacaggtgtgaaaaccatgctcagaagcccctcaaacactctcggaataaacagtgcctccagggcatgcacacacacgtcaaataagcagccctccttagccccgcaggcacccatgtccatggatctcagagcttctttatctggcatatgcagactggcccctggcctctactgtgcagacaatccacccacaccacatgcctgtacacaaacacccagtgtgtctggctggttctgtgtccccaggtccaccaccctgctgtttcagggctcacccaaatcatccttgtccaaagggatctcttccaccaatgatggcatgacaaaggagaaggtcttgcgattgaagtaatacaggctgtagcccccaaacatggctgagaagatcacagtgcgataatagccatagccctgggctgccatggtagaaaagagcaggccctaccagccaagacgcacagcctctgaccacagttcctgcttgccgctctcacagttcccagatctgctgagttgggttttttctgctccctcctccacccagcctcccaggctccctttatagccgccttctggacaatcattaagcctggggaggctccaaggggacccagtgtcctgagggagacaagaaaacaagagattactgagcgccaaactgtagggggtggaggaggtcccggaaggaggcatgcctgtgagccaggccagcaccctgtgtccccaggatttctgcctttacctcctctatcatgtctgcttgcctgtgaaaccagctttgattaaaggttcaacctaattacttttgtctgcctgagcccaggggaggcaggggtgggatgagcagagatgccctctctagccctgctccctcagtcacagaaccttctcattcattcacggaaggtttattaacttactagttgacaggcactgcacttggcactattagtttctacacccactcaccaccaccgcaccaaaacacaaagtcagacacataccccggctaccccacttctaagccttctagagagggcctcaatccgtggaactctcaatacttagcacataatagatttaattgtttcctacagttgccccttgtaattctgtgcaagggggacctccccagttcaggtcccacggtgtcacacagaaagccccgctaagggctgaggtcctgatggggccccacagagctacctctgggtccccattaccctgcgacgtcagtctgggcttccttcgggctagctgggggctgcagggtctggtttccaacctgtgggacgttggcaggggccgcaagcagagggactgggcagctcgtgggcgggaaggtgccccggcgggcttcgggctgcagggcacaaccgtcccgcccagggccccggcaacatgccccggcttttccgctcaattgggaaagcaactggagcagaaggcgtaggcgcacgcggagcgggcgaccgcacgtattctcccggaggccccgcgcttctggcacccagaggctcagcctggtaggggagggccaggcggcgggcgggagaggaggagaggcggcgggcggcgaagaggcggcgggctcgtggcacctgcccagccccgtgggtcctcacgctacccaggacacgctactgtgcggctgggaaccacgggggccgggggtgcaggagctggagaggtgcggagaccacaggactggcgcgatagaaaggggtctcgtgctggtggtcagggacagcgcctcggtggccccaagacccatgaattgtctctggaactgcaggaacagctccgggtcgtatcggaagttggggttcgccaacaatggctccccaagacctgagatccccgccctcaggtgactcccctcccccgcataccgcctcctacctgaacagaggcgggagcccgaataggacggggcggggctagcgaaggctgcgcaagcgcggccggcgggggcgtggtcttcgcctgctgcttcgcttgccggccagtggagttccccgccccacatgccggggacgtcgacttactccctcccgctggtcacgctgctccttggacgaacgagcatagcgccccttaggggctgggcacggcatgtccaattcttaagtggttgcattcaacaaaccagtttttagtgagtgccctcctctacaaaacacaccgaacactaaggtgataatcattgttcccaagttgctcacagtctgggaaaggtgttgtaggaacacacagtattttctttttttctttttttttttttttgaaacagtctcgctcagtcgcccaggctggagtgcagtggcgcgatttcggctcactgcaagctcctcctcccgggttcacaccattctcctgcctcagcctcccgagtagctgggactacgggcgcccaccaccacgcccgggtaattttttgtatttttagtagagacggggtttcaccgtgtttgccaggatggtctcgatctcctgacctcgtgatccgctcacctcggcctcccaaagtgctgggattacaggcgtgagccaccgcgcccagcccacaatttggaattttaacttgtggttagattgttggggacagagacggggcctggagtaaatatcaaattctagtcctagacccacagcattctaactgtatgaccttggttaatctctatgagctcccgtttcctaccagcctggtagatcattgtgaagactcaacagatgatttagataagagctcagaaattctataagagttctcaacaacaatggttttcactgatcccagttaagagttgtgaggagtaacagtagtgatgctattttacaacaatgatgactgtgttctcagaaacagagcaaatgttaaccctgcccatagcttcaacagaaggtaacatagcctaacaaagtccccaacagtcccaatcagccagcacttcccgacctctccccaatagaaacgatattataaaagcctcagcttgtaagcgatcagggtctcagccagactcctgactggaactccttgcaggcttattcctgtgaataaacctgtttggccgttgagttgcctcctgtctctcgctctcttcccttatatcttcctaacaagagtggctgaaggaattgtaagtgttccaaaattgagagcaaagatcttttactccagagaagatggtcagggaagggaggaggaggagatgagataaaataggatgacaggccggacgcgatggctcatgcttgtaatcccagcacattgggaggccaaggcgggcagatcacttgaagtcaggagttcgagaccagcctggccaacatggtgaaaccctgtctctactaaaaataccaaaattagccaggcttggtggcacacgcctgtaatcccagttactggggaggctgaggcaggagaatttcttggacctgggaagcagaggttgcagtgagccgagatcgtgccactgcactccagcctgggtgacagagcgagagcctgtctcaaaaaaaaaaaaaaaaaaataggatgacgatgtcactgaacttcgttaattcaaaatcggggaggagcctagtttgtaccaggcactgtgctttcagccaggtagatccaaggaccaggaaacagttcctccgaaaccaaaccagagcagattcttactttacctaatagaggagtaggaagccatcaggtttttctccgcttttatttttaagatttaacatacacataataaaatacaaaaagtgcaggaatcttacatgtacaactcagtgattttttacacatgttaatacccgtgtaaccaccacctaaattaacagccctatcgttttgttttggaagtggagtgatctcagctcactgcaacctccttctctggggttcaagcgattctcctgcctcagcctcccgagtagctgggattacaggcatgcccca

SEQ ID NO: 915553 - DNA, 4001 bp, Homo sapiens
tcaacaaacatctgcctgctaaatgagtgccccagtggtcggtctgggtgggggctcacccttcttgccctcagagggcatggggtccaggttgcggagtccaacatcagcaggttcattgtggatgagcaggagacagaggaaggagacaaccacaccacagtgccccagatagggccagcgtgctgcgccagctgtagctctgggcaaggatggttgccaggatagggcccagccctccagccaggttcatgctggttgacaggatggcccaccaagtgccaaactgagatggctcaaaccactgtggggcagagggcgacacgtaggtgtccagcctactgcccatgttgagggtggggtcagatggggcagccccagaagctcacattacagggaagagggagagggcgcttctgtttggcagggcagtttcctcctctgccacctgatcccaccactctcagcctcctaaaatatcttgacaagcaataggagctggccaggaactgctcaggaacctgctctgggttgggtgtggaggtggtgggtaagaaagggcgctcccacatgctctttaggcatcctctatgacaatccaaacaggctctttggaagcactcaccttccgcaggaccttcccacatgggggccagcccagcccctgggccaggccattaaggaaccagagggcagcaaagacaggtactgtggagctccaggcaaagaatatgttgaccaggccaaccaggagcagcccagaagagaagagccagcgagcactcatctggtcagacagcaccccactgacaaacttgctgatagcataagctgccgactggctgctggtgatgaaccctgcagggaacattacacttaggggttagggaccaggggagaaacacaggagcaatgaaagaaggcatggggtcaggtgtgcaggggtgcccagtggggtgagacaggttacttcccagaggaacaggaggagcctgtgctgcaatctgacactcatggggccctactacttcggccacttctcctgcctcaccatcggcactagccccagactgacccatgattctcagctacagttgtcagggaacaaaaagggagcaggacgtggcagttccccctccctgggatttgcatatgggatttcccacctcactctggatgccagtcccgggcctctagcagttctgttgctccaccacccaacatggggcaaagggctcaggattggagtcagggaccttgtccctcctgaagggtagcatgccaggccacatgaagtcgttgtgccaactttttagttcccagtgctcacagtgtcagtagccagcactcaccctgaagcctccacatgcacccacacaggtgtgaaaaccatgctcagaagcccctcaaacactctcggaataaacagtgcctccagggcatgcacacacacgtcaaataagcagccctccttagccccgcaggcacccatgtccatggatctcagagcttctttatctggcatatgcagactggcccctggcctctactgtgcagacaatccacccacaccacatgcctgtacacaaacacccagtgtgtctggctggttctgtgtccccaggtccaccaccctgctgtttcagggctcacccaaatcatccttgtccaaagggatctcttccaccaatgatggcatgacaaaggagaaggtcttgcgattgaagtaatacaggctgtagcccccaaacatggctgagaagatcacagtgcgataatagccatagccctgggctgccatggtagaaaagagcaggccctaccagccaagacgcacagcctctgaccacagttcctgcttgccgctctcacagttcccagatctgctgagttgggttttttctgctccctcctccacccagcctcccaggctccctttatagccgccttctggacaatcattaagcctggggaggctccaaggggacccagtgtcctgagggagacaagaaaacaagagattactgagcgccaaactgtagggggtggaggaggtcccggaaggaggcatgcctgtgagccaggccagcaccctgtgtccccaggatttctgcctttacctcctctatcatgtctgcttgcctgtgaaaccagctttgattaaaggttcaacctaattacttttgtctgcctgagcccaggggaggcaggggtgggatgagcagagatgccctctctagccctgctccctcagtcacagaaccttctcattcattcacggaaggtttattaacttactagttgacaggcactgcacttggcactattagtttctacacccactcaccaccaccgcaccaaaacacaaagtcagacacataccccggctaccccacttctaagccttctagagagggcctcaatccgtggaactctcaatacttagcacataatagatttaattgtttcctacagttgccccttgtaattctgtgcaagggggacctccccagttcaggtcccacggtgtcacacagaaagccccgctaagggctgaggtcctgatggggccccacagagctacctctgggtccccattaccctgcgacgtcagtctgggcttccttcgggctagctgggggctgcagggtctggtttccaacctgtgggacgttggcaggggccgcaagcagagggactgggcagctcgtgggcgggaaggtgccccggcgggcttcgggctgcagggcacaaccgtcccgcccagggccccggcaacatgccccggcttttccgctcaattgggaaagcaactggagcagaaggcgtaggcgcacgcggagcgggcgaccgcacgtattctcccggaggccccgcgcttctggcacccagaggctcagcctggtaggggagggccaggcggcgggcgggagaggaggagaggcggcgggcggcgaagaggcggcgggctcgtggcacctgcccagccccgtgggtcctcacgctacccaggacacgctactgtgcggctgggaaccacgggggccgggggtgcaggagctggagaggtgcggagaccacaggactggcgcgatagaaaggggtctcgtgctggtggtcagggacagcgcctcggtggccccaagacccatgaattgtctctggaactgcaggaacagctccgggtcgtatcggaagttggggttcgccaacaatggctccccaagacctgagatccccgccctcaggtgactcccctcccccgcataccgcctcctacctgaacagaggcgggagcccgaataggacggggcggggctagcgaaggctgcgcaagcgcggccggcgggggcgtggtcttcgcctgctgcttcgcttgccggccagtggagttccccgccccacatgccggggacgtcgacttactccctcccgctggtcacgctgctccttggacgaacgagcatagcgccccttaggggctgggcacggcatgtccaattcttaagtggttgcattcaacaaaccagtttttagtgagtgccctcctctacaaaacacaccgaacactaaggtgataatcattgttcccaagttgctcacagtctgggaaaggtgttgtaggaacacacagtattttctttttttctttttttttttttttgaaacagtctcgctcagtcgcccaggctggagtgcagtggcgcgatttcggctcactgcaagctcctcctcccgggttcacaccattctcctgcctcagcctcccgagtagctgggactacgggcgcccaccaccacgcccgggtaattttttgtatttttagtagagacggggtttcaccgtgtttgccaggatggtctcgatctcctgacctcgtgatccgctcacctcggcctcccaaagtgctgggattacaggcgtgagccaccgcgcccagcccacaatttggaattttaacttgtggttagattgttggggacagagacggggcctggag

SEQ ID NO: 915554 - DNA, 4001 bp, Homo sapiens
ctccatctcagacactctgtgacctggggtctcctaagaagagcagcagcatgcttcccacaccctggccagccctgggcgccaccggagagtcacctaccttctgagcgcagcatggtccccatctctaggggaatgacaagcaacgggaagaccccactgagccccaccatgagggaacccaggagggagcagatccaggtgtccagccgctctccgctcagcagagccccccaggactcgctttccttgttgtccaggcgacaggccgtcgcagtcccccggctccggagggccggctgggaacccccagccctttccaagagctccagggcaagggcagtgaggaagaggagccttgggcccgccatgccacagccagggcagggacatccaggcatgccacgtactgaaaaacacaaaaggccacctatatgagctacagccttggccgcacacctgcttaggaaacgtggcgcctccctcctccccgcaagggaccctggcatccaccctcctgctgtccttgccagagcgtctgagcatccaaatgctgggtgcacagcaatggggccctgtgtctccacaccctactcctgagcactgcgtattttttccttctgagcagctccagactgtgtcagcacctccgcctgaggctaaactttccctaatgacagggtgaggcgctggctggctctcctcagccaccggcggcacggcccggcccagctgggtgtctctggctgccaggggaggccctgccgcccgcgacaccccagagactgaggcaccccttctaaggggatggggtggattcagagagacatacgtggggaaactgagcagatgagccagggcaagaccatccacgcttcttcctaggacatgagaccaatgtccccagggcactgagggcaacaggagatggggctgatgaggaaggagcctttagccaggggatgcctctctcttgtatagcgcaggctttagagcccccacggtgaattctatgctgcactttgagctgtctaactctgggcaaatctctgaagccccccctctgagcctcagtgccctcatctgcaggacagggatcaatatcacctgcctcagctgtgaggacgagataagcctgaaagtgcaggtggatgtacccggcatgaggaggcgcagaggccctgcctgtgccagggaaggcctggggctccctgcagcaggaatgtgcccagccggccgatcacaggatgtggacgtgagtcaaccaagcgagaagttccatctggaaactcgggcatgaggtttaaatgtggtctgctctgcctcaggctggctgtgaccttgagctggtgatgtccctgcctcagtttcctcaccttctgatggagatgggaggggaagaaagcagctgcctctgggtggtggcagagatgcccatgtctaggacctccaggccttaactaatcaggggcactgatgaagccagcggggctccactggggaccacaggcaagactgggccaggacgaggcggtcacgcagaggtgaggggaccacaggctagcgggagggaatacacggagagtccaaggggagaggaaagtagagagtgagagagctagagagaggcgggtgggacgcggagaggacagcgagggagggatggggcgtggggcgcggagcgatgggggagaggaggccgaagcgggcgagcctgactcccgggtcctgggagccggcccaggtctgatgaggaccagtcggacggggcgagggatcggccgggtccatcacgcccggggcgcgggccccgagggtcctgctggcactcaccgtgcggcggcggcggcggcgatccgggcggccccagccatccagctgcggtgccgcgccccgcccaggctctgccccgcccggccgcccggccgcccggcccccggcccggggccgcccccggcgcgcggccacgtcacaaggggcctgtccggaacccgaggcgccgcgtgccgcggggtcggggggagtggcggcgggagggcgcttccgcctcgcggcggtgggggacccgggtagagggcgcacttccgtttgggcagggctgcgggccggaggggagggtcggtcggaagtgagagagccacacgcaccgcgctcagccaggctgggcagggacggaagcggcggctctgcggggaccgcgatcgaccaggctgcggggcttgcggatctggccgccgcttcccgtccagggccgcagtctgcccgtggccgcacgggggcgcgcccggccgccagaccacgccgcccaggtcgggctgggaggactactgtgcgctcctgctctgagtcagcccggcctggctcctccatgagcaagggaaaggggaagtgcctgccgcagggaggggcctggccccgggaacctcagaagagggaattttattcttactcatcgaattatttttatgctttggtttttcactgggaacctcaggccactgtctccagggcttgtaaccctttggggtccaatgcatggtggctggaccctgctgatgggaactccaaacctgggaggcgagggctctgtgcttccctcacctggaggaagctagacctgacctctttggttagactaaggcagcaaacactggatagcagttcttataaccgcaatttactgaccacctactatgtgctattcactttactcgcactatctcactgaatcctcatattatcccattgtggtgggtactgttagcccagggtcacacagtggcacagatggcagagccaggattcaaacctgggtgtcctgaagccagagtatgtgataccacttctcacgtctaggtcctgaacagcagtgggagtctggcttggcgtttcgagtttgtattcttctctggaaatcagccagtacaggagaagattcaggaaggggcatgtgggtactcacttgggcagagatagcgactgagtacaggtctcttaagtctctgaccctcatcagcctcccatggcagctccaaccatttactctgtcactttcccctctgctggggctcttgagagcacactcagctctcagggctgcctctggtgcctgtcccacttcatgttgcactgttggccttccttagaccgccaacttctccctggtggcccagcttgtcttctgaagctttctgtccatctcaccccaccgggcccatacaactgccaggacgttctgttccctccctgagttccaaaatggaatccctgggttagtttcttggcaaagaaaagctactcagggatcctgccctaggacttctaaaatgcccccctccctgtatgcaaaagcgctccatcttatgcaaagcacttcacaatatgcaaatgatttcacaataacacagtcagcattcctgcctctggaggctgagcgctcctggccacccaacaaggggatgggcaagacccagccagaaacgttacttggtgccaatgcactaccctttcctcccacctggcctggaattcccatcggatacctaaggcccggtggctcacatctgtaatcccagcactttgggaggcctaggaaggaagatcttttgagcccaggagttccagaccagcctgggtaacaaactgagaactggtctctacaaaaaaatttaaaattagtcaggtgtaatggtgcgcacctgtagccccagctactcaggaggctgaggtggaaggattgcttgaacccgggaggtcaaggctgcagtgagccctgatcgtgccactgcactccagtctgggtaacagagcgagaccctgtctcaaaaataaaaaaataaaaaaaattacaaattaataaaattgcaggggtttccaggtgtgtgagaaaagtgagatgcagaaatatttatttaatatgatccactatttttattttttaagagactattttaaaataatgacaaaaagaaaccttgtatatgtgtatgtgattaaaggta

SEQ ID NO: 915555 - DNA, 4001 bp, Homo sapiens
aaggtcctgcttatctggctttccccaggaaatactttccagttttatattctaatactccccttttgcccatctttcatgaattgtagctacacacttccttctttttctagcaccaagcttgtgctccagttgttcctttaactggaattcccctcccaagtctttctaccctttcaggcccagacactctataaagcatttcccgactgccattcccacacacaacctccccagccttgtctgtctactctgggccatcttgattttccagtttatctgtcccacattttttttttttttttttttttttttttgagacagggtcaatctcagtcatccaggctggagtgcagtgcagtggcttgatcacagctcatttgcagtctcaacctcctgggctcaagcaatcctcccaccttagcctcccaagcagctggggctacaggcatgcaccaccgctcctggctaattttttctattttttttgtagagatcggtatgggtttctcactatgttgcttagactggtcttgaactcttgggctcaagagatcctcccgccttggcctcccaaaatgctgagccaggccgggtgtggtggcccacccctgtaatcccagcagtttgggaggctgaggcaggaggtcacctgaggtcagtagttcgagagcagcctggccaacatgatgaaaccccgtctctccgaaaaacacaaaaattagtgtggcatgatgatggcgggagcctgtaatcccagctactcaggaggctgaggaaggagaatcgcttgaacctgggaagcggaggttgcagtgaacagacatcccgccactgcactccagcctgggcgacagagcaagcctccgtcttgaaagaaaaaaatgtttggccgggcgcggtggctcacgcctgtaatcccagcactttgggaggccgaggcaggcggatcacccgaggtcaggagttcaagaccggcctgaccaacatggagaaaccctgtctctactaaaaatacaaaattagccggtcacagtggcgcatgcctgtaatcccagctactcaggaggctgaggcaggagaattgcttgaacccgggaggtggaatgcagtgagctgagatcgggccattgcattccagcctgggcaacaagagcgaaactccgtctcaaaaaaaaaaaaaaagaaagaaaaaaatgtttataaagtgtgcttgtacacgtagatgtttaccacaaacgactgaactaatgttgtccggtctcagtaaaacagtctatagctgactgcaaccatattgatcaggcaggagttgcagcaggcagcaccgccggagctctttagggttccccatcaataaaatgggggttgtcatcctacctagctcttgggattttggtggattaatcgattcatatagtgtgcttaaaacggtgctccataaatgttagctaatgttggcccgtagtagtccaagatctaaagaaaacgcaccagaaggcaggacatagggaaccagttaggaaaaaatcagatcctgtcttcagtgaagcacttacgtcctgacatactttcccgaaatggccccaccaaaggggacctcctcccgagcttagcccgggatccagtacctgagtcgtcccccgcgctgagaccctggacaccagcctccgaatgtgagccaggcaactggcgcggaatcgacacgacggcgatcgaggcttcaggaggctgtagctccatggaggcggatcctgcacacaggtttggggtgtgtgggcaaggggcagctcagaacagggttagagggtaggcagtcgtgaccgtcagtccaggatcgccgtgaggcagtgatctcaccgctcctgccacatgcactgggtgagaaaaccaagccgcaatgcggtcggtgagccagcacgctcccgtaggacgcatgcgcgcctttttcgcgccgcaagttcaggtggcgctttgtctacgccctccttccctggaactctctacccacaactccccggggtcgcatgcggtcaacgtatgcgcgtgcgctcgccgtagccccgcccccaaatcccgtgggcctctgcggcatggtatttaatcgtctccccggggagattcgttctcatttttctactgctcgtggtaagtggcttcgtggtctttatagctgttactcttttgtactttgtctttttcttttattttcttttgagcgattgtgcgaacatagcatagcacgcactatgccttctgtgttgtagctgcctggccagggcgactggcggataaggtcttgtgcgtggcctcgaggcttaaaagtagcagtggggctttgtgaaggacaaaatggcgatggcgggccgtgtaggtcccccttcctatgatgaggaccttttcacagacctgtactgagctccgtgaggataaataactctgaggagatgggccctgcaagcctcttgcttagccgtctgttcagaaaatagcgttttcgaaatgccctgagttgacctaatgtcttattgggctcctgtctgcaggatttacgcgcacgttggaaccgaagagagctctgttgttgcagtaagttcttacggccatttcttaatctctgctctttcgttgagtgtgtggaagttgctacggggatgattttacgaactgaactctctctttctgatggattagtggagaaaacagaaaattctgagtagcactgtactgtacgcaacaaatgtcagggccctattgatttgtctgaggtgttagtgaagggtgttattttttcagatgttcagcccacaagagcttactggtgaaggaatgggacaagacccatctttatgcaaagccagcgttacagtaatgttccaggtaggtgtacatggtttatgctcttacagaggagaccttgtagataaccactccatgatgaacacaaaatgacaagcatatggctgaactttcaagtgatgtcatcttactactgagaagtgagagagaggtcttaaggggtctttgaatgactatttttaggtacataaaatgctttcctctgttgtctacagcatctcataatctatcctggggaattcagctgcctcccagggtgaatacaggtaattatccaaattggtgtatgtcatctttgtaaatgttcaagaaaacaagtggccggcggaacaatgttttttggcgccttccatcttgttcctcttgaaatgattttctggggagggagatcgcaacccggtactacagttcttgtaagggtgtgctgttaccctcatccatatatcgatcacgttactgtcagatgatttgaattgataagctgatgttctgtgaggtacaaaagttaatagcatgttagagttctgatggcagttgttgtttatgaataagcttcattccatcctaataccttaaaataactaatttgctttcctttccaggtattcctgatgacagtctgcctctatcttacagtaagttgtttttcgaattctatgggcctattatctaatagataacttagccattttgatatttgttaccaaagcctgcttaacccataaagttttctggttcctcttgttctctgtagtgatgtttctagatagatgcccactgatatatgccccttttttctcagatagatgcccactgatctgcccagggtcagacgaatgcttgtcagttgtagctttccaggattctgctccaatgaggaggaaacatcctgccttacccctgttttagcctgggaaccagtaattgtgaactcaccagggttaacatgaagagggcatgagagcttattccataaggaattgtctgagacatttggttaccttttcttagtttgtccattagcaaccgtaactaaaatagttttggctgtttgggataattagctaattgaatgattttttgattcaggagcagcttgttgctatataccattgaaaagccttcagagctgagaggttagt

SEQ ID NO: 915556 - DNA, 4001 bp, Homo sapiens
tctatgagttaagggaaaataaggaaatcacaaatgcaagtcactgagtgtttcctatgtattacttggtacaaaagcttgaatttgaacccgggcaaaattcattccattgaaacagatgtgagcaaggaagggccttaagatatgggaaggcaggccaggcgagttcaaaaccagaccggtcaacatgttgaaaattgtctctactaaaaataaaaaaattatctgggtgtggtggcacacggctgtagtaccagctactcaggaggctgaggcacgagaatcgcttgaaccctgggggaggaggctgcagtaagctgagatcgttccactgcactgcagcctgggtgacaagagtgagactccatctcaaaaaaaaaaaaagatattggaaggcagaaagtttatagtgcagagaagtggcccctgtgttccccactcccaaagtgaacctttttaaacatgtgtctatatcgagtcgtaaaacaatatttgggattccccccccccaaaaaaacctactgttttacaagtttaaaaccactggtttagtaaatatctatattttgcaaataagggcactgaagcccagaagttaaatgacctgctcaagattccacagccaagtagaaagcccccagacgactggacaaatccattttaggctgaagactaacaaatctcccctctacctgccctaggaaaactcagagccagttagcaggaaaccagacaaaagttctagcctacttttcctctggccaagtcctttctagctgtttccttgggaaccccaggatacccactcttttttttagccgattgcaagagactgtcaaaatcttccttggagccaaaattggggtcgatctgcagcaagtcagtctgagcgacatcatccttctggttcttgtgaattggacccagcacaaggcccttcaccttcagagagctcaggtaatcgagacgccccttcagacctgaaatgggggctgggttaacaagtgaggcccctctgagaggcccctgacctccccaccctcccttctcccagcgcctaagggtgggacggggagggggcaaagggggagagagggaggcaaggctgaatcacgagactcagaggagctgatgtaaggagtcctgcacattacttcagaaaccggttgcaactggcttctggcgccgcggggaaggaggacgctgagtcacccaccctcgtgacggagtgaggggcgggtcggctttcttcaaagaaaggagggaaggacaatgtgccggggagggggtgggggaagggggaacagtcgtcggtacgggatggagggaagaaccatctagatccgtctggggacaggggagggggtcggtgcaagccaccagattcaaccggaggtacccgggacgggggcgcgctgcactcacccgccaggttgcccgcgccgtggccctggaaggcctgaaggtcgccgatgcggtagagggcgcccgtgtgccaccacttctgcgccggtagctcgcgacaacgcggcgctcgcacgattatgaccacggcaccagcaagcatgccgagccagccgagccagaagagcagcagcagtgcccagcgggtgcgtacccagccggggctgcctgccaccttcagcagctcctccttggacaggcccgtgaacttagccgcggctgccgcctccgcctcgtcttccgccaccttgatcttcaccagaccattcttctcggctcccgccagggacatggccgccccagacgccgcgttcatcggctgcttctcgggctctaactcattcagctccacctccttcatatccacctcggtgtcctggctcatggtgcctgcagaaccggcgacacgacgcagcttgcggtcagatggtggctcaacccctacctggaccctcggacccagaacgctctccccggcctctgtgcctccgcgcagtttcggctactgcatctgctcagcagcaggcgcggcctctgggaaggggcagcggagccccgccccggcccgccccttaaggtggaacctcggggactgccccagccgtgggcggctcagggtagtaaagtcaggaacacgcctccgacagtacttcctgcatggtccaatttctcatctccaacctgtctaaccctaaagttcttttcaacctgattctgggaaggcctggcacggagccacctttaagtggactaggcctgtgatcctgccccaaatcccgaggcccctccagtgtcctttaggccttaccgcccccaaacgcccctcttcttccattccggcaggctagtgactaccccaacaccatcctccatttgcccctggttcacggctccggccgccgtctggttttcccaactttgcatggctacttgcactctcagaggcagccagtcacaacttctgccttttcccccaccaaggcttgccctctcaggcctctgggacttggcgctagacctctgctagacctctgcttccgtgcacggcttactcccactcgtttttcaagactcatcttgaattcatttcaagaaattcctcatgcagcaactatttattgtgtactcactacaatactttgctttgttaactttattgaatttaacactaatccagccttcttcacagtactttaaaatgaatggtttgggcaggaaggttgaggtagacaccccccttcttatcctaccccacccccagctgctagcacctggatgtttggcagctaggaatcagacatccagaagagactgatagggctgtaatgaacataacagagctaggtctcagaggcatccaccttttttgtggaatagaccagaagatgccatggccagactcttacccaccttgcaggaactcccacagttatccccaaactcccccaaggtcctgtctccctatcacttcactatgttaggccttggaggcagctggtactgcagaggctttgaagaagcctagaattccctccacagggtccttggattgaagtggggcagagacagggttcacagcagggaactaccggacatcaacaccgtggggtgccaacactctcaggaactccttgttcctaaacagtgccagttgggctactttcagagaggagctggaggaaatcggttctttctccctttcccacctaggctggaagccaagattgctgtgtatttggaagaaagcaaaagccaagatctgaagtaatagcatagagaaaagggtcaccctctgctagtcccctctgcaaccccaggcatccaaccccatccccaccctaggaacaaggggtgcacggggcagcccctgggagaaggcaagcaagtgggttcagaccagtgctcaaagataataagagatccaaggtgccctgcatgtgccagataagaagtgccaaccagaggttctgaatggactatatctcgagcacaaaagctcaaggctgggcgcagtgtgactcatgcctgtcacctagccctttaggaggccaaggagggaggattccttgaggccaggagtttaagaccagacggggcaacatagtgagactccatttctaaataaataaaaaaataaattttaaaattatctgggcctggctgggtgtggtggctcacacctgtaatcccacctactaatccctgtaatcccacttctcatgctgtggcatgagaatcgcttgaacccaggaggtagaggttgcagtgagccaagaatgggccactgcactccagtctgggtgatagagcaagactctgcctcaaaaaaactaacaggccaggtgtggtggctgacacctgtaatcccagcactttgggaggctgagggtggcggataacttgaggtcaggagttcgtgaccagcctggccaacatggtgaaaccccatctctactaaaaatacaaaaattaactggacatagtagcacacgcctgtagtcccagacttggaggggtgaggcatgagaatcgcttga

SEQ ID NO: 915557 - DNA, 4001 bp, Homo sapiens
cagccgctgttcagagcagtgatcaagacctccccatctccacccctcaaggaatcggttttcttccatagccacatcaggtgctgtgcaggaaggagttgaaacgagaagccaggagcaacgagaaggacactaacatttattaagcactgcagactctcacagcactcccacggaatcgatattattatccccattctgaagaccaggcaactgaagctcaatgtttaaggaactcaccgaagtcaccaactgataaaagtgatggaagctgggattcaaatccaagctaaacttccttccaagcttactccacaacacagaggttggggaaaggggataaaaagagaggggagcccaattccatttccacccagctcctgaggcggagcttgtcagcacagctctctccttcccagaataggaagatacccatcagaggcaagtcctagacaccagcagtggtaactccctgccccaaggcagctgcagacagcctatggctgtagttactgctcccaaagagtgttagaattcccactcccagcttcggggccactcacacaaggtgattgaagtggaaaccagagactctccacaatgccctcctagagtaaatgaggctatgtaactttgtccaaatgagtaatttgaaaacctgggggctcccagctcctgaaaagggaaggatgtggggccctttatattcatactccactttgtgcagctctcccttgtcttatgatagccctattaagaaattcctctcccagcacgtctccttcaaagagctctagacctgaggctgtcagaggcttaggactctgcctattagtcccagggtctggatgaccagcaggacacctggcattcagtgaccactggattagataaatgaaacagtgggcagagtgccacccaatctccccctgaagtttgaagaggtcgagaagtgaggctgtccaactgctgaccctgctttctgtccacctggccacctaaccttttctggcttccacctgcccctttgccatccctccccccagcccacccagcccattttcaggcatacctgggcacgtgctggaatagaagccctcgttcttcagaatgatcaacagggagccccagcccaggagtacagcagagaagaagaggttctccagcacagccgtgcaggccatccaccagcgcctccggtacgcctgttgcagcgtgggggccatgctggccccgagcctgcacagaaacagagcgctgggtgaagggccccccagtggccccagggaagggtcctgcatcatggtggcacccgagacctctcgggccagcccgcgaggagcccctcatggaggccccatagagccctgggcttcccagccggtgccaaggagctggctccgcgcgcactagcagtgccagaggtgcacgcggcacggggctcccgctgagccactatcggaaacaaggaaggtcctgtctgcgcgctgcagcttcctagcaggctgccgggttctctcacccaggccagggcgctcagggccgggctgctggggagaaagtccgcatctgcccaggtccccagaggacagcaaggggcagagcgcgctctgaagcaccgcgggcccatgtccggactctcgcgccaggaaagacccctagaagctggcaggaagaagggcaagttcaaggctaccctacgaccccatcttccagttgcccctccaagacctctccttccctctggggccgggcgacagcaagccctccccctttccgtatcaggtgacccacgaccctacagtctctcgggccaagccaacagctgccacgtggagggagacccaggacgggctctcctcggttccctcctcccccgcgcgcccctcactcactccgcagggctcggggcaccaggctttgcacctcggaacccgcttgcccccctccagccccgggagggggctcggacttcggcaggaagtctggcggctgctgactttataagggcagcggtggcggatgggctggcgggcgggtgtgtttaccaaagggagggaaagagccccagctccccccgccgcggccgctgcagcctcggcgggaggagagggaacgcgggcggcgcgggggcggggagcgacaactgggatgagaccgaggaaagcggagaggagaagggcaagaaagacccagagagaggggaggaagtaccagtcacttcttccagggggactcggtattctcatctgtgaaacggggctttgggttcaagcgctccaggaggtccgctggaactctggcaaacgcgcagctctaagcagaggaagtgcagcgagcggggacccgggaggaagagaagagtcggaggggtcagagaaaagaaaagggaaggacgcgcttggcgagatgggacactgtgccgcgggaccgcgggcgcaagtaacggtctttccttgggaagcctggcagtgtcggcgggagccggcctcggtgtctctcagccgacgcatagccggagaccctacgcgcgccccctccccgcccacgctgctcacctccggtcaccggcaaatgagcagccagcagctgcggacgcctccgggagcgcaacgctttcgcggcgcgtccggagtcccgtgggcccagccctgagccgcgccggcgctggggtcttctctgcgtgcaggacccggcggccacggagcttcagcctgacagcccggtggcctcgcctccgctgtctcctcggaagaagcgggggaactgggaacccgccgggcgccagaggtctgcgaagctgggcttggatgaagtggatctgcggagttgatagttgtatttacacgcgtccggagctgcgccccgaggtgggggcgggggctcccttcttttcccctccccttaggtcgagtttcacgcgcacgtgactcgcccgctggtcccggacactctccctctggcacagccccagcacctacatttccaccctggacccccatcttctcccccaagcccccagactaacatcaggcagcgccctctgtatccttgttcaaaacaaagtgcgattcggctgaagccgactgaccgcgattcagggccgccttgggtggggttttgaactgtgcagctggaagcagtgttttccgagaggcagagtggcacgggtttctttggagttagtcagatcgaggtctgagtcttgactttttaactgactaccctgggttacctagggcaagttacctctctgagcctcagcttcctcctctttaaattcggttaaaatggaacctacctaactgcccaaaggaatcgcgattgtgatgcaggtaaaatgctaagcatagcatttggcatagtaagcataatgttaattgttgctgctgtcattatttcagaagacctggtgatcggatgcttccagatcaacaattgattgactccaggtaaatctctcagcctccctgagcctcagtatcctcatctgtaaaatagactactatggtgtggagtaatgagaagtaatctcattacatgtgagtttaattgtgtgttaagagtgctgctaatgcatgctgagcttaatacctaggtgatgggttgataggtgcaataaaccaccacggcatacatttacctacgtaacaaacctgcacattctgcacatgtaccccagaacttaaaataaaaataaaatttttttaaaaaaagagtgatactggtggccaggtgtggtggttcatgcctgtaatcccagaactttgggaggccaaggcaggaggatcgcttgagctcaggagttcgagaccaacctggacaacatggtgaaaccccgtctctacaaaaaagaaaaaaaaatagccaggcatggtggtgtgcacctgcagtctcagctacccagcaggctgaagtgggaggatcactgagctggagagatggaggctgcagtgagccaagatcatgccactacactccagcctgggtgacagagtaag

SEQ ID NO: 915558 - DNA, 4001 bp, Homo sapiens
gtcccagggtctggatgaccagcaggacacctggcattcagtgaccactggattagataaatgaaacagtgggcagagtgccacccaatctccccctgaagtttgaagaggtcgagaagtgaggctgtccaactgctgaccctgctttctgtccacctggccacctaaccttttctggcttccacctgcccctttgccatccctccccccagcccacccagcccattttcaggcatacctgggcacgtgctggaatagaagccctcgttcttcagaatgatcaacagggagccccagcccaggagtacagcagagaagaagaggttctccagcacagccgtgcaggccatccaccagcgcctccggtacgcctgttgcagcgtgggggccatgctggccccgagcctgcacagaaacagagcgctgggtgaagggccccccagtggccccagggaagggtcctgcatcatggtggcacccgagacctctcgggccagcccgcgaggagcccctcatggaggccccatagagccctgggcttcccagccggtgccaaggagctggctccgcgcgcactagcagtgccagaggtgcacgcggcacggggctcccgctgagccactatcggaaacaaggaaggtcctgtctgcgcgctgcagcttcctagcaggctgccgggttctctcacccaggccagggcgctcagggccgggctgctggggagaaagtccgcatctgcccaggtccccagaggacagcaaggggcagagcgcgctctgaagcaccgcgggcccatgtccggactctcgcgccaggaaagacccctagaagctggcaggaagaagggcaagttcaaggctaccctacgaccccatcttccagttgcccctccaagacctctccttccctctggggccgggcgacagcaagccctccccctttccgtatcaggtgacccacgaccctacagtctctcgggccaagccaacagctgccacgtggagggagacccaggacgggctctcctcggttccctcctcccccgcgcgcccctcactcactccgcagggctcggggcaccaggctttgcacctcggaacccgcttgcccccctccagccccgggagggggctcggacttcggcaggaagtctggcggctgctgactttataagggcagcggtggcggatgggctggcgggcgggtgtgtttaccaaagggagggaaagagccccagctccccccgccgcggccgctgcagcctcggcgggaggagagggaacgcgggcggcgcgggggcggggagcgacaactgggatgagaccgaggaaagcggagaggagaagggcaagaaagacccagagagaggggaggaagtaccagtcacttcttccagggggactcggtattctcatctgtgaaacggggctttgggttcaagcgctccaggaggtccgctggaactctggcaaacgcgcagctctaagcagaggaagtgcagcgagcggggacccgggaggaagagaagagtcggaggggtcagagaaaagaaaagggaaggacgcgcttggcgagatgggacactgtgccgcgggaccgcgggcgcaagtaacggtctttccttgggaagcctggcagtgtcggcgggagccggcctcggtgtctctcagccgacgcatagccggagaccctacgcgcgccccctccccgcccacgctgctcacctccggtcaccggcaaatgagcagccagcagctgcggacgcctccgggagcgcaacgctttcgcggcgcgtccggagtcccgtgggcccagccctgagccgcgccggcgctggggtcttctctgcgtgcaggacccggcggccacggagcttcagcctgacagcccggtggcctcgcctccgctgtctcctcggaagaagcgggggaactgggaacccgccgggcgccagaggtctgcgaagctgggcttggatgaagtggatctgcggagttgatagttgtatttacacgcgtccggagctgcgccccgaggtgggggcgggggctcccttcttttcccctccccttaggtcgagtttcacgcgcacgtgactcgcccgctggtcccggacactctccctctggcacagccccagcacctacatttccaccctggacccccatcttctcccccaagcccccagactaacatcaggcagcgccctctgtatccttgttcaaaacaaagtgcgattcggctgaagccgactgaccgcgattcagggccgccttgggtggggttttgaactgtgcagctggaagcagtgttttccgagaggcagagtggcacgggtttctttggagttagtcagatcgaggtctgagtcttgactttttaactgactaccctgggttacctagggcaagttacctctctgagcctcagcttcctcctctttaaattcggttaaaatggaacctacctaactgcccaaaggaatcgcgattgtgatgcaggtaaaatgctaagcatagcatttggcatagtaagcataatgttaattgttgctgctgtcattatttcagaagacctggtgatcggatgcttccagatcaacaattgattgactccaggtaaatctctcagcctccctgagcctcagtatcctcatctgtaaaatagactactatggtgtggagtaatgagaagtaatctcattacatgtgagtttaattgtgtgttaagagtgctgctaatgcatgctgagcttaatacctaggtgatgggttgataggtgcaataaaccaccacggcatacatttacctacgtaacaaacctgcacattctgcacatgtaccccagaacttaaaataaaaataaaatttttttaaaaaaagagtgatactggtggccaggtgtggtggttcatgcctgtaatcccagaactttgggaggccaaggcaggaggatcgcttgagctcaggagttcgagaccaacctggacaacatggtgaaaccccgtctctacaaaaaagaaaaaaaaatagccaggcatggtggtgtgcacctgcagtctcagctacccagcaggctgaagtgggaggatcactgagctggagagatggaggctgcagtgagccaagatcatgccactacactccagcctgggtgacagagtaagactctgtctcaaaaacaaaacaagaatgactacagaaagctccaagaaggcctcagataaaagggaacccctgaacagatgagccaccaagccaagagaggaactaatggctaccatagacagggcactttccaaaataaaaatactgttattaattcctcaagacatcatggtcccatttaaacctcatagcttttcacagagggagaaactgcaggcttgaagctggagcaaggttagaggtaggatgcagagtcaggtcggcctggcatttaagtacggctccttccattcctcccagaaggagaatggcaagagcaaaggcttagctgtgggaatggcacaaggagttctcggtggccaaagcacatgtcaggctctgatggtttaacttcttaaaatgcaatactgcctcccagaacttccagatcaaggtcaaactcctcagctctacacagggggacctagagtcaactttctaagctaggagagtcatggatccctttgagaatacaaaagacagtgggcgcggtggcagtggctcatgcctgtaatcccaacattttgggaggctgaggcaggaggatcacttgagcccaggagttcaagacctgcttggtcaacatagtgagacccctatttctacaaaaaattcagctgagcatggtggcatgtgcctgtagtctcagttactggggaggctgaagtaggatgatccctgagcctgggaggtccaggaagctggagtgagccgacatctcgccactgcactccagcctgggtgacagagaccctgtctcaaaaaaaaaaaaaaaaagaagaaatatgttattg

SEQ ID NO: 915559 - DNA, 4001 bp, Homo sapiens
gaggctgtgcaggggatgaggacaaggatccttggggtgaaggaagagaagagcaattttaggttttgctaattttgtaaccctggctccaagccagcccttacaggaagtcaccctggcctccggctcaattcagcacgtgatagggaagccacatttatgcagagcagggaacgaggtaaggaaatggaagtggggctgtggtgaagtgggcaagtctagagagagtcccgctgcctggggctgttcctaacagctgctgggagcgagctgcaggtgtggtgcctggcagggtggccgggctgtctgactctggatttcactccaagctaggctgctgcctgaaggattcctcttacccacctttgcctgggctggcctttgggacttacatggctatgaggcgtgccacggtggtcttgaaccggtcaaagatgtagccagtggggaatgtcatgaagttgttcatgaaggaccccagggtgaagatgagtgagaacctctcatcctgggctttgcagtctggagtagaaaaaaggtctcccatgcatcccagccttcctgccaaatgagcacacaggctgggctcccctccacctcagacagcttgtcggtcgcaaacttgtcccttaagctgagttgaaatgtggctgcccctaattacccctcaggagctggtgcctccctcccaggcacttcccagatcaagtggggtgagagctgctgacccttcctctcatcatagaaagaggggtgggcagggggcagagtccttcctgctccttgccaccacgtgggagccagacttaacttccttagaaaagtcatccctgcccttaccagcctgccctgtggcattgccaatcggcccagcatctggtccacacagatccttaaagtaatcttcattcttgaagacaaacactagtgaaggccagccaaagaggacgccagcaaagcccaggcattccagcagcccagtcagcagtgtggccacgtgcaggggcaggccctggcccgccatgagcagaagtggagtggatcttcaaatcccactttgtcctcctggacggatcacaggcgccgtaagcctggcgtttgagcacttggaaaattcctctggcaagccaagcccttcctttcccgtagctctctggttgtttcaggcctgggcaaaaaccatcagcgggtgattctctggatcctgtagaataaagatagaggctgctggaagaggaggcctgcgggaaagggaaaggtagactagagttatttgtgaggtgcattaagaggcaggatgatcatggccgctggcagcaaatgtggggaataaatactccaatacatcatcttaggcactgcatttgagtaaccacgtggcaagtagagaggcaggtcttgatggccacctggagtcacaggtgagataaacgacttacccaatagctccccgggagcaggtggagaagcggagctcctgcgctcgaattctgaataccgtcccctaaaataatgacagcaactcaaccaggtgcagaggcagggagatttcatacagaagacacaaactcccgctgccaagttggtgttatcttcagtttactgacaatgaaacaaaagctcccatggatttcaggaacttgcccaaggtcacagggctagtttagtcacgacgcaggccattctactgccagaaatacccccaactcccatgaccctcgcctaggactcgcaaacctggtccccgccgcccttcctcgcatcaacttctaccaggaaagcctccgggggccgctccccgccagcctccgcaccccgctccagcctgcggcctgccctccccgcagaggagcccgaggggccaggccgcgctcggcgccccatggcgcccgaaaggggacccttcgccctacccgcctgctccgcgccggggctctccgcgccctttccgcacgggccaggttcgcattcgcgcctctcgcagcccctcccagtcccctgctcgcctccgccccctcctgcccgcccggaaggggctggggcagacctcccactctccatcacttccttcttcttttcccttgctcacagcctcccgcgccctttttacctctccctcttgaaacttctccctctagaaccccctagaaccccagcggtgtctttccctccctcctcgctgcctttcagcctcccagcccccttgcctctgcctcccctaaccaagttagttgaatgctgttactcgctcaggcccacctagggaaaatgtcacacccagcacccagaggacacacagacagcacatgagggcatagggacacacacactctatttgtgcattttgccttgaccgctgggttggcagggaacatatttttcctatttgctcaccagcttaaccgtctctcccagtttcacactcccagagctgccaaaaaaatcccaaccacagaatcaggaagccaagaaccaggactgagggcttttcagaaaccatcccctggaggactgccccatattttcactcccaaaaaccccttagatgactccctgcctcacccccgccccccaggttctgaaagagccttcccgccagactgcattgattaaccattcattgccccattttttattaatcaaagacatatataattgctcatcggagcttgtgatcagcgtgaggccttactaagcagctgccttactatccttccagcccagagcacgtgagctgacgtcttctttggcctgtgtggccgtttccttgccaaaagctcagtttggggagagcttcttgcgtattagatgcagtctgcagactcccaaccccagctacctggatcccctgagggcccaggaactccagctattccaagcccactcctcttttttttaagaggaagaaatagaggttacgataggggacagccagaactgaggattttccagctcaccaccaaagcacaaaagataaaagtctgcaaccaccctagtgacttgactgaatggaggaagggtggctggggtcctgtaccccaagctactcactagttatacaacctgaggcaagctctttggctgccccacctgtaagacgaggacaatagtaccttaattataggaattgtcataaaagaagtataagatgggtgtatgaggtccctgcatggcgcaggtgctataggcagattgtagggtagtagattttctagtctgcagttatgtagacagagccagagaagcagctctggggaggaatttcaaaggaacttgcccacggtcattctacaaagctgcagtaccttcccaactctgaaacgtatgctctcatcaccccgtcttaacaaacatttggacattagagaaaacaagtcttttcttaaaataacattatttatgggagaaaatccacaaaaatatagcatcccaggacaaacagggcttaagatgcaagattttctattttactgcaagacacaaagactctgaaattaatgcatgccctatcttctgctctggcatacattttagtctcctggggggatcagtaagtgtggaagtagcaagggagaaacagaaaaaagtcaaagtaaagagacagattttagaatgttaatctgcaggagcctgccagaaagatctagctcatgggctatctgtacatccaggactgaagcacgggacacggggcaggtcgtccagggttctgtccaccttatcttgttacctctcttgactcttagagcctccactccacatctcccatcaatgtctgcagaagacgtggcctccactaacacaagtcttactgaactgatgggacaggaaattagaatatcctctgaaccattcccatgttctttggttcgaattccagcagctagaaaaggcagatgctattctgatcactctcctgcgtggctccaatgaggattaatgagtaacatcagagagagaagtgattataataaggtctgacggtgcacccgatgtcttca

SEQ ID NO: 915560 - DNA, 4001 bp, Homo sapiens
gttggggcggggagggggggcggtgaggaggatgaggatgaagcctgggcaacctggatgtgaggctgtgcaggggatgaggacaaggatccttggggtgaaggaagagaagagcaattttaggttttgctaattttgtaaccctggctccaagccagcccttacaggaagtcaccctggcctccggctcaattcagcacgtgatagggaagccacatttatgcagagcagggaacgaggtaaggaaatggaagtggggctgtggtgaagtgggcaagtctagagagagtcccgctgcctggggctgttcctaacagctgctgggagcgagctgcaggtgtggtgcctggcagggtggccgggctgtctgactctggatttcactccaagctaggctgctgcctgaaggattcctcttacccacctttgcctgggctggcctttgggacttacatggctatgaggcgtgccacggtggtcttgaaccggtcaaagatgtagccagtggggaatgtcatgaagttgttcatgaaggaccccagggtgaagatgagtgagaacctctcatcctgggctttgcagtctggagtagaaaaaaggtctcccatgcatcccagccttcctgccaaatgagcacacaggctgggctcccctccacctcagacagcttgtcggtcgcaaacttgtcccttaagctgagttgaaatgtggctgcccctaattacccctcaggagctggtgcctccctcccaggcacttcccagatcaagtggggtgagagctgctgacccttcctctcatcatagaaagaggggtgggcagggggcagagtccttcctgctccttgccaccacgtgggagccagacttaacttccttagaaaagtcatccctgcccttaccagcctgccctgtggcattgccaatcggcccagcatctggtccacacagatccttaaagtaatcttcattcttgaagacaaacactagtgaaggccagccaaagaggacgccagcaaagcccaggcattccagcagcccagtcagcagtgtggccacgtgcaggggcaggccctggcccgccatgagcagaagtggagtggatcttcaaatcccactttgtcctcctggacggatcacaggcgccgtaagcctggcgtttgagcacttggaaaattcctctggcaagccaagcccttcctttcccgtagctctctggttgtttcaggcctgggcaaaaaccatcagcgggtgattctctggatcctgtagaataaagatagaggctgctggaagaggaggcctgcgggaaagggaaaggtagactagagttatttgtgaggtgcattaagaggcaggatgatcatggccgctggcagcaaatgtggggaataaatactccaatacatcatcttaggcactgcatttgagtaaccacgtggcaagtagagaggcaggtcttgatggccacctggagtcacaggtgagataaacgacttacccaatagctccccgggagcaggtggagaagcggagctcctgcgctcgaattctgaataccgtcccctaaaataatgacagcaactcaaccaggtgcagaggcagggagatttcatacagaagacacaaactcccgctgccaagttggtgttatcttcagtttactgacaatgaaacaaaagctcccatggatttcaggaacttgcccaaggtcacagggctagtttagtcacgacgcaggccattctactgccagaaatacccccaactcccatgaccctcgcctaggactcgcaaacctggtccccgccgcccttcctcgcatcaacttctaccaggaaagcctccgggggccgctccccgccagcctccgcaccccgctccagcctgcggcctgccctccccgcagaggagcccgaggggccaggccgcgctcggcgccccatggcgcccgaaaggggacccttcgccctacccgcctgctccgcgccggggctctccgcgccctttccgcacgggccaggttcgcattcgcgcctctcgcagcccctcccagtcccctgctcgcctccgccccctcctgcccgcccggaaggggctggggcagacctcccactctccatcacttccttcttcttttcccttgctcacagcctcccgcgccctttttacctctccctcttgaaacttctccctctagaaccccctagaaccccagcggtgtctttccctccctcctcgctgcctttcagcctcccagcccccttgcctctgcctcccctaaccaagttagttgaatgctgttactcgctcaggcccacctagggaaaatgtcacacccagcacccagaggacacacagacagcacatgagggcatagggacacacacactctatttgtgcattttgccttgaccgctgggttggcagggaacatatttttcctatttgctcaccagcttaaccgtctctcccagtttcacactcccagagctgccaaaaaaatcccaaccacagaatcaggaagccaagaaccaggactgagggcttttcagaaaccatcccctggaggactgccccatattttcactcccaaaaaccccttagatgactccctgcctcacccccgccccccaggttctgaaagagccttcccgccagactgcattgattaaccattcattgccccattttttattaatcaaagacatatataattgctcatcggagcttgtgatcagcgtgaggccttactaagcagctgccttactatccttccagcccagagcacgtgagctgacgtcttctttggcctgtgtggccgtttccttgccaaaagctcagtttggggagagcttcttgcgtattagatgcagtctgcagactcccaaccccagctacctggatcccctgagggcccaggaactccagctattccaagcccactcctcttttttttaagaggaagaaatagaggttacgataggggacagccagaactgaggattttccagctcaccaccaaagcacaaaagataaaagtctgcaaccaccctagtgacttgactgaatggaggaagggtggctggggtcctgtaccccaagctactcactagttatacaacctgaggcaagctctttggctgccccacctgtaagacgaggacaatagtaccttaattataggaattgtcataaaagaagtataagatgggtgtatgaggtccctgcatggcgcaggtgctataggcagattgtagggtagtagattttctagtctgcagttatgtagacagagccagagaagcagctctggggaggaatttcaaaggaacttgcccacggtcattctacaaagctgcagtaccttcccaactctgaaacgtatgctctcatcaccccgtcttaacaaacatttggacattagagaaaacaagtcttttcttaaaataacattatttatgggagaaaatccacaaaaatatagcatcccaggacaaacagggcttaagatgcaagattttctattttactgcaagacacaaagactctgaaattaatgcatgccctatcttctgctctggcatacattttagtctcctggggggatcagtaagtgtggaagtagcaagggagaaacagaaaaaagtcaaagtaaagagacagattttagaatgttaatctgcaggagcctgccagaaagatctagctcatgggctatctgtacatccaggactgaagcacgggacacggggcaggtcgtccagggttctgtccaccttatcttgttacctctcttgactcttagagcctccactccacatctcccatcaatgtctgcagaagacgtggcctccactaacacaagtcttactgaactgatgggacaggaaattagaatatcctctgaaccattcccatgttctttggttcgaattccagcagctagaaaaggcagatgctattctgatcactctcctgcgtggctccaatgaggattaa

SEQ ID NO: 915561 - DNA, 4001 bp, Homo sapiens
agatgtagccagtggggaatgtcatgaagttgttcatgaaggaccccagggtgaagatgagtgagaacctctcatcctgggctttgcagtctggagtagaaaaaaggtctcccatgcatcccagccttcctgccaaatgagcacacaggctgggctcccctccacctcagacagcttgtcggtcgcaaacttgtcccttaagctgagttgaaatgtggctgcccctaattacccctcaggagctggtgcctccctcccaggcacttcccagatcaagtggggtgagagctgctgacccttcctctcatcatagaaagaggggtgggcagggggcagagtccttcctgctccttgccaccacgtgggagccagacttaacttccttagaaaagtcatccctgcccttaccagcctgccctgtggcattgccaatcggcccagcatctggtccacacagatccttaaagtaatcttcattcttgaagacaaacactagtgaaggccagccaaagaggacgccagcaaagcccaggcattccagcagcccagtcagcagtgtggccacgtgcaggggcaggccctggcccgccatgagcagaagtggagtggatcttcaaatcccactttgtcctcctggacggatcacaggcgccgtaagcctggcgtttgagcacttggaaaattcctctggcaagccaagcccttcctttcccgtagctctctggttgtttcaggcctgggcaaaaaccatcagcgggtgattctctggatcctgtagaataaagatagaggctgctggaagaggaggcctgcgggaaagggaaaggtagactagagttatttgtgaggtgcattaagaggcaggatgatcatggccgctggcagcaaatgtggggaataaatactccaatacatcatcttaggcactgcatttgagtaaccacgtggcaagtagagaggcaggtcttgatggccacctggagtcacaggtgagataaacgacttacccaatagctccccgggagcaggtggagaagcggagctcctgcgctcgaattctgaataccgtcccctaaaataatgacagcaactcaaccaggtgcagaggcagggagatttcatacagaagacacaaactcccgctgccaagttggtgttatcttcagtttactgacaatgaaacaaaagctcccatggatttcaggaacttgcccaaggtcacagggctagtttagtcacgacgcaggccattctactgccagaaatacccccaactcccatgaccctcgcctaggactcgcaaacctggtccccgccgcccttcctcgcatcaacttctaccaggaaagcctccgggggccgctccccgccagcctccgcaccccgctccagcctgcggcctgccctccccgcagaggagcccgaggggccaggccgcgctcggcgccccatggcgcccgaaaggggacccttcgccctacccgcctgctccgcgccggggctctccgcgccctttccgcacgggccaggttcgcattcgcgcctctcgcagcccctcccagtcccctgctcgcctccgccccctcctgcccgcccggaaggggctggggcagacctcccactctccatcacttccttcttcttttcccttgctcacagcctcccgcgccctttttacctctccctcttgaaacttctccctctagaaccccctagaaccccagcggtgtctttccctccctcctcgctgcctttcagcctcccagcccccttgcctctgcctcccctaaccaagttagttgaatgctgttactcgctcaggcccacctagggaaaatgtcacacccagcacccagaggacacacagacagcacatgagggcatagggacacacacactctatttgtgcattttgccttgaccgctgggttggcagggaacatatttttcctatttgctcaccagcttaaccgtctctcccagtttcacactcccagagctgccaaaaaaatcccaaccacagaatcaggaagccaagaaccaggactgagggcttttcagaaaccatcccctggaggactgccccatattttcactcccaaaaaccccttagatgactccctgcctcacccccgccccccaggttctgaaagagccttcccgccagactgcattgattaaccattcattgccccattttttattaatcaaagacatatataattgctcatcggagcttgtgatcagcgtgaggccttactaagcagctgccttactatccttccagcccagagcacgtgagctgacgtcttctttggcctgtgtggccgtttccttgccaaaagctcagtttggggagagcttcttgcgtattagatgcagtctgcagactcccaaccccagctacctggatcccctgagggcccaggaactccagctattccaagcccactcctcttttttttaagaggaagaaatagaggttacgataggggacagccagaactgaggattttccagctcaccaccaaagcacaaaagataaaagtctgcaaccaccctagtgacttgactgaatggaggaagggtggctggggtcctgtaccccaagctactcactagttatacaacctgaggcaagctctttggctgccccacctgtaagacgaggacaatagtaccttaattataggaattgtcataaaagaagtataagatgggtgtatgaggtccctgcatggcgcaggtgctataggcagattgtagggtagtagattttctagtctgcagttatgtagacagagccagagaagcagctctggggaggaatttcaaaggaacttgcccacggtcattctacaaagctgcagtaccttcccaactctgaaacgtatgctctcatcaccccgtcttaacaaacatttggacattagagaaaacaagtcttttcttaaaataacattatttatgggagaaaatccacaaaaatatagcatcccaggacaaacagggcttaagatgcaagattttctattttactgcaagacacaaagactctgaaattaatgcatgccctatcttctgctctggcatacattttagtctcctggggggatcagtaagtgtggaagtagcaagggagaaacagaaaaaagtcaaagtaaagagacagattttagaatgttaatctgcaggagcctgccagaaagatctagctcatgggctatctgtacatccaggactgaagcacgggacacggggcaggtcgtccagggttctgtccaccttatcttgttacctctcttgactcttagagcctccactccacatctcccatcaatgtctgcagaagacgtggcctccactaacacaagtcttactgaactgatgggacaggaaattagaatatcctctgaaccattcccatgttctttggttcgaattccagcagctagaaaaggcagatgctattctgatcactctcctgcgtggctccaatgaggattaatgagtaacatcagagagagaagtgattataataaggtctgacggtgcacccgatgtcttcatccttttctcttcgcctccttcctcatcatctcacacctttttttttttaattgactgattggttcaacaaatacatgtggtacctcaggctctgtgccaagtgccgggattcgtagagaagagattcagtgcctgctctcaaggggctcattctcttgtgggagagacagacaaagaaacccaagatttctggagtgtgggaatggtcttccaggcagatgctagcacagcacattgaaaggcacggaacctcaacaaaacaataacatttaggaaccagctagagcacagggtggtgaagaaagtggaaagatttgaggccagcgtcgccatctaagtgagggcattaagaattcagcccacatcaatcaatcatgtcctattgatttcaccccttaatatctctcctatctatccgtggccactgctct

SEQ ID NO: 915562 - DNA, 4001 bp, Homo sapiens
cacacataaggaacttagagaagtacttagcacatagttaaataccatatatatttgtattatgattttcttacacagtatatgtttattgactgcccttctctgctatgaagtaagctccatgacagcaggaacttggtgcaatgctttatgcctagggctacgagaatgcctagaacaagctgggtgtggtggcaaacttctgtagtcccagctacttgggaggttgattcaggagaatcacttgagcccaggagtttgagaacggcctgggaaacatagcaaaagccccatctcataaataaataaataaataaataaataagtaaataaatacatggaaaaaaagaagagtgcctttttaagtatcttaagagtagatgcttaatgagtatttactgagtgaatagtcataaaaattacattacataaaactatggaatcaataacactttttaagacttcctaaaaagtgttcatttgcctgagtgacttttgaaggctagaataatgttttatactcatatagcttacatatttaaaaaaaaataggtctcttttcagtctcctgcagtgactttaggaatgatattggataatgaaaataaataccttattaatagaaacttatgtttgatcacatttctatatagagcatgcaaattcaattttgaacatgatgtcttcattgagaatcattgtaaagccaaaacaccactgcctcatttccctcacattaaataattcccatatttgtattatttagcaattcctttcgttaaaatgttttgtacttttcaaaaatgtttccatttcctcattaaaaattagtcttattataatttgtattaaaatgccctctactctctgacggaaaggccactaagtagagatacagaaaaaattaggttctcaggtcactttactattcaaaaatcttaactaagtcatttatctgtatctcagttttcttagctggaaaattgccgtactcatgagaaatgttctgtttgcttttcagaatgatgacgttcacaataataaaaaataacatcagccctctttattgcaaacctcctacaaatgaggccatacattaagtgctcacatagaggttctcatttgatcattaaaatagccctgtgggattgtcatcattattttccttctacagatgggaaaatagatatgtctgtctccaaagcttaggctttttacaaaaacattttaatgtctttctcataatgtgtaattatcctgaaaatcagtgagtgttcttcaactaccaggtgctatcatcaagaggatgagaaaaaaaaattagagaagaatggagaaatcatcttacctcataagtgctggtgataccagatctgtagaacacagggagaaagagctctgatgttaagaggatgacaaataggtaagcaatgaagaagactaggaaggatgccccaaagcggtagacttcagaaggggtccccaggaccgtgacagctgacatgaagctggctgtcagagacaagccgacagggccaaagctcatttgccttcccccaaccaggaactctcgggaagttgccttttttctctccttaatggcaaagaacaccccaattccagaggaaatgaaaaagagggctgcaaatacaacataatcccaaactgcaaagttcttcacctccatattggaaagtatgacaccagagagtttctttcaacgaggtctcaggaagaagatgtttccaaaagcaaagttcagtacagtggatgctttgctgagaggagagactgtgattccctgaagaaaatgattaccagaggcactcgtgtgaatcttcagacaccaacgtgtacttagtgaagatctcaaaagttgacttcaaagaagaatctggtggtggtattggcaccaagagatgagaatttgaaatctgaccctagctaagagctgtctgctcctctcctaaagcatatgccacagagaaggaattcagatgtgttctgaaattaataaccactgggggtggaatggactggccagataacatgctgttttatctcttagattttttttaacttaaggttaaacatttctgggaaacatagaattgataacaatttaccacctcagcatttttaattcgtgagatggaatctgtaaaatgcaaacacaatcctcagcagtgtcttcctcttgaagaagggagagtgaaggctgtgtgcctgcaattgtctgaggcagtggatgtggagagaaagaagcaaaggactaggaattcagagacctttgctcgagtcctggctcaaccacgagaaagccatgaaacatttcataaatcatttaacatttctgaacttcacctggaacacagggataataagaccttacaaggtctttaaagacttaagtcttaaacttcctgactctctttgtcttgatctgtaaaatgaaaggtaataatatgtaccccattggctattatctgtgcttacagcagagcactctggaacatcatagcttttctttctttattctaggacctagaaaaatcaatttgccattaattaataaattatttatagccttcaactttatcttgtctttctcttattttcaccaggttactatcactgtacccacaggctaagttagaattaggaccaggacaaattagagaaggaaggtaacaatccagttataaattcctgtttctgctctctttagactctgtcaattgttccaaagtacctctagtgcaatttctaattttgttcatgcttctcctccttcttcagtggccttctccatccccacctctacaaagcttgtgtattctacaagatctagtatgagttttctctactctgtgaagcttttctgcctctccacgtcaactcctgtagaacgtagcctccctagtactcattttgtactcagccatcatcttgcctattttagggaatctctatgtaaccggctacaggagtctgtcagctgttcaaatgacatttccttgaagacagaagcaaagctctagtccatatacccaatacattatagccattgtagaaaataaaaaaaataatttttagaaaggagaaaactaaaattatccataatgcccaaagacagaaacatttccagccaaacaataaaacaaaaaacgctctaattttgcttttcacatctggataactgaataaatctttgcttcatgaatttgaattagaccaaagaaaggtttaattagatagctaaagtatgcttttagttaccaataaaaatatgaagactctcccaagagctgtctgtgtcctctgtttaaattcctccactagatttggagatttgatatgataaatgttactgcaaatcttggtctttaatatatttaccttaacctgggcttttaattatttgtatcatgaagtattccaattatatatgaggtttttgttgtgatctcagcagaaaatcagaacttttttagctttcagaaacttgactcctttatagtttaatatttacactacctaatggttaatattcaatctataaaacatgtaatccccttgtataagtcaggttaagaatggttcaaaacattatcatcaataactttctaaaggtacatactagaaacctataacaaaagagttaatgagtactgatggttttaattaaactttgtgtagtaacagtattatctgcatgactccaattagtcttgaattttgaagtggtagggagcagattggttaatacctgggatatgaagaaacctttatgcctcttaggaaagtattccttgctttcaacattttgttgattataaggcacagcatcaattcagtaatttaattttcagttattttctacatatttacccttttctccctttggtagcattcgttgtcctcaaacgctcttcttaattccataaagactcactccatgcaaagttcatgcagattgtaaagcacagcagcaattcata

SEQ ID NO: 915563 - DNA, 4001 bp, Homo sapiens
gcagaggccgcctgcgcccgcgggctactgagtttgcaagaccccactcctggccgctcagcctcgcaggctcgcgcgtccgctgactggaaagtttgggcgccggtggaagcggacctgggcacacgtggcggcggcggggcggcagccgcgggaagctcctgctccgggctcgtcctgggagcgcatgggccatccgggtggccctgcgccgccgccgcctccgggctgttggctggcagtttattcatttccttgggagcactgcaatcctgcaaacacaatgtcaagttcgtgcaaaacaaagtcacaacagcttttaaaatacctgtatctagatatggagacgttcgcaactcaggtccagacacaatatctggggaagcaaattggaatctgaactttttttaaaagaaaggctgcaatcagtatttctcaatttgcccgtttcatcaataaccagatgacaaaaagaagctaatattccctccctagtggaggatgaactaagaaaagaggtagaaatgtaattttgtaagggtaaagggggaatggaaatagccctggagtcatgagctcccctccctctttggattccacatcacagctgtgggtgcccgcatccccatcaccactgtagaaagattctttaattttccgccccatttcctttgtcattcaacaatgcacactgcctttttcccccatagacaagctgtggccacaaagctgatgccctggcacctgcgagcgcttgaggccaaattggttgagtcccagcgctccacaacccacctcctcccgccaggtagcaaagacaaggttaagaatcacgatcaaaataaccacaaaaaaacctacaacgataataaactaaatttaagacacagagtagtaactagatttgttatcttacacaactcgtattcacttccagattcccagacatggaaaagaatatgcaaagctttttgttcttttgtttaggtcttcttcttcttcttcttcttcttcttcttcttcttcttcttcttcttcttcttcttcttcttcttcttcttcttcctcttcttcttttttgcgtaactattcacaggagtctaatatccttcacaactctaagcttgcttgagtaccaaaactcatgactaatttttattcgctttttcccaattcactttcaaatgaaaagaactgccagcggtggtttttctatccactttctcccctcgtgttatctttcacggcttcctaaacattagcaccaataattattattacactgtaagaataatcctattatcttcgcctccaccgcactcctctcgtctaaccccctttcacaaacacgcagaatagaactcctcgatttgcacaaatctaggtacctcggcttcagccagcatttgtctcagtagcctctaggacccagagcaactcgcctctgtaccggcatctggcttttcagcaccgaggacagtgcccgggatcgggtctttaggagccacagccaacctctcagctctacagcctaggaaacctctttgcgacctcaggtgacgctcacaagtacaaatacctagggctgcgagaattgttctcctcgtcgccccctttccccccacccaatgcacagacatctccaaaagaaatagccaaaacgaatctgctttccctgtcccctcagccccctttcctcttgaaagaacaaaagcaaacactcaccatgtctgacacaggcaacagactgaactggtggagggtgaaacccgctattgacaagactgggtttggctcaggcaggagaggcgctttctatatctccttgggaaaggccgggtttgcgtcagtgcaaagcaaggtgcccttggtttgacattttcttgataatacaagtttgataaatcattacccccttggattcaagttttaaagggacaacagcctagagtatgctggccagttgtcactccagcgggagggggctgcgtgtttggcgtgactcatgtggtctgattactaaaccgaaaccggcaggaggggaagacagaagtttgcctcctcctaattaagggaaacatgggagggacacgtcccactgcacccaaggcaaggcgcagccgccaacagagtggatcgggctgtagaggaggaaggagggggttaaatcactgtctattctttccctttcactagattccattgctgtccccccttatcttcagggattccgaaaatattactccgaaagaggttgagggtctgcgcatagccccacagctctgcgatgactgaagcaggcatgggtcctgcatttatcaaggtgtacctacctagcatgtatgtggacttcagattctcacatccctacccttccagacagtcagtcttggaggaatcctggggtttttgcttaaaaattgtgatctggtatttccgttcctatttctgttatcacaatcaagagaaaattctgagtataactgacctttttcattgtatttttaagcttttctgaagacgttttagagaaagaaaaacgaagtttttccaacacagacctagttcttaggtcactttcaaagtcaagggaaacccattctttctttacagtcctttcaataaaatcctacaagagccaggcctgatttggcagcgcgggaccttagagaccgtccaaatcgggatgcccagcaatgcgggggagggggaatgagagctggcaatctgcaaagccatgccaggatgttcaaccgtactgtggcggggatgggagtgggggtggccatggcgataaaaagatggactttcttgttgtgtgtacaatgcaatagctataatcagaagaggaaaaaacgcctttacaaagaaggtgtagtttggagactagaaggggattatcagcaaaatgcttcccttctctccttccttgccggtctagctcggggaacccctggcctcggggatgaggagccacagacagcacgttttcccttccctactgccaacagcccagcccactgcctcggggtgcgcgccgtcgccagcggctgggccgtcccacgcggcgggaggacaatgccgcggcggccgcggccgcaggcgtaggctgcagtggcagattgcggcgggcgccgggggcactaaggggcaccctcctgctcctctggagagcccgagagtgtttggatgcctccgctggttggctttcccgcctagcccctctaaagggcagctggctggggacacacggtctgcattgcctttggtgggggcaggaggaggagatctttcttttgagacgccttgaggatttcaggtcgctttttattgcagttttgagctaacgtctattgagatctcaatactcaaccattgtgcaagggatatccatgaattatctcggttagatttagcaatggcctttcagaaactataccaattgcaaagctgaggaaattggggctcagaaagtcgcttttgaaccctggagaagatcccaaccacctcccgccgggctgtcgctagggtcagtcgctctctccccggggcccgctcgtagggagaggtcgggaacgagggttaagagggtagggtgggctgtggtggactctggctggaggagggtcgtctgagtgggtgggactgagaattccgcaggggtgcctgctcaagttccggctggcgctgagaagcaccccgcaggctcttggcatcttgggggacgccaaggggacctacgagtgtttctgcctaaacagtccccagtttccgagagggctcaagacgaatgcgagaactgtagaaggcaggcctggcaggcaggctcgggctcagagagcgatcggccggagcggtaccacgaggcgggcccaaagatcggtgtaggcctccctctgcggttccccggccgacttccccgagggacagtcacgactttggaaggttctggccagtttcccaatttgcatttgagcagcccccgcaaagggccaggtgcg

SEQ ID NO: 915564 - DNA, 4001 bp, Homo sapiens
gaagtccaaccttgagactccacccctctatttagactgaaaccacctgctcctcctggcagcccaggcctccttggtcttcctccccttctgcggctccacttcctgccggaagcctccattgtttcatgtccctctcaccaccggcaggagtttcctttcactcagcatgctttctggagcctgaaaattgacctcaggattcctctgatctgggggactctcactctatctccagggctaaagacaaactcagggagggggctacggaggccctgaaccaccacaggtgaagtttttgtgctcctcttacaaggtacctgggagcctgatgatttttaaaattgagatgtaattcatagccataaaatccacccttttaaaagtgcacaatccagtgggttttagtacatttacaaagccatacaactatctccactatctaattccagaatattttcattcactcataagaagtcccgtacccatctgtagtcaccctccattcctccctcttccctgacaaacactcatctactatttgtctctatgaatctgcctatattctgaacatttcatataaatgaaatcacacaatatgtggccttttgtgactggcttctttcacttagcataatgttttcaagtcttaggtattagaagcattcatgtacaaatttgtatggagacatacattttcaattctcttgggtgtacacctaggagcggaattgctgggtcatatgttcatatacaataatgctatgtttaaccatgtgaggaactgccaaaccattttccacagtggcaacaccattttacactccctccagcaatgtcccaatttctctacatctttgctaatactttcattgtctgccttttcaattatagccatcctcatagggtagaggtggtatctcagtgtggttttggtttgcatttttctaatgactaatgatattgagcatcttttcatgtgcctactgccatttgtatatcttgctttggagaaatgtctatacaaacaggttgaggaatttggctgaggaaatggaagtgcgtgtggctagggaggagtccctctgcggggcataaacactcagaggaagcaaggaactgttgaaacaaaactgacacctgacgaggagacgggaaattggcctagggaagaggagtgtcatgggacactcagtgggagtcactttaaaggcaaggaggaaataaggcagttcaaagcaaaggctcccagaggaggtggaggggaccatttctgagcctcagctcctctcaccagccgcagtgggtttcctgctgtagtctgggctccatgccacaggctttctgtgcactggcccatgaaccctctccacagctccgtccctttggtgtcttattatctctatgcttctgataaggacacccaggctcagaggaactagctttgctggttagcattggtcccaggactcaagcccaggtaagtgttaaactcaacatcactcaatgctccttgtacaagtttgacagggggaagaagcacagtgcttttctctgtcttggcccacccaaacctagccaagtcacttcataggtagcagtgccagtccaccaaggggccaagccaaccaggtgagagagcgggagctgaggctgggagcagaagtccttgacctggagccccagctctgaaggaaacccaaggaatggatgggggagaggggtggaagcctgtgggccagctcagaatgtgaggcccccgcctccaggccagaccctggaccctccacttagcttcctgggtatactggtggcatccttgctgtgccccagcctgtctagccccagttccagccccctggcctctcacctgcccactcatggagcctgctcacctgcctcaggtgatctcccactccagcctcacctctggctctccctgaagcttcaatcccagccttttctgccaaggctcaaagccttcctgggagtactttatcctttagagatatggctgtttgtggagggcaaagtccacagcctgtgcctctgggcaggggagggaagcactggccacattcctccgggttctgagaggagcacgagtcatgtattgggggtcagctggtcactgaatggggcttgtcaggcaggctgcccaccccctccgagcctttcctgtgggctggggtctctgctgacgcgctgacagcaaaccttcgcctccctgactcagggcggaactccccttggaaggatggtccagtccaggactgcgtgtcctcctgtggaagggcactgagaccctgccctgtgctgtggggcctttgtcaggggccacccctgacaggaggatgggacggccatgggactgaacctgggctgggcaggcggttgcctgcgggaatgaagggacctggggcagagagccaggccctagtttaaaaaacccagtccctctctctcccaggtgggcagctaagttttggggtcccaggtaggccaggtggctccaggggctagggacccacagcccgagctggcccgcaatgggtctgtgtgtctgactgtcagtcggtcacttggctgatcactcatgcaggcacatcgtgtccacctgctggtaagccagccagccggcgggctactgtctttcaggagagctgtccgttcaggccgtcagtcagccacctgcctgcagctcctcataagacagtcagacaagttcctgaaagtctgtcagccacaaacttcgtttcccaggtatctggtcagtcagagactcacccttcaaggggctgcccttcatgggtagagtcagccttctccacaccacctgagtctgggtgatgaggagcaaggtttcagagaccagcctgactgcaaggaccgccttcctttacctgttctctgtgggaaaggcccaggattctgcctcctttggctgcctcccagcagcaaaggacagatctcagggaaatgtgaggctgagaataggctttaaggcctcagacctgggttggaatcccagatgtgctacaagcccactgtgtgagcctgggcacatccctgagctttctgagcctcagtttccccatttgtaaggtgaatataacagtatttactgatggaattcaggacacactattctccaaatatggcaccttggccacatttgagaaaacagtagaagcaggtcataaaacctaggatagtcaccccactctgaccttctcccacctttcaccctgaaataggtcataagattctcatttgagagttgctgtctttgtacctggagaaaaaaaaaacagccttaactttgaagatgcaaggacacagagaagaatctgaacaaacaggccttgctaggttcccctaagtgtatcaccattagctcacacactctttgtgcaatacttccacaactatatacttcttcatcaaacttggcataaaaagtcacaagtttttgacattttaggctagatgattaaaaaataataaaccagcctgggcaacatggtgaaacctcatctgtactacaaatgcaaaaaattagccaggtgtggtggtgcatgcctgtaatcccagctactcgggaggccgaggcaagaggatcacttgagcctgggagtcagaggttgcagtgagccgagatcatgccactgcactccagcctgggcgacagcgtgagaccctgtctcaaaaaataaataaataaataatttaatttaattcaatataataaaaactaaaaagtttaagaatacacacgttttcccatttctttgggtcttcatttctgaaggcccctgtgtcatgtaaaacttatattaaataaatttgggccaggcgcagtggctcacgcctgtaattccaacactttgggaggccgaggtgggagaattaccaagcccagtagttccagagtagcctgggtgacatggtgataccccatctctatgtaaaaataataataagtaaattaaatttttaaa

SEQ ID NO: 915565 - DNA, 4001 bp, Homo sapiens
gagccggatctgaacttcactcctctctggtgtctgccctgactgggacagcttcccctctcccttggggactcttcccaggctgcaggctctgtgtcctaccccacccacattcccacacccctcagagtagtgtggtgagcctggccacagcccagaatgggtctcgggaagcaaggctagagatggcacccaatggcccaccaggcagatgctggggtcagcttcctgctgtctgtgtggaaggtcagtgggcacctggagaatattccagagctgggccctgcaggggtcagaaaaatagtactggggggacttgtggggaggtgtagtgcagccaaagtctctagttagttcccacactccccgctctccatccctcccatccatactgagccaaggctgatggggaatttggtttgtcaatggcccattcacaccgcccccccaaccatcccacccaaatctgacctcattctcatctgtcctgtgaggtgccccgagaggaggcatccatcccacccttcctgccgtactgcagtccccaagccatggctgcgttctcctggagtccctgcagctgctcctcagctgggtctgtctccatggcctatgaagctctccctgctgggcttctgggagcaagtggggccttgcccaaatggctgtgaggctcacacagcccaggggaggatcaacagctgggaaagaggccaaaggtgactgctatagggcgtctaacctggagtactcccagtagaaagatcctttgtttcttctacccatactgccttcccagaaagtgttgggccaggtgctctgttcccagaaacactgccctcgctacaaggcgattccttgtcaccctgcaggcagagcttcaagacctttttcctccagcctcctccccactctatagtaagagacctcactgcacagagacccatgcaggtctctgcaggtcactctcaatctcctggtcttctgggtggatcttctgatgctgcctgcaggtctgtctgtagctctccgtcacctgtccccgtctgattctctttcctgctctgtctcctgcctctttgtctctcccagtctctgctgcagccctctctcccggtttgacctccctacctttccctgcattctctcgctgatacctgttgatattgtgttctccgacctcctgtgtgcctcttcgtttgagcctgcctgtctgcactgtctgactacacttttctctttttctctgctctgtctgtctctatctttgtctcctttgagaggggaaacggcttgaagagggggtcaggggcctgtctttctgttgtcctctaagtctcggtctcatcaacgaggtttggctgggttccctggctccagctgagtaaatcgtgtcccttcctgctcctccagtcattcactcattcatttaacacaccttcactgaactccggccatgtgcctggctctgtgccaacagctgtgagcacccatcccacccactctggctctacggcctcacccttttctctgggaacatgtcccccaggcttgctctccatggcccttccttaatttgttcggacttacctatcctgggtcccatgactgctggagtgcagtgagctccagcccctaatttaatctcaggacctggagcttagcaggggagaggaagcaaatcttctcaggggctcctggagacagcagcaggtgagccacagcagggatgcaataacggtgggagctccagacacggggtcagttcttcttgggccacacaggacatcagacttgtccagacacaggttagggagtcttgctcaaactcagccccaagtatctccaagtgtttgtctccctgggtcacttgctccttctgtctctcccttgccctggctccacggttgtatagaaggctgggtttgttcaagtccagcctctctgtgaagaggaagctgcaccccgcctccctgaggctcagcctcagcctgtccttttccagcctcttgcctcagcatttcccttaggtattttcccctgctctgttagcagcagagaggtgggggcacaggggggatgctgatgggtctccccaagctccccaaccttccacattcatcccccagtctcctcactgcactcccatttcccacctgagcccttctcctaccaagctcttgttcccttcacagaacttttgttgccctcccttgataggagggccccatagagagcccttgttcccccatctagcagttgtcctctttcactgaacccctgtccccctcaagcccacgtgccctctcactaaatccctcatcttctccctgagctccaaggatccacagcaagaaggggctctgtccactaagtatccagtggcagcctgcctgggtggagctcatggtagaaggtccatcaatttcagccatctaggcaaaggaggaggggaagagaatggaaaatatgaaattctcagagtttcctggactgaggactgaggatggaggttcaggagccagagagatctgggtcccacctcagttgttatttgctggtcaagtgatctcaggcaagtcccagcatctccctgagcgtccattctctcatctataaagaagggacagtaatcccttgcagagccactgtgaaggttcggtgaaggacagagaagccaagcctgcaggcctggagctcagagaagggagtggcagaggtggggctccgaacagggcagcaagggaaagcaaatccactttgcctttcccagcttgcacagcactttcacacacaaggccccactgggtcctccccttgacactgtaacatcaggttatttattccctgattttacaaatgaggcatggagtctcagtaacttgccagagatcacccagctagtaggtggtgggtgccttgaacctctaatgatagaaccaggcttttccctccacccaggatatcttctctgaggaagatctgggtttccccaaatccaagatgcagaagtgaacctgaccctgtctctggaataaagtctttgcgtggaatgaggatgtgggtttggagtctaactttcagggtgcaataacagagaaacatacaccagctccacttggctcctatttgctgtatgagggtgctagtaggatgtagggaatgtgtgaaataatcacagatctccctggcactcaggaggcactcaatagatacttgttacatgaataaatgagtctttgagaaaccagaaatgtgagtacatgaccattccactgagaaaggtcaagaactggcttggattaatagaaagaccagaccctcatgggtttgacccagggtctgacctgatcagaccctacttgagaaaaccaaattgggtctatctctccaaatccttctgacgaacgtcagcattgtgaatcctcatgaagactggcgggggtgcaaccttccagactccaaattacaggtatgaagatccctttaaactttctggaagcccagttacccccaccttggccccagggcctgaagaagttctgtgcatggaatggtcttggtagggggaccagcttgtctggctaagtttatctgattgatctttttctttttgtttgtttgtttgtttgtttgtttgtttgtttttgaaatgcagtctctctctgttgcccaggctggagtgcagtggcacaatctcagctcactgcaacctcggcctcccaggttgaagtgattctcgtacctcggcctcccgagtagctgggattacaggcacgtgccaccacacctggctgatttttgtatttttagtagagacagggtttcaccattttggccagactggtctcaaattcctggcctcaagtgatccacccaccttggcctcccaaagtgctgggattacaggtgtgagccactgtgcccgcccggcctatctcattgatctttgagtcaagcaatgcacaataacccccagggcatggtatatacagtagcct

SEQ ID NO: 915566 - DNA, 4001 bp, Homo sapiens
gtacaaaagagcagaggagaacagaacggtaatgagtcttgccaaggtgcctggaggcaaaggaatgagaaacgaagacagactctttcttataaacttatcaatgaaataaaaccatagtccaaatgtccatctatttgggtaagttctcaagaaatgcagagataagcagaaaatatgaagcctggcttataatggtcaaaacaattcaaggagagcaaaacaacggtcccaccaaatctgcctattaaattaagctgttaagtcatgggaatcatggatagtgatccaacaggatatactcagaaaatgagaaaaatactattgaaagctgttccacagctctgtttgtgttaccttcgcaacaactcaggcaagtgttactgcagtttttatctttctcaagattacagctgagaaactgacttttagagagaggagattaagatgtttgtgtaatgacagataacaagttagaggcaaagctagaattagcagactggaactagttactagaattcctaggagttatgacacaagtgaattgtcactgcaattaactggcctggctaaacaaagttagcataaattttcaaccactttggaaaacaatttagctttcttagaattaatgttgaaaatgttcattctctaatatctggcatttcacttctaccttaagacagtcaaggacgtgcgtgccaggttacataaataaagagttcacagcaatattatcacaataactccaaactggaaacaactcaaatgtttatcaacagcagaatggatgataaattgtggtatagttatacatttgaatttcataaagcaaagaaaatatatgaactatagctacacagaaaatgggtagatctcacaaatataattgttgggtgaaagaagaatttacaaaagaaacagagaatatgactccatttatatgatgtcaaaaatagggaggttaatcatattgtttaggcatgcagacatagatggtcaaattataaagaataacagggacaagaggatcccaacatcttggggcagaatgggggttgatcaagaatgggcttctgggtgctggcaatgatctgtttcttgacctggatgataattatagaagtgttgcctttcagttattgtttaaactgtgtatgtttatgcactcttaactttttttttttcagtcatttctgaattagcaggctacccatcacacttctttctttcttgggatttacctcttactacttcttgcactttaatggtgaccttgaatatttgttgttttatgtgattttagatgaataaaacatgaagagttaaggtgagaatttctagtgaattcaattcaatcaacacatatgctaactgtaaggtgtggtgtgaacattcctttcacacacatttatacactttaggaagaatgaaccagttaggcagaaattcagatcagccaagttccatttttctgcttttaaccaataaagacactttgggtttcattttaaacattccctgaagtcaaggtcatgccatatgatccagtgattgcaaatggatgaactaaaacccaaaaagctctgaataaattgtgcaggaagtttgacattggctttctttgaatggagacttagagaagatagaaaaaagaccatcttccataatacaagaaagaaaaaaaatttttttttactaggaagggagaaaatgcatacccttaggagaaaaaaaaaggaaaacagaaagcaatagtactcactttatatcttaaggcatgctgtatccaaggggcattgcctatttcattaagaaatgcaaacattcctctgcctttctcatttgcagcttgtacacacacacacaccgtatgctaagcataaaaatcctgcagttacctgaagaggatcaaagacacaccctggctatggcaggtttctcctcgctgtctccaacttgagctccaactccttctcccctcccaggctgtctggactcctggactctgggcagcgcctaaagtagtccgtggaagctggcaatcactgtgatgtcactgatgaaacatctcaaaggaacaccctccgaaggttcgaggctatttgtgttcgggggacatggaaatatgttgactaagactttgttcctttggctgccaatttgccaccaccaggatttaaaaaccttctgtttccagttgacttttagtgcaattgatgtgggttttaaatgtgtcttttacatcttcatgaataactttaacatgtctttaaaacatcataaaccaagaatgatagactaattttaaccaatcgatgctgcatttgactgctctccctagtcagcctgtgaggtgtaaaaatgtgacttcattttaccacccatatctttagttatttgaaatgtgaagagtttgctgccttacacccacacatatgcacacccatacacacacacacacactccagaattcaataggcatctttagctctttcaaaactgactttagtccaagcagtgaaagctatcccctccgtcacctgctccacgtaactttccagctaagctgtgcattgcaagtttacacgtggatctacagtttcatctgaaacagccgaggaagtcatggtttgtatatctctggcaataaattaatagagcagtaaactcacacagttcaactcagttatttggatagattgggagtggaaggagaactgggtaaaattagtgaaaaatgtgaattatagaatatatctgaaagaaagaaaagtattatataactttctaatatgaacactaactaaaattagactaagatgagtttgtaaccaatgtatcacatgtttggagcccctgaagtgttaaattagacttgaaagcagatcaattaagtactttaaacatgaccctagcaattgtgtttgctcagcagatcctttctttatagataatagaggaaatctccccctctgaattcccaattagggtcaatcaaaataatgcattcccaaaaggcataaacaaacaaaattctctatgcagttatgctcatagtcaaacctttccctccattcctcataccccagagacattaccaaaacaagactttccatttcatttcctcattttaacataagcttagcaacgggtaatcttaatacaacattctgtcaccacttgtcttgtgaaaagagcgcttgctgaagtgacagagagtgtataataattatagtgcaaccgaacattggcagttatctgttgccatctggcaaactccttgaatgtaatcagagttctgtcttctgcctccaagctctcactagattgtttcccaggctgggaatgtttttctagttaccaagccacacctgtccctttttgtaaccactcaaaattattttttgtcaaattaaaaaagttatatatttattgtaggacatgtgaaaatatattaaagtatttaaaacttttaaattacttttaatctcaccacccaaaggggaaaaaaacaaaactttactttactttttttttcttttgagatggagttttgctcttgtcacccaggctggagtgcagtggcgtgatctcagctcactgcaacctccgcctcccgggttcgagcgattctcctgcctcagcctcctgggtagctgggattacaggcatgcaccactatgcctggctaatttttgtatttttagtagagatggggcttcaccatgttggccaggctggccttgagcttctgacctcaggtgatccaaccgcctcagcctcccaaagtgctaggattataggtgtgagccaccgggtgcccggcctacattactttttattcatccgtttgaggctgcataggcacaatctcaaattcccaggatatttttggtaaaagaatctgaaacttgaaaaccttttttcttaattcatttggaatcaaattatttgtagtatatcatgtgttgatattaggtttatgggataagcattta

SEQ ID NO: 915567 - DNA, 4001 bp, Homo sapiens
agaggcaagaggaaccagctcaccacttctcaagccagaatggaaaagatggcagaagcatagttgtacaaggaccccagcatcagtcagacagaaggaaacctataatattatgcaatgagagaccctgaggatgttcttcagacaaaccccagcaggaccaatccaactccaagcttgagcgtccactccaagcttgaagattaaacaataagaaaaaattcgggtccacaggtgaaatacacactttctaagcacaatgagcaactttatagtagatagctggacaaccaagtacactaactgcaagcataagaacagtattcatgttgtaaatcgagtaccaactactattagttttttgttgttttgctttttgcaatatttcttctcatattttattttaaatctaagctaatttctttataagaacaggctaaggcttattttctgtggctgatccagccttacaagaaaaaagatttcactgtgtccctcagaaacctactcctgtctacatcacactgtcgagctctctctttataccccatgtgacagataagaaaacagaagtccagagagagcaagtgactcatccaaggtcaaacttcttgctaacacatctaggacgagaataagggctcaagaagcccactatgggtctcttgccgtatcactgctgcaaatgaccaggcatactggtgtcttgaatacaaagtttatttgtaaaggggaaaaaaaaaaagccaacatgagtcatctgcattgtcaacgggctccacacaggttgttctaataaagcatccagcacctccagaaccacttgtttctgaaagcaccaacctacgcagacactagcaggccatgtcttccacccttgccaccctcgaggctgtgagcagatgcgctgttgggctctggggatctagaggtgtcacttaaagagcaagggagcctggagcttggcagtactgactggatgagtggatgggtgggtgtatgaggacatgggagtgttttctgacagctcccggagatagttatgatatcatgcagcctaatcccactcatcttggaacaccccaaacatctcatccgctcagctgtccctcctcaacttcctcagggcaaaagcactgcagtctgaggtgaatctggccgctggggaggggcggtagtcggccccagcagcagaggaagcaacgctcagctccctcctccacccaccccgtacaggaactccccactgggtcttcagatgccagaggcgtacccagctcggagcctgccccgggtctcagggtcggtcccgaaagaacgggggaggaggaaggctctatcccgcccccgcctcacctctactccccgacccccaggcgccgacccttctcacccgcaaggtccgccgccggactcttgtccactcccagagaccctgagcgcacccctttctcggcgtcctcaaaggacccgcgtttcccaccttcccatacggggccctcccggccgccccggcccaagccctttgcactgcgtcccccggcccctgagtccgccccgcacccgcacttcccgcccggccccgcgggctcgcggtccgccccaacttttcccagcccccgccccgcagcaaccgggatgcagcgtctcgagccgcgacgggcaggcgagctcgagtccctcgggcccccaaccccgcccgcacgagttgcgctcgggacccgccgggcgcccaggcctgggtcagcagcactgcgcggaggcggagccggcgtggcgggaaccgtactgtcccggcgccgcacccccgcccggtgcccggtgccccgtgccccgcgcccgcccgccggctcgcccgccccgccgccgccgccgccgcgccgctcccagcccacctgcccgcgggcgccgccgccgccgccgccaccactgccgggaatacgtggcagtggccgccgccgcttgcgctccccgcctcgcctctcctctcggcgcccgcgcgggcgactctggcgcgccagaccgcagcgccaggcgccctctgccgccgggaagccgaatcctcccgtcctaaccctaactcgctggctgcccccgcccgggcctcggctcccgccccctcttccccgttcccggctcagactgtcgcttccgagcgacctgggttctcgcccggcctgctgctgccgctgcctccaggaagttcgccctgaccacctctgcaggctcagcgcgcttcctccggctcccgcgcagcgggtgcttaagtcacccccttgttgatatatttcctgcttctttgaacgcctcgcccgtgagatagcagaatcggaaaggggatagttggaggcaaacgccatgtctgttgtgttcaccattctctcctccagggcaaggttagcgccctgtctggaatactgaagtgcgcaataaatacttgtgaagagagcaaacgagtagatgaatgagttgagacttttaccgctgtctacccaagtaggctttgaaacctcaagcggacagagatcctgacctggatttgttttttgtaacttacacgtgcatatgtgtgcgcagctcagcataaataaatgagattcacaattccccacctcggaccagcgccaaatccgcaagaggcccacggctaaatgttattcagggcttttggtcaaacacgtttaggtttgagatctacctcttaaaagctgggcaatcgcgggaaagctcatctccctggcccacagtgaacacgtctataaattaagaataataaaacctacttcacagagttgtgagaattaattgagatggtgcactataaagttctttacgcagccccgatgtgtgcggtggtatgtaaatggtagttattgttgtattactactgatgcagtaggtgattttaaaaactatcttcgaaatgtaaaatattgactaccttttcaccttaaaacctttatatgtgtggtattgtcacctgctcagcaaggccagcccggggagcaaggccactcctgtaacctcttcccctccaccggtaaaaatataacaagtcttggggtttttttgttctgttttgaagaattgtggaacccactcttctgcaggttttccacctggatttctgtggccaatctcttaattaacaagtttttattttagggatgtcaaagacagggagccctttgaaagcacctgcagtctactggctcttcctgttttcttcctgaccctctctcaaacaacttaaggctttttttttcatttttacaggaagtgtccttcctgctgcgtacaaaaggcagcaatgcagtagagtgggatcagaggggattgggctgcatacaccttgggctttctgcacctcagtcccctcaacggtaaactgtggagaataagaccttgtcacattgggagatcattcatgatccggtctgtgaaggaaataaggaaatacctgaaacacaaagatatttaataaaaggcaactattgatcagtttatttagcatgtatttaaggagcatctttttagtgttctatgcgctgaaagaatgaggggaacacgcgtgtgtgaggtaagtttcctaccttcaaaggagtttgagctgtagctccacactagggcagagggattgggagcatatgggatgcagctaaatatgaaattagcaagcctcaaggtttaaattggggcagtggtactgccgtgtgaattgctttaattcattatcattgtaaatgccattttcctctaaatattatgtacacaacttcccaaggccactgctaaaaattaatgaataattttatgaggcaagcagagccactgatgtaggactcagtcccttaataaggtgactccacatgctcccttatagtagtaataacatagatattgtgtctgtgaaagtgccatccttggctgggcgtggtggcttacccctgtaatccctgcactttgggaggccgaggtgggtggatcacctgaggtcagga

SEQ ID NO: 915568 - DNA, 4001 bp, Homo sapiens
aggttaggtgtttgagaccagcctgggcaacatagcaagatcttgtctctacaaaaactaaactaaaaaaaaaaaaaaaaaaaaagcctggtgcggcaaaacagtagaaagggaaggaggagtcagattaggggagccaaatgaagagcactaaggactcatgctagagcaatcagagacaatgccccaggttcccttctcccttcactttcattcacctttcttttcccttcctgggtttccacggacgataagtacctgagggtgcgcagggcttcggcaggcagccagggctcccaagccttggccatcgcttcatagagccagcgggaggagtggttgccctcaatgaaggggggagggaagctattgacaggtgtgctttcatggttacccacagcagggtacactggcactggccccaggaacttcctcacaagtgctgtgacggtggtcagggcccgcagttggtcctgacgagtctggtgccagacatcatgtgcggggatgtctcctgtccagtacaccatatcaaaagggccggctgggcccagcccactcaacaggctctccagggtcctcaggggcaggtcacacttgctgtattcgccccagtatccggcacctggccgggatgcgggcggcaggccagaaccccggcggcagcacagtgggtctgcacagtcagggtccgtgccctccaggtagtcatgatcccagtgcaggtcagtgaggaagaggatgcggctgacaggggcacctggggctggggggctagggggtttggggggcggcttcggcacagtaggcaaagagatgttccaagatgagaaaatgtcccagtgcccacaggtggagcccaggagcaggccacaggcctcagatgggctcagcactgagcgtctccacacctccaccatgtcatcctcaaagaggtggacaatggattggcacacggcaggtggtgctatcttcagcagattgcacagcttgatggccacggagcccacgcgagccacattgggttccttctgcagtgggaggagcgcatggtgagaaatcagaggcagagcagaggaaccaggccaacccctggccaccaccccttgggcctccatttccaaactggggctgggcaggactcagtgcaccaagctcagtgcacacctttgccttccagatattgccctgtaactcaggcagcaccaggccatcgcttcttctttagctcagcggcctgtggcatgaggcctttgcttggcaagctgacttcctcaggcactgtctgcattattttcttacttcacaaaggtcacaatggggtgatggtggcatgtagccatgggtgtccccaaaggggagcaaactcagtgatggattgtagatgccaccctctccatcagggatgcattctgagcccagcgcaccagcatcagccccagcccccagccccagcactcctttcggcctcctccactgcagccccttcagtgctcaccttcagcccgaggttgatggcggtgaatagacctttgcagattgggcaggtgaggttcccccacccaaagacatctcggagccggggcactatgcgatgtaacctggcaggatggccttggggagaaagagggtgagcctctgccggagcccagagaacccgagagtcagacagagccagcgccagcgccagcgccagcgccagcgccagcaccaggcccatccaaaggagtccgggggctccggcggtcccgtcttgtccctgctcccggccggacctggggcagctctggcggagtgacgctccgtagcggggcattgtcgcgcttcctacacggggctggttcgtctgtcccgtcccccccggcctggaccctagccagccctcagggccccgggcggcgccggggacacccgattacccttctctgtagtcggctgactgctccgcggccggccgcaaagcagctccgccccttcctcttcctctgatctctgacagctgatctctcggtggcgggcggctgtcaacgctgcggaggcggagggggcggggcgctcccgggaccgccccgattccgccccctctccctgcccccgccctgccccgggcgcacgggctgcgggggtggggactctccctgaggtcaccaggggctccgccttgaggtcacagccgcgggaggccgtgctcgtgctttggagctccatgtgatgtggtcggtggaagacgtctcctttgtcagaatccgcgctcagattcccggaatagctgccagaccgaccccagcgtttagcccgggaaggggaggtaggagagagcagggcgggcaggatcctcccactgggtgtgttgcctctgacaggaaggcgccttccctcgattccccatgctctgccactggcaccagccctcttgagtcaccctgagaatcactcacctgtgattcagatgaggaaacaaaccttagagatggtgaagagactaggaagccgtaaagaccatatagccgtgggggccaataacatgggcgggaacccaattgggtctcccacctccgtgtatccacgacagtaaaagcgagcatttatggagttgtttatgatgtgccaagcaccaacccaggcactttataattaataatcttcaattctcacaacaaccctaagaagtacctattatattggggctcagaaatccatacccaaaatatggtggtttgacttactaagttaagccttaaggtgtgtctggccttcctactcccgcgccctctctcccaaagccgttacctagcgtccagacccatcaaaaggaacaacggtttttttcttcccctccctacaaaaccaagaatataatcacacctgaacagaccccttcacatgataatgtgctagttaatctgttccctgatccattccttctccctcagcagaattcctcttcccctcactcccacaaccccctttgcctgaatgacacctaagcttctgaactcgtctgggaagtgggtagtcactctgtggttccccgtggacacattaatacaatttctatgccttttcttcaattaatctgttttttgtgggttgatttttcagcagaatttcagagggcgaagggaaagtttcccttggtccctgcaaatactattattaccctcctttacagataggatgaggcacaaagaagttaagtggcagaatagcaattaaaccctaagctgtttgacgagtgcttctgaggaatcctcagagctatcaagtcctgtcagttctttcctttgataattttttacaagtgttttttccccccagttctggggacatcatctcagatagagtactcacagtaataattagcatgcatttttaagattatgtactatgaaaaacaaaacaaaacaaaacctttttatctaaggaagatgagcccctttaaattatcaggcccagacaggcatttaaaatgtagcaacagtcactctcactcttctttgagctaagtaattatctcttgaaaccacttgctatgccaagtagccattaaatgccatacaccttatagttcaacaatgtatagccaagcgctaaacaatgtataaccagtgttatttctgtaaacaatgagaattcctgatgaacaacttttgtattcatttcctctcctaattcatctttttttctttgaaaatatgagcctctcttttgttgtccagagtgctcccccaagacaacttgcaagtgtgtcctgggtcgcagtcctcaaccttggcccttggcccgaataaccctctgtaggtacttttctgaggactctgccttacgttaatcctcacaacaaatttggaagtcggtattataattatccccattttacggagaaggaaagtaggattaagtaagtggctcaagatcccacagctagctagtaagtgctggaactggaatttggatgtgtcaagcaaaacatgtctgagacaggtctcaatcaatttaga

SEQ ID NO: 915569 - DNA, 4001 bp, Homo sapiens
cacagatgagaagaggttcagtgacatggccaaggtcacacagctggtacatggcagaaccattgtcccaactcgggctttctgatcatgctttttggatgactggcaccatggaaacatgttcagctgaaagataaggagctcctgtgaagtgtcagggatgccacagggcagacttcagccatggcatgggaagtggaccaggtatccttcgtgctcctttctgcctctggttttttgttgttgctgttgttgttgttttgagagggagtcttgctctgtcgcccaggctgcagtgcaatggcgcaatctcggctcactgcaacctccacctcctgggttcaagtaattatcctgcctcagcctcccgagtagatgggattacaggtgcccaccaccacgctcagctaatttttgtatttttggtagagacagggtttcaccatgttggccaggctggtctcgaactcatgacctcaggtaatccacccacctcagcctccaagagtgccgggattacaggcgtgagccactgcagccgaccatgcctctggcttcttttgtttcctgggctctgccctgggataggaagctgaatgccaggaatcctcgaatatcttgaaatcaggtgctgggggaacccagactgagttgatggtggacgctgagggaagcaggaggtagggggaattggagctggagccccagagtttgacattacctggctgaaggactggtctgtccggaagctacacagtctggacccagcccatctggaggaaagtgaaaggagggagggaagctggggctatccatggcatgcttcttgcgcccctcccccaggtggcctctgcagcatcccatgggctctgggctctcactcacctgtgctgaggttgtgcccctccccagtggggctctcaggccactcctctggggagctgggaatcacccctgcccctccctctggctctttttccacgtcctgctcctgctcttcgctgggactgcctggctcctggaatgagcatgatctgcgtgagctcatggtcacacagcacctgccctggcttcatgaggacttcagaaagttctgaaaggcagcctgggactacggtgctgcactccttgtcccccctcccccaccctgggctctggaaatcatcaggaggaaaactggactttcccaactgactgaagcagagggggcttgcttccagaagcaggagacgacagagcctccttgctcctttcctgcctcactcactgcctcctctgcatcctccgcctcctcttttgcatcagcctcctcttttgcaccatgtttggcctcctctttcccatcgggctccttgggttcagccttagcctcatcctccacaacagccttctgcgattcagccttggcctcttcatcagtagccttctccttgggttcagtgctgcactctttcctctggcctgtctcctcctgagaggctgtcttggcgtcctcctcctcaactgttgccttaggttcaggcttgtctctgtcattggcatcggctttctgcccagattcaggtttggcctctttctcctcagccttctgcttctcagaggccagcgtgctctccttttcctcagcctctttgggttcagatttggtctcttctttcctgccagtcatctcctgagaacccacagtggtctcttccttctcaccatcctcctttttaagttcagcctcagcatcctctttcccaccagcctccctctgagattccactttgacctcatctaatccatttgcttccccctggagttctgctgacatgccgtcctcggctggtgccttttcctgctttcctgactcagtgggaggcccctcattgatggcctttccagctgtgcctttggtctcctctgcaggggctccacctcctgacatctcagggttgtccgcagctggggagacggtggtcccatcctcagagagcttcccttccttctgctccatctctggaaagagaagacaagcagacctggtcatgccccagcccagcatgaggtgaagaccccaccctcagagagctctggcctgggagtcaggaagtccgtggttcagtcttggctcctacttggacatggggcccaatcacgaaggagagagaagtgcttccccaaagctgggatggttgggctacattgacatgacgttggatggtgttcacctgatgcccctcggtaggttctggctttggctttaaagaacattgaatcacataatgccttttcagtcatgttgcctctttttgattaagccactgaggtggtcacaattttattgtattatttattttttgagacaaggtctcgctctgtcatccaggctggagtgcaggagcacaatctcaggtcactgcaacctctgcctcctggggtcaggtgatcctccaacctcagcctcctgagtagctgggactacaggtgcttaccaccacacctggctaatttttgtgtgtgtgtgtgtgtgtgtgtgtgtgtgttttttttttgtagagatggggttttgccatgttgcccaggctggtctcaaactcctgagctcaagcaatccacctgcctcggcctcccaaggttctgggattgcaggcatgagcagtgcctggtcacagttttatactggcatcctagaacacctatggaacaattgctactctcccctgagagcctaggcaagcagaagtatctagatagaattgaataacaccattttgtttccattgtatttatttttacagttactttctatctctggtaagtgatactgagtttccatttccaacagtgatacagtgtcttttaaaaatacatttactgaacttaaaaataagttgattcaaaggaagtaattcaggaaactggaatataggcagtgcagatgtagcaaaattatagaggtggtgtataaaaatggctgaaatttgggaaccccagggccaactggtctctggagctttgccagctctaccagcctgtggtttttggaaaaggtgggcctgggcaaggaagcgtttccttgagtgaagaatggagccgtactctccctggcctctgctgagcaatctgactctccaactgcccccgggagcatgggggtagattatgacatcttaactcggagtttcctatttaagtactgtatatactggaggatctacaaaaacaggtgtgtgggggccccgggttagctccttcatgctcctgccctttttggggggtgtagttacaaagaaaacaatccccaaatagggctcagggcatgactcaggcagtaagaaaagtggacactcctgtcacacactaaaaataccccctgcccttggcagtaccatctttctcagtgatagtaccgagggcacctgggtaattgggcagaggacaggaggcaagaagacagggatagggcttttttcccaccacccactggggtcttacccagagtcctggggttcctgaattcgatgccctcactatttcctaaaagtaggctgggatttgtaaagatgctcacactgtcctctgattcctgctagagccccttcctggttcagcggctccagcaatgtcttaaagtaagagggaagatgacgccgggcatggtggatcacacctgtaatcccagcactttgggagcccgtagcgggcagatcacaaggtcaggagttcaagaccagcctggccaatatggtgaaaccccatctctactacaaatacaaaaattagctgggtgtggtggcagacgcctgtaatcccagctacttgggaggctgaggcaggagaattgcttgaacccgggaggtggaggttgcagtgagccgagatcgcgtcactgcactccagcctgggcaacaaagcgagactccgtctcaaaaaaaaaaaaagagggaagatgagccagggggatggacgcacatcagcagagatgccgggaggtgtgaagttgtggagctggctgt

SEQ ID NO: 915570 - DNA, 4001 bp, Homo sapiens
caaggcgggtggatcatgaggtcaagagatcgagaccattctggccaacatggtgaaaccccatctctgccaaaaaatacgaatattagctgggcatggtgacgcgtgcctgtagtcccagctacctgggaggttgaggtgggagaatctgaacccgggcgacggaagtttgcagtgagctgagatcgagtcacttcactccagtctgggcgacagtgagactctgtctcaaaaacaaaacaaaacaacgacacaaaaaagccactgggaagacttatttttatttatttatttatttatttatttatttatatttttgagacggagtctcgctctgtctcccaggctggagtgcagtggcacaatctcggctcactgcaagctccacctcccgggttcactccattcttctacctcagcctcccgagtacctgggactacaggtgcacgctgccacgcccgtaagtttttgtatttttagtagagatggggtttcaccatggtagccaggatggtctcgatctcctgacctcgtgatccgcccgcctcggcctcccaaagtgctgggattacaggcgtgagccaccgcgcccggccaccactgggaagacttataataaaaggttacagttccttgccacatcctccccaccccagccccacctccagtctatcttcccagggacaatctatttatttgctttttttttttttttttttaaagttgtgtgtgtgtctgtattttaatattgatccggggtctcactatgttgcccaggctcgtcttgagctcctgagctcaagcaatctgctgcctcagcctcccaaagtgctgggatttacaggcatgagccactgagcccggccttatttgcattatttttaggcatggaaaagacgtaaacggtttggggaaagcatattttaaatagctaagattctgcacttagatcactttggaagtgtccttatgtgcctgctttgcttttagagttaactaatgcaccagcttaatagtcgcctggttgaaaattctaaaagtacaaaaaatttacagtaaaaagtcttcccctaactcctgtccccagtgacacagttcctctccctggggaccttccttgttaccagttcttgttatcattctacaggtgtcctgttttactgtttcatttttaattattgtcatggtttcctccatgtctctctataaattgtgcttatgatgttgttatcgcttcatatatcaactctagcctatctatcttcctgctgtgaccttgatatggcgacttactccttaagtccttctgaactgcatcaatttttttcaaccactgatcagtattattttttgaaaaattaaaaatggttaaactcgttaaagggagtttatgtaacatcaaacaaaccaataaacaaaacttactctacgagaatggagtactaatatttggattaaaccagagttttcatgttaatttagagaaattcacagcctgatgcccagacactacactccgggcgtgggcatacacgccttgcctgtccgggaacggccgtcaacgcccttttaaaaaagacagcgcccacccaggaccccgccccctggtggttaaagatgtaaactaagcctcgtactgcaacctccccttaaaggggaaacccatttctgtcgtctaaaaagggagcagtggctgcaccgcctttccttaaggtaaaactcggcgcccctctagttaaaagggtaaagtacgcgctgggccccacctcacctgcgcggttactttgtactcggtgtagcccttggggtgagtcctggggtccgacactgtgtagtgccgcaggaagtcatccttcgcctggcgggacatgaaaccgagctggagcggagcggagcgccggcctccacctcctcgccgtccccacccctccggcccagcctccgcccgccgccgcctcgccaggcctgcgctcttcttcctctggcctagggattttgtcgcaagtgacagcgctgttccgatcccgggtgcgcggccaagggagcgtctgaaaagttccttctctgtggtgaagcgtaaacccaggtcactggaaagattggttgggaaggctgggatcactcgtctcatttctgccgggtgatcaagcccaccctatccaagcgtaaacccttgtcacagacttccaaacgacttctccccgcttcctaaatccctgctttcgttcatccacccaactcttattgtgtccagtatgtacaggacaacgtcaaattatttccctgtctccctccacaggattccctaattcatgttttctggaaagtagaggaagcaaagaaggttggagaagcaggatggtgtcatgggctctgagtcacgactcttactagctgtaggagtttcccttaactactcagcctcagtttctcatctgtagaatggagatgtttataatagaatctgtgtagggcagtggagcttttttgcgatgggtttgctgccagaacacaggtgtcgtgaaaaccaccgttaaatcaaagccaaaatgggggtttggcgcggtggttcacgcctgtaatcccagcattttgggcagtggaggcaggtggatcacttgaggtcaggagttcaagaccagcctggccaacatggtgaaaccccgtttctactaaaaatacaaaaattagctgggcgtggtggcgcacgcctgtaattccagctactccaggggctgagctggctgatggcttcagcccaggaggttgaggctgcagtgagctgcaatcacaccactgcactccagcctgggcaacagagtgagactccatctcaaaagaaagggagcaggggagggaaaagactcagctcaacatcatcatctgatttgggcaagtccagcactactggccatctgatctacaagtgtggtgggatccacaaaagaaccatcgacaattttgaggaagctgctgagatgggaaagggctccttcaagcatacctgggtcttgggtaagctgaaagttgaacgtgagagtggtatcaccactgatacctccctgctggcaattgagaccagcaagtactatgtgaccatcctcaatggcccaggatgcagagactttatcaaaaacctgacctcaggctaattgtgctgtcctgattgttgctgctggtgttgatgaatttgaagctggtaattccaagaatgggcagacgcgtgagcacacccttctgtcttacacgctgggtgtgaaactaattgttggtgttaacaaaatggatcccaatgagccaccctaaagaggagagatgggggccgggcgtggtggctcacgcctgtaatcccagcagtttgggaggcagaggtgggtggattaggaagtcaggagttcaagaccagcctgaccaagatggtgaaaccccgtctctactaaaaatacaaaaattagctgggcatggtggcgggtgcctgtaatcccagctacttgggaggctgaggcagagaattgcctgaaaccaggaggcagaggttgcagtgagctgagatcgtgccactgcactccagcctgggagacagaggacagagtgagactccgtctcaaaaaaaaaaaaaaaaaaaaaaggagagatgggagaaatcattaaggaaatcagcacctacattaagaaattggctacaactctgacatagtagtatttgtgccaatatctggttggagtggtcacaacaggcgggagccaagagctcacatgccttggctcaagggatggaaagtcacctgtaaagatggcgatgctgtggaaccacgctgctcggaagctctagatcacatcctaccaccaactcacaagctcttggttctgcccctccagacgtccacaaaattggtggtattggtactgtcagtgtgggccacgtggagactggtgttcccaaacctggcatgggttttgagacctttgctccagtcagtgttagaattgaagcaaaaat

SEQ ID NO: 915571 - DNA, 4001 bp, Homo sapiens
ctctaagcatgacggccgtgaggggcaggtcttttctggcccctccagcaaagctgtaacagaggcggtaacatctccttgttctatctccttgtctgctgtgtcaatatggatctctgggcaggaattcagtgtggagaccggcaggcctgtctctgtttctgtccctggaccctcctcagcctctgctccttcagatgcctcaccatctttgggttccagagcctgggaactctctagggcacacagggcatcctgaatcctgtcagagagaaagctgcctggagtcatgagcatgatggtttctttgcccagttcagacagcggagactccagctctgagtcttcacataagaacaggggacctcgaacatttggctgtaggaaatgagatgagttgtttcctacttttctttcttcacacatcccacccaaatctccctctacagcttcgtggccttcttcaacctctggagaggggcctgcagaaccctctggctcactgtaacttaggaatactggggctgctactggagaagctctcccttctggaagctgctctacctcagcaatcagtggcagagatgtcggcactgagggctgttcgggggcactggctgggcagggtgctggatctctggccttggaaaagatacccacgagtacaaggtggatccagtcaggatctgacagcctgctgatcagtggtaagattacattgcatgtgatgagttcgaccactacatggcgtccggtacgagtctccaagtggggcttgggcaccagcccttgaagcaacaaattcacaacgccacgcgtataggtgacttcagcactggggctgtgcacagcaggatgtggggcagtcgcccggcagtaagcctcccagaggtgggaaggctcaactggaccattcttccctgcagtggcctcctttgcctgaatgtagctctgcaggtgacaaccgcagagagtcagaacactctgggcaacagcatgactgtccatcacgctcatccttctccgaagctcctggaccaaccctttcatggctgcctccatttcttcctcaaaggctggctcctggctcacggaacggtaccaagataacacaaaatctcgaataatcatctggatggtgcggttgatctcccgttccagctgcctttctgcctcagggcatggaggacaggtggccaacgggatgaagcgttccagatgcagtcgacctgaagccactccagcgaggctggagcccagccatcctcccagcaccactagcaatgccgacagaaggcacagcagccacacgttgaccagaaggtgtatgaccaggagccagccaagcaagacccccacagccatcagcttccggctactcaacaggttattgaggtgacagctcgatccagctggagtttcctggaacggtggcactgtttctgtcttcatggctgaacggacaaggtggcttccccagatgacagccctcaagattttacttcagagttagggaaggggggcatgaactgtgtctcagatatggggcgatctgggtgctgttcagggaaccggggctccaggccctcaaagtcctacaggcactgcaaagcgacagctgcagctccgcgtctccccatggctaccactaacagagccctccaactcgccccttccagctgaggtgtggctttggaggaaaactctgtggccttcacactgccccaggcggaaggcctcttcggggcctcggggcgggcgctgcaaggccctggggcccacggacacttacacacgcagcgggcagcggccggcgaagactgggtcacacgccgccgggaaccgcgcgcccacactcagccccgacctgaagtggactcatcgcggtcctctccgggagcctcggccctctgccgccgtaaacctgggcgactgcgctccgcagccgggcctgtgtgaaggctgaccgccggccggccgccggcgacagcttccgggtcgacgtcgacgggagcgaggcatgctgggagagcgtccgcgcgcgccccgaggagcggcgctgcccggcgccctctgctggcgaggagccgccctgacggccctgcgcgaggtagtctctgagcctgagcgtgagcctgagcgcgcacggggcgcgtgctcgccaagagctggcgcagatttccgaagtgccacgaaacagccgccgcagcaatcaccgctaagacccagacttccaggcgctttaaaacgcgtcctagttctggttattaaatgaagcctgtcctttactgcttaggcacgctgtcaataatccggtttattttaatttcatggaggcgaagtttcattggcctgatgtgtcttaacatttatccggtttcccctagagccggtaccccgcgtccccagcacaaagaccctcatttgttgtcaggaattgcagaatataaggcatgaaacgatacagagatagatttatgttgtacatttcatatactgtatcacaaaatcaaatttgtgattgagggttatttgctggtggcattacacaaacaatcaaatattttgagcatctgctgtcttcaatgtgagaggcagcgtggacgaatagaagcagaccttgtcctccaggacctcctgctaactggggatgccagcgctttgaacgcgattggctatctagtaatgccagtcagcgtgcgatatagtaaaatacaaaatcttataggaattcaggggaaggagagatcactgtgggttgcaatggttaaggagaagctcacagaaaaggtgcctttctgctgagtcttcaaggatgagggtttctatttccctctatctcttctcgccttatcctccccaaaaacatagaaaaggaaagcagagatagaggtgtcctttcagataatcctgtaatatatttgctttggaatatgctctatgttggattgtttttggttttagcaaattagacttcacttgtctacacaggaacctataggaagacaaaataccggaagcactgaccaggtgtcaaaagtgttagtgtcagttttgcgtgaagccagcttccatgtccaccttgggccctaggagctgtgcccgcagggtgggtctcctttccatttaggcataggattcgcatcgtttgcacagagctgctcatggttgcccttcgtccaccttctctgtgctgtgagcagtctttcatcatcatggactactccctagatgtttaaaggaatcttcaaacaaatcccaacccaaaactctgccaacaagaagtgcgttgcagcttcctgtctcgtccattgctgctgttggggcagagacttcctttgaatacgaaagaagccatcatttagatgtgacccgtagtttacgattcatcacttctaaagcaaatggtttgatttaggatcagtgtccactaagcagactgggcactcccgtgagatggcagaatgtgaatccacggtttcacggtccataccttttcactgctgcctgccttcccgcagaaaaggaacccgagaagtgggctctgcccctctaccttcccagaccattctaatgtcctcaggagcacttagaaaatggcaacaatgctctggagaaaagtccctgccacctagttgggagctaaaacagaaatgtgaatgatgaagggactaccgacggtgctgaagacttcctgtggcagttcaaagagaaagtttacttggcagcataatctggagtgttcagggcagtaaggaagtgaccttgcaagtgggcgctatgccacctgaccagatggtctggagcatcaaggtagccaagagtgccttcctgattctgaagcgggtttgatggacatgcccgtgcacttgtcatttggacgggtgtgagctcctgcctgggggtctgggcagaccctggtctccaaacagattaatcactgggaggaggtgagagtcaggactgatgtgccctggtgtgtgtatgtggggtggggagac

SEQ ID NO: 915572 - DNA, 4001 bp, Homo sapiens
tgttaactcctttaaccatgaagatgaacatacatagataaacattgaagcagaccattctgttccatgctttgtgtctctcagcccctcttgcccctctaaaccacttgaaccccgctcctcatttcttggcttctctgacactcccaaggcaggctctccccttgccccagaccccaaacacatgcagtctggctaactggtgcagcaggtcccctagtccccagcctctttcctcctgccttagtatctctactctgacctacactgcttggtagctgcttgagggagatgggcctcaaaggtggaccacagctgctccatcctcatcctcagccacggcccactatgcatatgcctccatctcccaaaagggtgcacctctccatgctctaaccatccttggcacaacgtggatgctcgacaactctttgctgaaggaagtcaaaaggaagaaatggtcttatcattacatgaactcagaacacaagtgaagccattagggctgaacaggattctctcgccttgggaaaggagaagaggatgccagcctctgctcaatccctaacatcctgccctcctccccgccctcacctcccaccccctacccacctacccccatcaagacagcctgagttggtcttggggagggtaagagtgacagtgacgggtccctttccatctgtaaggacaaaggcaaaaccctgcctcccttggcatcctcatcagtccgcacacaggtgccacagaggctccccactcccttgctcaagtctcctttctctcacttgcgcagacacacacatacacacagagacacatgggcacatacacacacacagacacacgagacaaacacagacacacgcacacacagacacacatagaaacacacacagatacacagacacacacaaacacacaggcacagagaaacacacacacagacacacacaacgacatacacagatcatacacaggcacacagacacacacagatgcacacacagacacactgacatagacacacacagatatacaaagacacacggatacagacacacacagacacatgcaaacacacacacagacccagaaatacacagacacacacacacagacacacgcagaccatacacacacacagagacacacacacacagacataaagatgcacgcagaccatacatagacacagagacagacacacactcagacacaaagagacacagacctgcgcagacacacacaggcacatgcgtgcacacacagatacacacagagacacacacagatgcatacatgcacacatgcagaccatacacacagacagacacagacacaaagacacacgcagaccatacacagacacagacacacagacacacacacacagacatgcacagacacacacagagacagacacagacatgcacgcacaaacacccacatggacgcatacgtgcacacacacagacacacacaggccatacacacacacacagagacacggagacacacagacacacacacagatacacagagacacacaaagacacagacacacactgagacacacacagacacacagacacacagagacacaaatacagacatacacagatacacacacacacagacatatgcaggcacatcgacatacacacagacacacagagaaacagacacatgcagactatacacacacagacacacacagaaacacacagaggcagaccacacacacacagacacacacacaccaccgcatgattgggcatcacgggctttcatggagtgaggggaggctggggtgggggtcttcatcctttctctaccttgccctccttcccaacctccgcatacgtctccatcgctctcctgggcttcagcgtccggccactgcccgcgtgctcccgcaggtcgtccccgtaactcgcccgaggaactgaccgagtgaggatgctctcagctgacggggacgctctcccccgcccggccaaggagtcgcctggagtcgggggcggttcccaccgcgtttccctcagccacgcctttcgattgggtagcggggcaccgcgcgtgacgccattggctgcattgtctgtcgttcctgtcccaggccccagcttttaagggacacgcggcacggagagtgggccggtgataggcgacagtgtgggagctggggtcagagttcatagggtcgcagaggccgcgtgccgcgtctccctccagtccccgggggactgacccccacaacaaccccgtgccgccgttccgggcccctccttccaacggccacgtgcggcctgcgcgtgcgcactcgcccagtttggcgcccaccaggcagtggggaaggggaaggggaaggggaagagggtgagggtggcagggtggggacagggaatgggaagcagtggtggggatgtgggtggtggaccaggggcgagggcaggggacaatgtctgtggagaaggggggtctgtttaggtttccgctcttggacgggagggagcggcggggtaagcagcctaggaggactagggagctccacaagtcccgcggccagggcgccccaagcgaggccggggtccgcgaacggtcgccactggagcggggctgcaagggggtgccgatgctgcgagagaaaacctggggaccttggaacgggctcatggtaattgggaagagagtggagctcctgactagaaacactcgaaagccgaagctggagtctgagtactggagactggaagatgtggaaaagacggtcttgaaagggaagtcaggcccgagtcaggaaaggatggatgtgaagctgctataccgtggagcaagtgcatcacaagcttcagcagatttggggaaagacagcccaaggggtatttggggaaagcaagaggtcaaacacgaaataaaggctaaatctaagagtgcagggatgacagcagggcctatgaaggggtctgggtttgaagagaggttgaggtctgctggggagaaggtagggaccagtggagaggacttgagatccaatggatataaactgggacaggatgagaaggggttgaggtctagtgtagacaagatgagatcaagtgtagagaagctgaggtctactagtgagaagctggtgtgcaggggagagaagcaggggtccagtggagtgaagctgaggtccagtggcagaaagctgagatcaagtggagagaatttgagatcaagtagagagaagctgagatggagtggagagaagctgggaactagtggagagaagctgggaaccagtgatgagaagctgaggttgagtggagagatgctgagatcaatcagagagaagctgaggttgagtggagagaagctgggaaccagtgatgagaagctgaggttgagtggagagaagctgaggttgagtggagagaagctgagatcaagcagagagaagctgaggttgagtggagagaagctgggaaccagtgatgagaagctgaggttgagtggagagaagctaagatcaagcagagagaagctgaggttgagtggagagaagctaagatcaagcagagagaagctgagattgagtggagagaagctgggaacaagtgatgagaagctgaggttgagtggagagaagctgagatcaagcagagagaagctgggaaccagtggagagaagctgagatcaagcagagagaagctgaggttgagtggagagaagctggggtcaagtgcggagaagctgagatctagtgaggagaagttagggaccagcggggagaaattggagggttcaagaatggggagcataaatgagaagaacattgaaaaagtggtagaagttactggcgatgaaagagtgatggcatttactcatgatgagatggaaattccttttgaaagtgtcaaagggagtgaggaactacaagggactgagaaaggagtgggagttgaggggggcatcttgagtgaagtgaaagatatcactgatgaatctgttt

SEQ ID NO: 915573 - DNA, 4001 bp, Homo sapiens
cactcctcctccttctcccaccctccatcagccccatgctggtgtcgctgttaagagcaaggaccttgatgacttctttttgttcatacacatatttgtcatatggggtggggacagggggacaaggatctgggcccaagaggaactgagcatgcaggttcctgcagcctgtggccaccattagttacatgccctggggcacacattcttgcccagggaccaatagtggagggaaatccaacgctcccacccagtcaccaccatcctttccccctttataccagatctattttattttagaaaggaggtatttcagcagcattgcataaagacagggtgactgcagtcaagcaaaggtcactgagacaatgcagacaaaaactagagagcaggccaccttcccggtatgaccttggactagtcacttcaccattccacgcttcagtttcttcaccaacaaaatgacacaatagggtgatatgtttacaaggttcgtcctggatccaagggttgaacatttaactctgtatttcctgaagaaatggctaaagtgaaattagtgagaaaaggcagaactcagggtaatcttttattaataatttctacttcaaaaggaacaatttgactctagaaaacaagtgtatttaccccctcctctggtcctactttttctcccccaccgaccttatacttttgctgatgtcaatcttaactgcaggactgggagtctcatgaggcaataacacggtcaaattaattttgccagtgctgatcctaacctacaaactccatctgcaattcctcgcagtaagtctgaccataaaagtgaaattcacgttacttatgatctaataaacctattgcctgggtagaaataaatcacttatagaataataatgcccaccaaatttcctgcagtcctttcaaatctccaagtgccatgaggggtattcctctccaaaataaagttatcttgacgggggtgggagagtcagcatcttgaagggtggggaagaaggaatggagagcatctcacacgctcgccaaaaattaaaaattaaaaattcagcctttacacacgcacacacatacacacacctcttgtctgactgtacagagatagtcgacaagctttcaggtttgcccacttttattgtgctaataatgctaagtgtggaaacccccacctcgtgctgttctgtgtaagtgtaccgcaactgcagggtgctcgcctccactgccaactgatgatacactaaagaaagcccgttttttatccagatgtaaaatgaagctgcacccctcctatacctgccggaaactacatctctctgcacacaccctggggtaatacgcactgcacccggcgagttacctggaatacgtttactaaatcgacaggaagaaggaaagatcaatgcgattcaagtgctgacggttgtactcgtgaaggaaaaaaacaaatgcaagccgggaagtccccagtggtgcctgcacctaggaggcgactgcaacggatggatgcgggggtgaggaagtgcagggagaggaaaaaactggagggaggcgggttgcaaaactgctcacctgtccgtacaccttgatgggctcgggctgcagggcagcgctccgtttcctccggagcggcttctcgtccgcgcggctcgcccccctggcatccccgcgcgcccacagccgcagctcgcgcgggtcgccctgcaccacgaggaagccccggtcctggggcaagggcgcgctgccgccgtgcagcctctgcgtccagacttcgcagagagctccgggcggcagcagtgcgaccagggtgaataggaacgggagtcgcgactccctcctgctgctccgtgtcgccatgttcgggcgaacgctactgcaggtggcgccgccgccaggagagaatgtgcagcgcgaggccaggagagccgctgggccgggaccgcgcgcgccgctcccggggctccaggccgcccgcgccgctccgggccgccccgctgcgcccgccgccgctgccgccaggtcccgctcggttcggcgcggcgccgtcacgtgtgaggctcgcagcgcgtccctttcgcgcactttctgcgctcggcggcctcggcggcgactccggcccctccctggcgcggggatggggaagttaaggcagcgagcgccggtgggggtgcgtcccttccctggcgggcacacctccttgttctccctgcaggaatgaagagttgcatggggctcgctcgttttctctggagttagttgcgtcctatacagggtcgtgtcgaggtcgtcctaaaccgtggccactttcctgagtgcacagcccgcagtagcgccacaagaccacctccccccggccccggcctcatccccacctccagggaagagtccagagccacagaattagctcctagaacgcaaccaacaagagtccagatgaacccgctctattgggaaactcacagtttttcatctactctgggcaccacaacgtatttgcaggggccacagcaaaaactacccttgatcaagctacgtgccccagcctgaagcacagcaaataaacatcctgcacagaggcagtaaaaacaagggtacatctgacaaagaatgcaccacacctggacaattattacacagctatacagggtgtgcttgcacgcacgcatgaatacctgtgcgtggcacagggccccagcggcggcttgcttatgatccctccaaggtgaccaagcactgagccaccctgcctcagcagtaaaatagacatatttaccagtcccttcaacccacagccaggagctaggcaaacacccacagaggagggaggacacactttaaccctacattcagcttgacgagccaaactctctgaaccacaggagataaaacttctgccatggaactgctaaggtacgcccaaggaaaatattttttttgcaggttagtgggagcagccaaagtctatgtactactgcaacctttcctatttcattttatgtttcactgccctctgaactcagatcctggtttttgataagaataaagacacagcaagcagggctgaaagggagactacctttatagttgcatacaagctgctgttcaggggaaggaagggatggtcagttcaattttctaaaaacattcctcatctccgacaagccacggtagcccgattcctaccccggcccactctagtacttttcaggtagcttagcaaagccccctcctctacctaggactaccactgacaacctgccagagtcaggccagcttgcctcatctccctgaagccagtattcaaccaccctaccctaccccatgccagacttgctggggacctctgcctcaggttctgcactctcccacctcctcccacacccgattttctccccaagtcagatgatgtctttctgtccatctcaacataattacagaaccatccagttctccccaccaagcaaatcatgcattctctatgttaaccaccctgctttgttcattatacattgtatacaggtatcaaaataccacactttccccagtgtggtattattggggtgccttcatcctgcaccccaactttgatgttatttcagagggattgaggaagtggtagcttgtttacaacccagagctggttttgaagctgagaggaacgccttgctcatattgtgcaattcagctctaactcatatatataacatatatatttattatatacttatatatgtcaattaaaaataataattcaaacaatcatgcatcctccaagaaagccactgaaccactgtcacctcccacccctcatctagatcagctctgtctggtcagcatcaccttaccaggaatggacaaccccatggtctctcaggaccagcagcaaagatatctctactcccatttagccctcaaaggaaaatgaagggaatatggctaaagtgagaacatcctgtagatgattcaattattggggtttttccaac

SEQ ID NO: 915574 - DNA, 4001 bp, Homo sapiens
ttaataagtgagaaaaattcttaaaaagataattaacaaccccatcacaccttatctccattgacttccaatttaaaaattacagctattaagctgatcctaaaatgtgacctatacaagttcacatttttgtgtactgaattattgtgaatcagttataccttaataaggtttcaaaactacaaacttttttgtctcagatgcttcccttccactgacagaagcagctaagtttgaggagctatctaatggctactagactcagaattttgttcattactatatcttagaaagtacagacagttttattccacagaataccagaaaacagtatttcacacccctttacaacagcagatatagccacaatagcagtgtttaaaactaaaaattcttttgaagtccaagccctatcacatctctatgcttcctccaagagctttgtctgcgaaaaacatacaaagaaaattggtctgaggacactacatgagaaagtgccctagaataagattattaagaagctaattttaagctttgcaaatattctgtttctacaaaagatgaatgaggaaagtatccacgatgattgcatcagtttcccaaagttaatctaacagagtccctacatgtagctttagggatatatctcaagccagttaccagtctttccactcacagacacacatccagcaggaataggagtgattaccgggcagaattcctaacccttgtggcaagggaaatactatcctatagcaccactcaacaattatccctctgagcaattaaaataaccagtgaagtgggtctccaaaaggagccttcacccattccttcatttgagccagccctgacaatgaggttgccaaagctagcactaacacccgaggaacaagaaataaaggccagcaaagctcaatcttgcatccaaagatattaaaaaggaaactaaatgacatggagaagacattcttaagaattacctaactaatacagaaaggaaaaaaataaataacataataaaatcatttttattcccttttcattttttccacattcctttacaacttattttaataataattttgttttaaagtaaagccctgagtgatggtttgccttttataaataagaataacaggaaagaatgcaatttgtcctatttttctagtgttttgatcaaccaactcctctcacctggtctttagcaagtatcaattattacagcagtgattcaaggtcatggaaaagagcaaagctaataggtccatagaaaaatcaaggcttgtgccctcgttaatactgcattctaaacaaacactaagtccatgttcagagagctgtactaactcttctgaaaggaagcagcttacgttcaactcaaaatttcttttaaaactctctttgctttgacagagaggcaaagagaaacaaaagtgcttgcatatcagaaaaggaaaggaccataaagaacaaagacggaaaaggaaagctcgaactccttaagaacattgtctctacatatccattcacctgattctatcatttcacacatatatatttcacatgcatacatatatctcatctggtacatagtatgtgcttaaaagctgtgttgattaaaattatcatacaattagaagaacagacaaggacagaaaaaagtaagcatactctcttaaattacatcaccagtcacatcagatatttaggaagccccaagttaggagtttctaacatttgttttaaactattttttacaggatgaaatgagatgaaacatgggtcaaattacatgtgaagccacacctacctccgcagattttttttttttttccagagtgatagggtctcactatgttgcacaggctggccttgaactcctgtgctcaaggagtcttcctgcctcaggctccctagcagttgagactacaggcacacaccacctcccagcctgatgttttatagagataaaaatatgactaaaactaaccccaaggaaagactcacaagaagaatgatgtcataaatggctcaatgtaaccaatggggtaattgtgggacctgaaggagaagttctacccttttgcctttataaaggacatgtggtacataaacagactaaagtatttagacctcagatcaccttcaactttggtgcaagaggctttttctctgttcatttaacaccttctctgatgatcaatatcttccctaaccaatgccatcaacctgctatcttctgaattccaatggattaaaccataggcctgccaaaaagtagtgaaagataatcaccaaaataatttcattgctatgacagagccttatggcgacaacctccattctttaccaacattttctctatccctaactttcctcttgcagtcccctaacccccctccaaaaaaaaaaaaaacaggcagaggattgggggaaaacagctatgttgggtttatgtttcaaaattctttaaagataaaaatatttttcctcccagttaacagctttaacataaattgattgcaaatgcctctaggagaggtaatatcatgagttccttccacactaagatatatatgactctgaatgcattttataaggctagaatatctatccttgattccaaaataaaatagacacactagaagaagagaaaatcactgactaatcatgaacacagttacaaatatcctttaaattttaactaattctatagtgtaaatgaaaatccactgagaacaaataagttttgtcacggttatcctaaatggttcagaaaatctaccaataataccatattcacagattaaagaagaataactctataagcatcccaacagatgcaatggatagaagacaaaacctaccaaaaactatatagttattggtaaaatttaggatgcattgccatcacagacagaaacaatgtctttcctcggtttaaaaaaaaaagcttcaggctaattttcaatagaataactcaaggccaagaggaagactatctaaaataaggcccaaatatatagaaaaccaaaaaccacatgttctcccttatatgtggaatctaaaacaactgaactcaatagaagcggagagcagtaggtggttaccagaggttgggtggggatggggaggaatagggagatgttggttaaagggtacaaagttgcaattaggcaggaggaacacatggtaagtatttaaggtgatggatatgttagtttgattctaccattccacatgtatacatttcacatgcatacatatatcatatcccagtgtatcccataaatacatataattataatttacccaaaaactaaataaagaaattttaaaagtttctaaatcttaaatgagtttttaaaaataaaataataaaataaagtaatgtccaaatagcagttctgacccaaaagacataagacacaccagggcttccctaagtgtttgtgtaggtcatgacaggctctttgtggtgggaaatatttattatttaacattaagtaagaaacaaagaacacgcaatgacatctatgatctaattgcagttacattaaattcgtttttaaaagatatgagcaaggggccaggcatgatggctcacgcctataacaccagcactttgggagaccaaggtgggaagattgcttgagcccaggagttcgacactagcctgtgtaatgaagtgaaacctcatctctacaaaaaacaaacaaaattagccaggcatggtggtgtgcgcctctaatcccagctacttgagggagctgagattggagaatcacttgggcctgggaggtcgagactgcagtgagtcatgatcatgccactgcactctagcctgggcaacagagcaagaaccggtctccaaaaaaaaaaaaaaaaaaaagatatgaacaagtatgaacaaggactggaaataagcaggtaaaaatgaaaacagatgatatactgtggaagtgtatgagaggttttatcttttttcttattgtttt

SEQ ID NO: 915575 - DNA, 4001 bp, Homo sapiens
ttttatttcctcctttatgattaaacatagtcccaaatttctaaatactttctgaatggtgccaaaaacaaaccatggcctttatattgatctaaacattatagtccatatttgttttgtgatatctgtgtttgcataaagcacaaatttgcagtcttacaatattctgccaaatgtgtattgcatttttcaattatataccaatttttatgtctcataacacctaatgaaattgaataacattggatccctttctacaaatacaaaaactaggaaaaagaacagttaactaacttactacactagaaatagtgtttaaattgtaaattataacaacgcatatgaaagtatctcacacagtgcctggaccaagaaaggtttgcagattctggatcctatgctagtaccttcccagttctgctggagtttgttgttgttgctgctgtttgttgtttgtttttgacagggaaaaaaatctccatttatttaaaatggagcgttaatagttaccaaaaaaaatcttatgtgaatcccagaccctaccacgactaccaggtgttagctttattccatctctcctcaatcactaaaatgaccagtaaacaagttagacatgtttttttataatgcttttccagtcttcttttgatttcagtatttatatttaaaccatgtagcaaatggcagtggtctacctctaattagtcaagttgtcttgggcaagtcatttcaactttccagtctcgctttttaaatttttcaaatataagatttggactaggagaactcaaaagtcattaagctctaaagtttcattatattactttaagtctatgaggtatctataataaatcaaaggaacacggcttctcaaaagaataaaggatacagcaatagggtggttggctagaacaagaaaacaaagaccaaggattaaaagagaatttgaaaatctccccaaccccctggaccaagtccagcttcagtcacataaaggttgtttgggactatagagaagaataaatatgaaggtttctcaaatcatcaagagatgatgtttttgcttaaaaaagaaaaagtacacttgttcctatatactctctagttcttaaagcatacatacacacatcaccaccaacaacaaccctaaatgttttaatattgatatggaaggaaaatacaagtcactcattttgctgaaataaagtattttaaacccagaaagggtgatttggttttgagggaaaacaaaacaaaaacaaaacaaaaaaaacactgtattcactctttttctattgcctcctctgtatacaaacccacagtagctcttaaatttgtgacattttcttatgtacatggagaaaaatttgtgtcactattgcagcaacatctaaacagtttcctgtaaactttcagtgatggaactcatagaatttatgataaaatcccgtagagtggtgaaacaaatttctttcatatttatcattcattttattcagtgtgcatttgaaggaaaaccttttaagaacaccaataacgtgagaaagctaaaacaactaaatttattgttaagtatcacatcattggtccttctgggagttcaggaagaaggcttaaatcacatttcctaacacattagagagcttcccagagatttgatggcccacagaagcaaaccacccaaagcacactggaatctcagagatggtgacaaagaaatatcgctttgtttaatgaaagcagactgaagttaccctttcattttttttaacaaaatacaaactctcttaccccatttttcttctttccttcctccacccactcctgtttcacctgactaaactgtaggtatttgttccatcacctgacttaggggctggctagaaatattaggaaaaaaaacaatctactattgttacatgagacaacaacctttcatgtccttgaagctcaccatgacctttcatctttcctatccccaatggtctctcctaacaactaaaactacactcagttgggctgaattccagattgtcataaaaagaaccctgtcctttcaaaacaaaaccaatttttacaccaaggtgggggagaaacacaagtccattgttccctcacagatggaagttggagttactaaggcaactgctctaatcctcctttttaccacctttttcacatcactggcctatcaagtatgctaccttttaactcataagctcaaaagctggtagtctaactggctgccctaattagctacgattttcacactacagacaacatgatgagctaatcgaaatttgcaaaataatgacgtacctccagcaaatattcctcctcctgaggcccagtcttagaataacaataatgagaccattattagagaagggcattaaaatgctgcactgctgctaaacagagaacttaattgttctggtcttgtccattgaatcaacaacctattgttgtggacttgaaaaataaaggactggagaatgggtgccatgatgattggtctgtgcggccataccggcactctgtagaattgttttcttttgaaactcttgatggactagtagttttgtttaaaagtaacataaaaggcgattgtctggataaaaagtcctatttattgaaatccttagaagcagttgcatggatttgttcgtgacccctgagataaaaacatagtgaccataataacaccatttgtagagagccctgttaccactgcctacagtaacataagataagagacagtcttttctaactacagtaggaaggaaggaagtacttctgagcagaaaacaagaatgataaaaggtcaaatactggataaagctcattaatcactgaaagggagactttaaaaaataatgctaatttaagaattctgtacaattgctaaagattcaagcacatgtaaaaaggcacacagcttgttttttcctttcccacttttgaacttctttggttaaaaaaaaaagaattaaaataaaattattattaaataactaaagcaagatgtctcaggataacctggagaacaagaaacccaaaggtttctagataattattcttatggtcatccccagtctatattgagaataacaaaatactgaagttaaaggttaactagtgtaggattcttagctgtagaaaagcactgtttacacactgtaaaagtgtcttccatatggggccacagtacatgttttctgtaaagtcaaaccaagattttagtgttgaattgtggggaagggacgtacttttgctgttagtgggtatttggggtgagggtctgtttgttttttaccaagtgaaatctgcattatataaaaatgtattaaattgtaaataagacctcttgcttcattcaaactgtgctttgcttcatttatcttcatcttgttaggctaaattaattaacaatctcactgttgcacactttctcttttcattacatcaaataatggccggtatattaagaaagccctcaccacgggaattctgcaacactactgctaagaagagtttctgtgtatcaatgtaacaatattcatttcataagcatttattaaatatacttttattgttaacaaccaattaagcacctaaattcttaacatgttatcaatagaaagccattttttaaaaaagcaaaactaaactaaaagttgcaagatactttaaaaaggaaaaataaatcacattgtatgcccacaaccaggtttcaccatcaactttacctaaaataagaagaaacacatgaaaatttgacaggtatgttttcagagatacaagacaatattgcataaaaggtttaaaagacacaccccaagccgttctgctccttgctgtggaatgtttaatgtgataaatgggatgattagaatttcattggtaaatcccgttattttaaatctgtaagaatgaaatgttttaaactcttttgtaagttttcttttcaacctgaaactctgtggcatctagaattatgc

SEQ ID NO: 915576 - DNA, 4001 bp, Homo sapiens
ggcaactacagccttacaaaatgtacttctgaaataataagacttgaaagttgaaattactccttgatccatggcctacagaatggatgctctgttagcaagcatgaagacaacaataatctccatgtacatctccatctgagctcttgatggctaggtgcattatcaatgagaaataacatctctaagggaatctttttttctgagtagtatgtctcaacagtgggcttaaaatactcagtaaaccatgctataaacaagtgtgctgtcactcaggcttccttattccatttgtagagcacaggcagagttaattcctaaaggccctaagattttcagaatagtaaataagcattggcttcgacttaaattcaccagcagcattagcctctaacaaaagagtccacttgtcctttgaagccaggcgctgacttttcctctctggccatcaaagtcctagatagcatcttcttcccatataaggctgtttcatctacactgaaagtctgtggtttgatgtagtcaccttcatcaatggtcttacctagatcttctggataacttgctgcagcttctccatcagcactggctgtgtcaccttcacttttatgttaaggagactgctattttccttaaaccttgtgaaccaatctctgctagcttcaaactttcttctgcagcttcctcccttctctcagccttcacaaaaattgaagagagttagggccttgctccggattatgctttggcttaagggaatgttgtggctcatttggtcttctatccagactgctcaaactttctccatatcagcaataaggctattttgctttcttatcattcataattaactggagtagcactttgcatttccctcaagaactttccctttgcattcacaacttggctaactggtacaagaggcctagcttttgacctgtctcagctttcaacatgcctttctcacaaagttgtcattcgtagctgttgatttaatgtgagacttttatgtgctgctcttcctttcatttgaacacttagaagtcattgtagggttattaattggcccaatttcaatattgttgtgcctcagagaacagggtggctcaaggagagggagagggatggaagaacagccagttggtggaacaatcagaatacacacaatacacacaagtttgccaccttatttgggcttgtttggtgcggccccataataattacaatagtaacatcaagatcactaattatagatcgtcataacagacataataataatgagacagtttgaaatattgtgagaattatgaaaatgtaacagagagacatgaagtgagcacatgctgttggaaaaatggtgccgatagacttgcccaatgcagggttgccataaacctctaatttgcttaaaaaaaaatctgcaaagcacaataaaacaaagtgcaataaaacgaggtatgcctgtacattatctcctcatgtgctgacagctctttgaattctacattgtctcacatcttctctatgggcataggcacatagcacttttcaagtacagacaaccagaagactatcagaagttatcagtgtaaattattcacgtgtatatagactagactctttaagataactcattcctacaattgagccctattctcaaagagtaagatagttattctttaaacttattataatgggccctgcattgtgttatttcactggaaattacaacaaattgaggcttctttaccagctggtacttttctctatgctcctcctaagaaaacacttatcaaaaaataataattacaaaacaattgcaaaaaaactaataaaaattcacacgcactaggagttaagaacttgtttacaaactgtaactgtttcattacacaatgagaaaagtaaagataaaccaatacttacaaatatgcacaaaaaatatcagccccagcacccagaaatcactggtaaattgcctttgaattcatgaaagtgacctgaaaatttaatagaaaatgaaataaaaaaggataagtaaattgcatttatatgctttattaaagaagtatactttctggctacaaatcatacaatttttaactcatgcagttgtccccatctactttaacaactttttccaaaatgataatgccaaaagaaacaattatttcatggttctacatctaagaatgccacatttccatccaatattgctcttttaaaaaaatcggtaataaagtaggtgataaaaatacaaataagtaagaacaaaagggaaaaaatttttaagagaaagaaagaaacaggcttataatttatatttgaaaaacatttaatttatgtctgcaagttgaaatgaattagcttcacagagaatatcttaaatgtgcctgacaggaataccttgtaggtagaattaataagaaagaatgcagtgtttgttctacctaaggcgtggaacccataagatgcttaggctatatacaatgcattctgtataagccataattcaatccaaaattgttttgctcacatatactttagttctggctgaagaggtaacagatgcaactcaaacacacagagctagccttatacaaatttttaacatacaaagagtcattttatgcctctacatgcctatgattttctctatccaggacccccatgcattaaggtggtttggtagtttatttttattgtttggtctaaatacagcatatttttagttccattaaaacaaagaaactttgttacagaggctgtattctttcaaaaatgtgagcatggctgtgagtagtagtcaactaaaaataataatagagcttgggttcctaaattaggtcagaaactttcctaggctctggggactggcttgattcaatctgcagtttttaaatatagccagcaaatatctaggttagttacagctaactagatttaaataaaatccttctgaaaaacaatggatcttgatcaacatcatttgtaggaaccactgcacccaacttgcaattatagcacaaatgaccttaatagattaggtataggcatctgaaattaagatgaatatgaaataaatatctaactcagccctcttcaacccctaaaatatgcttttacctaaatgatccaggtaatttattctattttctagtcaagatttatagataatagagccaggtgcagtggctcacgcctgtaatcccaacagtttgggaggctgaggcgagtggattgcttgagtccaggagttcaagaccagcctaggcaacatctctaaaaaatctctaaaaaaagtttttttttaaatctttttaaagattgatagatgataaaggtgtgggcatttggacagctttaagcatcaacagctaacatacccattagacttcttcactagaccttcttgtccttgtaggaaatggtgcctcagggcttctccagtttcaccagtttccagcaactctaacgcctacttccacagtgcaagaagtacaggacagtctggctagctctgtcattaattgttggtattatacccttttcttcctcattgcctctgctgtttagggatctgggagagtaattttatctgggacaccagacaagcctacctggacacactgtgtgtattatccaaaaccatcaaagagtactggttctgattcaaaccatcctcacgtgctatcccccgctgagttataaattataatttccttataaagaagttacccacaaaataaattttatagcaaaatgctgtatatccaaaagtctaaattctagaagaatccgaaagagtttttagtacttatacattttaaaataccacaccttgtttttctggcaactacttttttaaaagcattaattggaattatgcaagatacatgatacatcctattccttcacttccacataaagaatggggagctaaaagaaaatgtgaccagaaaatattgtggttagcatagatttaattttttaatcaatga

SEQ ID NO: 915577 - DNA, 4001 bp, Homo sapiens
aaatggaaggaatcaaaattgaaaggaaaccacagatactcatctcaggaataacagtcagctgccagggatgcataggaacagtatgctggaacgtggcgagggtagactgtatgatctttttttcccccactgatttctcccgagaaatgtatgctcttttgcagttaccttccacgctgtatgtccgtgagaaatacaatgaagacggtctgaataatgaactggtaatcttcgataatatgaaacgaatttaagagaacatatcaaagaggtacatactgtttcaaagagcaagaactgttatctgaaactccctgcctcataaaaggctttctgcagaatggagatggtcttaagcaagttttaccataaacaaatgcttagtttcttattttaaaaaatgactaattttagaaagcttactctctcttttctctagaaggctctcaaaataggctgctgcaaaagctggtatattgtccggttgctctctcagaatctcgcgtgtcagcccttcaagaagattcccaaatccttgtggaattcggtagtgggtgttggagaatggaatcgacatcttcttggtaagaactgcctatggaacctaaagattcattaaagagtactgtctttaaatttgtctgattttacttatataatcacaactatgccaacaaattatttctgagactcatacatctggacttgaattcttttttccctaacacaacccaagcccatccatttcttccaaagagttttgaaatctccattgtgaattagtataatacaaacacagacccattcactaggccaaatcatttaaaatcctgcaaaaaacccataattttcaatatgactttttctctctttaccctttatatgctcaaaaggtaagggtaatttttgctatcacacaggaatttagagagaatgattgctaaaaagttaaattcattgtcaattgctgagaagaccttctttgaggtctatttttttttaaagagtagaaattagtcctggttctagaaattaatttgttgaatgaagaagttgcacaatctttccccttgctgccacttctgaagcatgacccacaatgcttcgaacaccttcgtactgtggaatggggttgtgcgtgcgtgtgtgtgagggagggatgggatgggatggggctgtgtgtcatgattttgaaatcccagcctctaaagttttagaattcttatatttttcggtttcttcttgatcaggttgtctctttctgtcttgaaatacaagggctagattaagggtagctgctaagcagcgggctgagctactactgagtatgaaaagaatcctccgggacctggcctgttaatgtgagagtgtgcgtcaatgcggaatagaggcggaggccgtggtaggggtccaggttgggagaactggacggtttaatgaggctcagactatggagggttctcgtttcatcgctttttttttctttgagagggggtctctggcctcgaactcctgggctccagcgatgatcccgcctcagcctcccgagcaattgggattacaggcgcgcgccaccacgcctgactcctctcttttgctttttctgagggagcagtagatgggggtatcgaaccattctagagtggtgaaaagagctggcgagattctgaaccaatgtgggcagaggagggcgggcggagggggcagacgggtctagtcgggggcgggatgttgaggacctgggatttcagactcgcgcagaatgggctgcctcggctcccaaacggcccagggctccgaggctgtgtctgggatgctgagagaataagagagacgaagggaaaaggctaggtcttggtatcggagaggaagtggggaagcggcctcacctcctttctctccgagctggtgccgccggttccggttgtttttctagttgctgggtaaccgttttttctttaaaaaaaaaaaaaaactacggcggccgagaaggggcgagtacagcccagtcctgaggtcgcgggaggctgcgaggactgcaaaagggtggagtcggcctcgcccccgcccaggccccgcccctgccgggaacccactttcccagtcctaggcggcggtcagatccttgcaagcatggtcgcgccggggcttgtactcgggctggtgctgccattaatcctgtgggccgacagaagtgcaggtgaggcggcccggctcggccggacccctgcccctcagcctgtgcgggctccgagaccccgtgtcctctgcgggacacggatccgcgcccctttctcaaggtcgacgaaggaacctagctaggctaggggctcgcgtctccgaccgaggcccggtctgcaggagtctgctgggttgaaccccggcctctccactttctccaccccccacttaccatccctgacatgcagcctgtgagcagggagaaagtgcggcttgtctgagtggggaggcccaaatgtgcccagaaagaggccttcggggtcctggagtaactgcaggggagctcggagggaaggaggcgaagctagttaggtaatatttggaaacaggtgactgaatcttccaaaacatttcagcgctaccccctcagtggtgcccttggggagggtttgcttcaggcggggttccttaggggaattaaattttactcgtttaagtggttatcagggctaagaaatacaaccccctcactagctctgactatttaaggctcagttttgatttctggtaccgcttacagatattggtggtgggaaaatgtgagtggcataggggaggctggtggctccctttggctgttgcgcaggtcagatcttgccattcgaataccctaggctggacactgggtcacagtatggagaaagcagaaggtgcaatctgtctgataatgcaaactaaagtgataatgttggatttcttcctttctgtttcaaaacactcaaagagtggaccccagagatccctgttaagaaatgatagttggggtaggagaacagcgtgcagaaaaatgactcctgctctacctgagagccggaaaagtacctagattcagacaaactgcagcccataaatgattgttcagagtctaacaaaagtgcaaaatgctagcactctgtatgccatttcctgactcttatctccactcagtgacctttgagatccatcttatgaggtggggaaaagatattttattaggttttcagttaaaggctgtttattttagtgtcagtattttatctcctcctttgggtcttattgttacatcaccttcattaacattgatcacatttttcattcattagtactctacttggttgcgtatcctgacgtttttcctttaagtcattctccctgtgcccatgtttaccatgtaatgcttgagatgtacaaaattatatgtaacaatgacacaataaaatgaacacccatgagagcagtacccaacttaagaactagaacattgccagtctattgagcctgccattgtgctcctcgccaatgcatccggagctcctcaccagaggcaaccactgccctctcttccccataacactaattcctgtttttctactccagccccaaatgaaggaaaaaactgaagacctaaaaaatccaaatgttggctcacacctttaatcccagcactttgggaggctgaggtgggcggatcacttagagtcaggagttcaagaccagcctggccaacatggcgaaaccccgtctctactaaaaatacaaaaaaattggccaggcgcggtggctcatgcttgtaatcccagcactttgggaggccaaggtgggcagatcatgaggtcaggagttcgagaccagcctggccaacgtagtgaaaccccgtctctactaaagatatcaaaaaaaaaaaaaaaaagaattagccaggtgtggtggcacatgcctgtaatctcagctactcgggaggctgaggcaggagaaccgcttgaaccccagaggcggag

SEQ ID NO: 915578 - DNA, 4001 bp, Homo sapiens
catcgatgatgcggcagggaaaggaggaagagaggaggaaggggagaagtctccttcaggttcccgtaggaccagtctaagccctcagtccctctcctgggaaggggtggctgatgtgctccagagacccccagtgaacacaggtgcaggaaaggaaataggaaagcctctgtctgaagcatgatggcttcaggccagctccctgggcctcggggctcagcatctgcagagccacgagaggcagtggggacggctgtgagctggcaggcacccgggacgctggcgaagccaccataaccgagtgcagaattctagcctcgggcgctgggaagcctccccacacctcagttgcagatgaaaactttggcttttgcattttaagagcttattttcttttagctctttaaagtgcagccacttctgagcaactcaagtgcaaaaataacagaaatctgaaatgtattcagaagcatttaagaaatggagtgcaagcccagttttccaacccctcaagtcatttaaaaatgtagaaatgagctgggctttcaagatagcaaggatattcccttaagaccccaaagcaaggctgaggaatttgtcagccaaagacgacatctctagagaagagcatctgagggttcgtgaagagaggggcttgcgcatctctccctccccttccttcgcccagggcaagtgggacaccttacctccatcttatgaactggattcgtgttctctcctctaggacctcttggctctggtttgccaacaaatcagacttagagaggtggtgcttcacctgggaaatccagagggtccatgtgattcctgcccagtgtggcccccaactgggctggcacagagcccagacgagcacctcacccttgcccagaatcatttacggtgcacctcccacctctcccctctccctcaccgctactcccaggcaaggtctcaaactctcatttaccacatctctggtcacgtggatgtcctggccatgggtgggaggggagtcagtggacatcttctcccttacaccctgggaagggtggttgatggacagcttttcctttatgccccgagaagcctcttcttctgtctgaaaggtgagaaattccctctgaaaatgtcactctgcatccaaccctgggtcttcttctcctcttcctttccttttattcattctccatcacaactcacacaccacatattcacacacatacactccttacctcactgttcccacaataagctacttccctgtaaagtcctcagaactccctaagtccctggccctatcccaaggtgttcctgagacacccttgagctgggaaggatgcagctgaaacccttaagccaggatgcttgagaagcaggacggcgttagtggtggtgctaacacatttcctgccaggacacaagccacagtgtcctccagcacatgtgaagaaattagactcaaatctaggaagggtgtctggcaatgaacttgagttccagttccatgaagaaggaagtccagatccccacacccactgagaccacttctctagcattttggatatcctgagtcataaagaaatcttactcacttttttcaaccaatgatgtagtacagacacagcctcactttccacaacgtcaatgtcctggaacaaattggcaagttggtgacctcagaaaacctagaaattcagctcttcccacccagcccccgcaactgttactcaaatttatttgtaagatctctatgaagtgcagcagggtcccacagggggagaagatatatgaaaaattattccatgtgactaccaccaagctgcttaccgaactggttattggtaggaagggaagccctacacctttccgagcaagaatatacacaatccatgtcgtaattatcatctttgaatgtataccaggcccccttcttggctccctccttccattgaagctgcctgagaactcctatgggacaggaaggtcattgaagggaggtgtccacctgattggctgacccatggtgatgtgacaatggcctccctttgaaaatgatgtatgtgagtataaatgccgttgccaagagcccctgcatttcaggctctgggtgcactcctatgagttaccctgcttcaaggagcagaaccattgaataaaagattgctgtctaacaccattggctgacccttgaattcttttcttgggaaagcactaatttgggagctcacctccaggcaggaggatggggtctggagccaggaaacctaaggccgatttacactgacttcctagaactaaatcaaaaggaaaaccccaactttccgtgcccaagtaacaaaaagaccagaggctacgccctttgcaaccctctccttttctgcatggcagatgaaaaactgaaagtatctctgattgctcccctcccacaatcaggctggttgtgggccaggtcttcatttgcatagagatataactttataacttcacttcagcctctgattggtcactttccgcaaccaatcagactgatcatgagccactacttcatttacatagggtatataccaagtaaccaatgggaaacccctagagggtatttaaaccccagaaaattctgtaaccagtctgctcccatcctgtggagtgtacttttattttcgttaaatctctgcctttgttacttcattctttccttcgtttgtgtgttttgtccatttctttgtttaagacgccaagaacctgaacaccctccaccagtaacaacctgtcccgcaacaacttgtcatgtgctcttgacctaatcattagtccctctggtctgagtttctttgtcttatactgaaagggatagagttgtgtccctagctttcttctaactctaatattccaaaaattttcccacgtttattcttctcaggattatagaaaaccttttatcactttctccaattcccctgatacagccactacacgtcttccctctcaacaattcgcctcaattttatatcatccctgacatagtcagaatcggctaggctctgctgaggactgaggcaacaaaccaacctccaaatcaaaatgtttatttctcactctcaaaagctctcgtgcaagttgggtaatttcagagcaattgtgtgccatgtggagactcacaggtccacattcagaggacacgacctccatgactgccaaagcagggaagagagcacagagaggaatcaggtcagtgttccacctttcagctcagaggctcctacttagagcttttgatctagaactagtcctatggcccctacctaattccaaggaagactggaaattgtaaaatagcagatgaaattacctgtcaacatctctgtttctacagctatcccctaaaatttatgttttcatccttattgatgtaattttatttttgaatatttaaaatattaatgtgattcagaaatcaaaacatgaacagatacattcaaggacgttccatctcttccccataccttcaaccttgttctaactcacttcagaagtaaaattttcattagtttctcgacgacatatcctgtgcttatgttgtcaaaatgaagctcatacataaatctatttgctttttgattacaatgttataaaatgcatacagtaaaatgtacaaatatgcatacagcggagaaaaatttttacacacacacacatacacacacacacacacacacacacacacttacttgtttaaccactgcccagatcaagatagaaaacatttttagtaggacatttgtattatatttgatttgatgctgtttaaaatcatgctgctatgaaaatttttatactgtacctatcttttggttgacataagcactaaatcttctgagtatataccaaggattagagttgctaggtcatagactttagatatgtgtagcattcatatacaccaaacagtactgcaaaggggttgtattaatctactgcccataagcaatgtatgaaagtga

SEQ ID NO: 915579 - DNA, 4001 bp, Homo sapiens
gagattccaaaattccaaatgaagaaaggttaagtgacttgccaatcttcatactgttagcaagtagcagaaatacttcaaagctgaaatcttatgatccccacatccgggttctttcaataacacaatggtgccatatacactattccataataatagtattctatactgccttagcagaatgcccatacttaatgtttgctgatgatgatccaagtgcaaggaagagcaagagcagttagtggggcaggtaagcacaggctatgaggtgcttacctagcaagagggaaggatttgtgtacacaaatgaccatcaattccccatactctcacatgtcttgaagcaatttaccatcccaacctccagaatatgtttctgtatcttaaggtttgagtgtgaggccaggtgcatggtgacttatgcctgtaatcccagcactttggggagccaaggtgggaggatctcttgaggcccaggaatttgagaccagccagggcaacacagtaagaccctgactctacagaaaagttaaaagcaaaaaaattagtcaggcatagtggtgcacatttgcagtcccagctactcaggaagctggggtgggaagatcacctaagcttaagagttcaaggccgcagtgagctaagatccattctgggcaatggagcgtgacccctctcacaagagaagagtgtgagaaccatgtctttcaaaaccaatgacactcaaaaagacaagtaaaaagacctggatcttaacccctcaacataatcatgttttcatttcttaagcacctaccatgtgttatgcacagggaagtctgaaagctgttttcaattatattcaaaaattctgcttactatattaaagacaccatgcttaacaattctcatcaaaccagcccagggccctacaatgagagaactggaagggaatttagagttaagtccctcattttaaggctaaatctctcactttgcagatgagaaaacagatatagagagagcaagcatatttcaaggtcacaaagctaattagaggcaaaatcaacaccaggacgttgttctccgtgcaactgtttcttccaagatgctgtgcaaagagcaagaaaggccaacccagggacagttttcctttttttcttttcttttaaacccttgttgctaggactgcagttaaaaaaaatttttttggatgagcagagggaggaaaggggcaagcgtgagcgggcagcagtgcacttggtagcaaagagggaggtggagggaagagaggagagggcggggaaaaacaacaggaaaaaaagaaaaatcttaaaggcttcttgtcagcccagtagaacagtcaatactcaaatattttcagtattcgcctatcatgataaaacgcctaaaaacttcagtaagcaaaaggacaagaagcactttggaatctgtagcagcacgcaagggtgatggtggtagagagtttgggggatactgattctttaatctttgggcttcggttttccgtgtctgtgaaatgggcactgacaacagtgcacccagccccccaggagaaaagagatggacacgattaaatataggaaaaatcaaattaccgaaaaaggtgtggcgaccaggaccagaacacttgcgagaaaagaagaagttctaaagaggaccgggtccaggtttgaagtgtgatgagggcaagggcaggctccaagcgtgcgtagggttgtgatagtggtcacacaagggctcccctcaaaaggccgtagaaaataagggagaccgggatgggaaggttggctcgccgcctcccaggcctccccaggattcaactgttcccaagaaccggctcctcaccttatccaacaagccgctacggccacttcctgtcccgcagttggaagcaccaccagccccactacagcctccgctaccaccgcttctcccgccctgtacagctgccgccgccatcttgtccgcctctgcgtctccctcccctccgacttgtctgaagccgattggctggagctgacagcgtgacgcgccgcgcggagtcaatcgggatccgtagtttgggtcttgctggcgcgaggtagtcagaggacgtggccgcggggcttgctgggacttgaggttagacgtcccggccgtcggttgccgcctacactgtctgccgtcgcgtcgcagttactaaggcgtggggaagatagcggcaggcaccgcagtggagcggctccgagatccccggggggctcgcaggcgcgcatccctcctgactgggacgtcgcctccgcagacccctcggaggctgaagcgacgccggaggcaggtgcgactgaaacttagttttcgaattcgagtctttctccggcccaggtgtggagtttccaaaggagtgggcaggagcttgtccttcatccttttctagcccggttgtggcacttaccgattattctctcaagcagctgtcattttagctgtttgtaatgttttcgtgttaacggagaactcgcgtttactgagtgcctacagtctgccaggcagtatcctatgtgcacttccagccatcctctctctcactgagtcccacaacagccctgttagatgaggaggaaactaaagaacctacccaaagccagatagcatgtatctgaactcggttttcaagccggcatttaaaaaaaatcaaaaccaatatatatcccttctgacactctgcttttacggttttaggatgtaatagtattctagattttaattatttttttcacaaatgtatattgagcaccaatattgtactaacggatacaggggatcaagatagacctggttgctactctggtggactactactccatgacagagttatcaaatagcagtattgtattataccatgctctattacgttgtattttaattaatttttttcacaaatgtatattgagcaccaatattgtactaacggatacaggggatcaagatagacctggttgctactctggtggaactactactccatgacagagttatcaaatagcagtattgtattataccatgctctattacgttgtattgttttttaattcctatatatcccccataagcgtctaaagaattaaacaaatatttttgagtttcttactatgtaacaggcactattctagtcaccagggatatatccctgaataaaacagacaaaaacttgtcttggggaagccaaaattcatgtgaaaataattatctcggccgggcgtgggggctcatggttgtaatccccgccaaggcaggcggatcacctgaggtcaggagttaaagaccagcctggccaacatggtgaaaccccgtctctactaaaaatacaaaaatgagccgggcgtggtagcgggcacctgtaatcccagctacttgggaggctgaggcaggagaattgcttgaaccggggaggcggaggttgcagtgagccgagatcagaaagaaaagaaaataattatcactaaataactaaattattactaaaaagaaaataaatatcactaaatagcaataacatcagatgatatttcattacctctgtgaagcaatccgtggacactagtcagatcccctgtagcttgttgttgcagtttatcttttacaacttctcatttttcttttatttaaaataaagtgagatgatacagcattgccctagtcactttttattttattttttattttttgagacagagtctcactctgtcacccaggctggagtgcagtggtgggatcttggctcactgcaacctctgcctcctgggttcaagcagttcttgtgcctcagcctcccaagctgtagtctttgtagctgggactacaggcacatgccaccacacctggctaatttttatatttttagtagagacaggatttcgccgtgttggacagcctagtcttgaactcatgacctcaagtgatccgtctgcttcggcctcccaaagtgctgggattacaggcatgaaccaccacaccag

SEQ ID NO: 915580 - DNA, 4001 bp, Homo sapiens
cagatcggggtggggggttagttattctctgaggaggaggggcttgcacccaggttcatttgcacccagggaggttttgctgcagggaaagaaagtcagtaaaatggtgggaagtggtgtgcaaagatgagggggtaaggatggaaggtgagtggctctccctaccagaccagggcactcaattcccaccaactcaacctgaccctcaagagacccccagcctgtactccctcaccttatctgaaatctggaagcaggggtctttggagaggaattcctggacaaaactgtcctctgagggtagagaagacatgacaggacgcaggttaccaccacctccatggagaagagtggcatcagaagctccaaagcccaagccaccactgaaccctctctctctttctctttttctccctttttctctttctctctctctttcttaatataaatagaaatggagtctcactatgttgaccaggctggtcttgaactcctggcctgaagtgatactcccatttcagcctcccaaaatgttgggattataggtatgactcacggtgcctggccctgaatccagtttctgagaggacacccctcccacctgcctaagctgggatacctgagagggagagggtcagaggtctcagatgtctgtacaggcaggtgagaccccacacttcacatctgctttcacacttgacctcacggcccctcccgtgccagccctccaaactcacccagaaggctgaggaaggcctggacctcctggtgctggcgaaaacggaggaacccattgcccccaccttgccggctgcagccccccagctctacctgggtggtaactacaggggaagtggtggggtcttgggagtcactcatctcataggagatggagatggggcagggtgacctgtagagaaaggaggctcaggacttagcatgtacccccgtgatgctcacaaatcaagagggtggtgacaggggccaggacggtggaggggtgggtgcagagacttgggggctcagaacagaaggcagccgggatgcaacaagagtggggaggccagaaaagaagcaaagagttgctataggtgagggtgtggcaccctcaccctcctcctggcaccccaggacaggccagagtaacagcagcaacaagcaccgctgagggcttcctaagtgcctggggctgtgcttaagggccttatcttattccatcctggtaaggaggtaagtttaactcagaccggtcgtcaaacgaggaaactgaagctgaggcctaacagccggttaaaagtgaagcccttggtctccaaaaccccaagaggttttttggtttttgtttgtttgttttgagacacagtctctctctgtcgcccagactggagtgcagtggcgcgatctcggctcactgcaacctccgcctcccgggttcaactgattctccagcctgagcctcccgagtagctgggattacaggcatgcgccatgccaccacgcccggctaattttttttgtatttttttggtagagacagggtttcaccgtgttggccaggctggtctcacactcctgacctcccaaagtgctgggattgcaggcgtgagccactgcgcctggccaaaaaaaaagaaaaaaaaaacccaagagtttaactgctcctctaggccccaactcacaaccacccccgacccctcaccaaagcagagttgaaagggccactgatcccttacaccgaggggaaactgaggccctcagggaggaatgaaattagaaaaatacctggatttagagcaagttgatggggccacttcaaacatttcaagctcccgtcctaaacccaccctcatccctgagagagagaagccaaccacggggccgaggagaacgtgcggtcgaccaccccagggccaatctgggcccctccatctaggcgcccgcaagcaacccagcctcctcctgcagcgagccttacccgagctcaggaatggcccagagcataacaccaacgccgccgcgagtgcgcttatatagcctgagggcggccctgcccaaagcagcccgtccaccaatcagggccttcctggggggcgaggcttggccttcaccgcctgcctctctgccagtgagtccagtcggcacccagctgtggctccccagggtttgaaagcctctccaaagcttcatcaactacaagaggggtgaaggcaggccagctggaccccagggcctaaggccccataggacaggcagggagctaggatccctgttcccctcttgacaaatgcagcgccaaggtgctgagccgggatatgagacccggactgcgagggcctggtgggcgagttttttttcattgattgtgccttgctagggcagggtctctggctctctatgggtgtctctgaatctcctggcctccttgagtctctaggtttcactgaggccccccgagtctctcttttgtttcttattttatttttcccctcgtaacacagaacaagctgcctgggtctcagtgggcctctgagtctctcagtttcttgttgcctctggtgtctggatgtctgtggatctctgggtcctttgttttctctctgatctctggtctctggtgtatctgctgtttcatggtctcccccaggccgcctcccaggctccctgaggccgtgaaggcctttctagaccagctggtctgcatcaggccatcctgtttgtgtgtgtgcacgcatttgaagtcggcctcccctagaaaggaagtagtgagtggggcagcatccatagcccgttcactaaacacctactgctgcctactgaggagtctgtgatggaatcagctcacgtgttcctcacagcaagcccgtgaagttgatgagaatgatgagaagcctcattttgtcagcgaacaaacaactaacacacagagtttgggttgctgaccgacaggctgagtaacttcctgccagccactcagctggtaagtagagatagagttccagcctggctgctgggcccacacgctgggtagcctggctgtgtggtctacagctgttcctggacgctgcctgcacagagaaggtgttccatgaaaccgaatgaatctcctagaccagctgtgttttcaactgttctcctcctcccccagtaattaaggttagagatcaggaaggtgtaccaaaaagaagcctgggagtgggctagtcactttaactttgggagggccttcaggctgatttccttcagtgccacccctggagatctgacaccgatctcccacactggggagaatatttgtttttactttttttttttttttttttgagacggagtctcgctgtgttgcccaggccggagtgcagtggcccaatcccggctccctgcaacttccacctccagggctcaagcaattctcctgcctcagcctcccgagtagctgggactacaggcatgtgccgccatgcctggcaatttttttgttttgttttgttctcctgacctcatgatccacccgccttggcctcccagaatgctgggattacaggcatgagccaccatgcccagcctttctctttcacttttcagaatcccatgattcactgggctcttcaatctgcccagataatctccccatctcaagatccttaacttggctgggagaggtggcttacccctgtaatcccagcattgtgggaggcagaggagagcagatcacctgaggtcaggagttcaagaccagcctggtaaacatggcaaaacccctcctctactaaaaatacaaaaattagcggggcatggtggtgcatgcctgtaatcctaactactcgggaggctgaggcaggagaattgcttgagccctgggggtggaggttgcagtgagctgagatcatgccattgcactccagtctgggcaacagagcaagacttggtctcaaaaaaagatccttaaccatctgcaaagtcttttttgccatgtgagataacatattctcaggtctgggaag

SEQ ID NO: 915581 - DNA, 4001 bp, Homo sapiens
tgcttcctcctccccctcctcactcccctctgtcctccttttcttccccctcttccctgtcctccttctttcctcccaccttcctccctcctccctgtcctcctccccctactggcacagacacagggccgtgcacacccaggagccttcccaacagtcatcaggcctccccgcccccgcagcgtgtggcccaggattgcataacagtcactgtggcccttagggctgggcttgggggaccggggctgccttgggagcccaccctaccaggagacactcagagtgaccctggagcttgcagagagggctgggggtgcctagggatggcccaaggagctctgccacccatctagctccacctggagttcagaattgagaggtcagggatcagagacagtgggcctgtggctttcttgaggcagaattggctctttctgagacaacctccgtcaccctctgcctgggccgcccacttcgtgttcccaggtgggaaggggtgtcggtgtggatgccacagcaggctggctggtcctgcctggtcctgcctgtggctggccaagtgaggaggccaggagcccagcactgagcctgcccctctgggtttccaggtagtacagcctcgctgcaggatgtcagcccggctctggtcgggttggtgtgatgtcaggcctggggtgcctcccagcctcctggggtggctctgagccagggcatagtgggggaagggagctgcctctagaccaggaaagtggattcaggtgggcagcctgccaagcccttcccggctcccctcaagcctcctcactcctgagaggtcatggggtgggaaaagggagaagggtcctttccgagggaccctggtctgacacctgcctaaggctgcaactgtcactgagagtgaggagcagtggcgatctgcccttctcttctcggggtcccctggggctcccacttcttcacccccaagacccagtccctgtccttgtcccagcctcagcccccattctcacttatcacatgctcaccccaggtcccacccagccccaatctcagtcctggccttgtcccagccctgtcccctgccgcgcctctccctgaactccagccctggggccagccctaactgcactgtctcagctccactcctggctcctttccagcaccagtccctgtctcctgtgggtacccctgtgggcccatggccctgaccctttggtcaacaatcatgtcctctgtgccaggccccagactgggcgttggggacccagagttccatcagctttggtttccaggagccccaaggccatgggccaagacttctgcccattgcctcctgccttcaaccccttcccatccaggggaccggcctcccccaagccagtccccccatctccctcctctacctctctaccaccgccttcaccatcctcagcccagcaccctccccaggagccccggcctccgcctgccacccgagccctgtctataaataactgttcaggccccaccgatcacagccccaccgtgggcctggcctcagcccgccagggcatgctccgaggaagccaatggccccctcgctgggtctcaggccaggagttccagggaggaaaccctgacttcccactgatagcaagccaggagggcagtgggtgggctggcgggttcgtgggcaggcaggcaggcgtccgagggccacgggttgggctggtggaggagtcccggtactcacaggggggacgaggggaaacccttccattttgcacgcctgtaacatccagccgggctccgagtcggtcagatcccctgcctcggtgggggccaatgcagagcccctcaggatggggtgccccgtcaggggctggacggtcgtggggcgggtgcagggctcaggcctgccccctgagctacaggagccctgggtgagccccctcccttgacattgcagggccagcacaagttcctgattttatcgaagggcctgccgctgggagatagtccccttggggtgacatcaccgccccaacccgtttgcataaatctcttgcgctacatacaggaagtctctggccggctggggcaggtggtgctcaaagggctggcctgggaagccatggggtccaggccccctgcccagaggaagctgggactgagagggatgactttgggggctaagctggggagggaggatgggagggagaacgtgtagctctgccacaccactgggaggcttttgctctaacccaacaaatgcctgcttcttttgagatccctatgtagccaacagtcacctcattggggtcagagctggaaggggtggcctcttggggcctccactttctggagtcagccttcctgggtgagggctctgatctagcaggctatcaggcctggctcttcctgtggccctgcacccccactgcctaggctatccctaggctgaggctgggctcaggtgtagggtcttcagcatagtgctgctttcttccttccctctgaatctgttcacatgggcttccctaccaccagaagagggtcctgggttcttataccctcccctcccagcttcttgattaccacattcaaatccctagggctctgtttccagcccaggtttctcagtttccccatcccttggcaatgcctgaatatcaatctaaccctcctggtttacaaacctttcttgcctatccaccattcatctgttttcccatgcatctatttgtctgtctatttgtccatccagctatccattcatcaagcccaccatgcattcacttatgtgtccatttatccaactgtccgtttgtttgttcattcatctgtcagtcaattcatccacccacccatctgtttatctacttgtctatctaaccatctatatgtccattaatcagcccgtccacctgctatcagtccatcagtccacaattccatctgtttatccatctatgaatctgctcatccattcatccacctgtccatccatccacccatccactcatccacccatctacccatccactcatctgtccatcaacccatccatcatccacctaccccttcattcattcatccatccatccaccagtccactcatccacccatctaccaatccacccacctaccattccacccatctattcatccacctatccatccattcacctatcagcttcggtttccaggagccccatgagaacaggcagtatttgactttctgtttctgcgttgtttcgcatatgataatgtcctccaattccatccatgttgctgcaaagacataatttcattcttttttatggctgaatagtatttcattatatatatatataaatacaatataacatgttatttattcactcacccgttgatggacacttatgttgattctgtatctttgctattatgaatagtgctgtgataaacatacaaatgcagtatctttttggtatcactcatccatccagccatccattcatccatccatccattcatccacctatccacccatctacccatctacccatttactcatccacctgtccaccaatccagctatctacccattcatccatccactcatccacctatccatccatccactcattcatccagccatccacaaatccacccatccacttatctatccatccatccattcatccatccaccaatccactcatccacttatctatccatccatccattcatccatccatccatccactcatccacacatctaccgattcactaatccacccatccaccaatccactcatctacccatccatctatccatccatccactcattcatctatctgtctatccacttatctgtccatccatgcatcttcccaatgttgagttccaggctctaagctgagcgctgggaaaacaaaaaagtattatacaagacccctgccttcagagagttcctgatcttttctggggggtggagggatgagtagaggcatttttgttttgttgttgttgttgt

SEQ ID NO: 915582 - DNA, 4001 bp, Homo sapiens
ggatcccgcggagctgcgcgccggggtcagactgttcctcgcaaagtgctcagcacgccaaggtgccaagggcaccaaggagccggctttgggtagctccgggtggagaaagtcggggacacaaacccgggaaagggggaaaagcgctccaagaagggtggcccctggctttggtctccggcgtgaccctggcgcccgctgacgctgccccagactttctcctgtgttgctcccaccgcttccgtccaaggctctctggggaactgggaaggcgaggaggaaagtacagcagctgggagcccatttgccccaccaggtgccccagtgacccgctcatccctgcttagcaccagagctgacttatgaaggggcgagggtgagaggacacgctccctggcgggagctaaggtgaggccagacaggctcgcttcccttcctggttacctgtcccccacccggagagcggctgctgctgcacggggaaacgatgtctggggagatgaccctgctgaggagcgaggtggcgggcgtggggacagagtcaggcgtcttcagatcggtgctggtcgaactgcctgtcccgcctaggaggctctcacctgcttggacacctcctccctgagctcccgaaaccccactctcagccgagcggcgtaggcgcgacatccctgggacgtggagactccgagctgccggagccaaggttccccggcctccagggagcaggcctcgggcatcggggcttctctttccatcttcatccaattccccttgcagctcggagcttaccccaagctctttgaggaccctgtccccactgggaacctgttctggaaacccaagatactctatctcgtctgggaccacgagagaataatttggggttctttccaaggaccctttcgaggagctttaggctgtccctgcccctccttcccgcaccccgggaccggttagggagaagccaaagtcccttctcctgaagggacctatccagggaagccggagtggctgtcccgcccagggccagtctttgagaatcgggtaccctctccttcagggactgagcggggaaagctggagtggctgccttgcccgggacccgaccaagagaagcctgggtcccctccagaccgatttggagaaaggcagttttacttccctcctgcagacggccgggggagaagcgagcctcccttgcagtcaggccggcgtgacgtgtggctcagttacatcctccgcctgggaaccgcgcgtcggaaacgcggggtgcctctcctggctgcggcccccgcgacggcccgggacgctggattatgatccgcgccgagctcgcgactgcaagggccgagggcagccaggacagaagggcccttgccgggctgcacccgcgccacgcgcccggagaccgcgcgccctcctccggcaccgcgaggtcggcgccctccggggaccgggtcccgctctcctaatgccacgccgggcggccacttaccgcggtagctggttcccggcttgtagaagtcggggtcgccctccacgcggaggctgaactcggtgtagccctcgcgccgcgtgccctgggcgcgcaggatacggctgcagtagccctctgacttgggcactttgtccagggtctcgtcggagaaggccagcgccgcggccaggggcagcgccagggccagcagtgccggagtccggctcagcttcaggggcgccggggacagcctcatcttcgcggcccccaactttgtgccgcggccgcaggccttcgccacgcgactcctgcccgaagtggtcccgacgaaggcgcgacctggcggaggcgcggcggagagagggagctcggagctggcgtccgcgactcggagaccgtgcccgcctcggcttggcggccgcggagctgcgctgagctgagctgagctgagccaagcgaacgagagcagcgcgaggaggggagggccgcggcgaaggagcgggaggagggagggctgattttgcccagatcccccagcgcagcgctgttttgtttcctccgaactggcgattagcggcgcggccgtgtttattttgcgacgttggattcccagggtctgacgaagaaaccgtggcataccggaccctgtgggctctgtcccatcgcctaggaggctgctgctccaacccccagctacactccggaccctctggaggacggcgctcagaggagggaaagcctgagaaataacttttgttgcacacctgctctgtgcctagcaatatgcttggcggcttacttactgtatcgactcgccttcatgttccctactcccaataaagattacattactttcgctcactttatagatgagcaaactgtgacttgcgaccagttacagcagggttagatgcggcgactccgggcccattgctcttcccaaggccatagtggaacatgtcagactggaggctgagaaaggagaaacgacttagctacagcgcttagggcccacgatacttttggagatctatgaaaatgttttctgtaaaaatcagaagaaaaaatttatgtcaaacaaaatgttttactatataatgttaatatatttgtatttatacctccacagtcataaaatatgcttgacttggaggaaagagccagcaaaggcaaaagtgcctaaggctcaggaaggtcctcctacagcccaggaaaggagtttccaaagattcaatgaagagcctgtgttttcttggcttacattttagttcagattctcactccccagggacagatgttcagagaggtgctgagcctgagggcctgaagggaaaagacctggggcaagaatctctcccagtgtctctctgggaagagacccgaatcaaacctcagtcctgccactcacccattgtgaagcttgggctagttatcgcactctccaagcttgtttcctgctctggagaacaaggaagtgggggtgggtgccagtacatccttcttagaggtagtggggtgatatgctagaagtaaatgatatgacccatataaaacactctagttggtctctagtggcgcctgctccctcacccgcttggggataccataagccccctgcctctcagtgcacacaaacatccctccccaggtgccctcagaagctttggtttcctcgtcttctctttgcccagggccttcgacacacctcaagtgcctacaattagcaagcaatctcctttgctttccaggtcagggttttctctttcataatgctacaaacaggcccagggcgctaggtgcatgggagatctccattcctccctgcctgcccacttactccttagtgcttgtgctggaattcccactgccactattaactggacgccttctctcagaggtcacctgaaagtaaccccttgctgaagccaattatgctcttctctcatccctagcccttcttgaccctagcagcacctgatccagctgatcggccctcctttttgaggtgaggctcagatccatgtctgagtgctgagggaattgtctgcatcttcactcgactggctcagagctcatgctgcactccaagttgcacggtcccattcatccagcaaactttcattaagtgtagatttggagctagactctgtgctgaccggtaggtagaagacggaacaaaaattcatccatccatccatccatgcatccttctatccatccattcattcatgacaaagaccctccacgtgctcagtgcttggatacaaaacacagatatgttacttgcctttgaggattttacaggcctgtggcaaaggcaaatattaaatacataattatatgaatcttttaaaattataattgtgatgtatgctacaaactaaaataagtggttcttgaaagtgtacctgatcttatctcagagggcaggaaactacagaaatgaataaattgtgacccctgtcttcacaaagcttattttatgtctgaaagctcaaatctgtgctcttgaacctctattcat

SEQ ID NO: 915583 - DNA, 4001 bp, Homo sapiens
gcctacacttgcccttcctcatcttcattcattcagtgtttatttgacacctactggctggagacacagtgctaggcaaatcccatgcagagctgcctcttcaggagagcccagttcagtggtggagataaacacccaatgagagcacgaggtcacacagatgtgtgcacagacatggtgacagtgctgggtggcccaagttatgtgcagccagacatggtgacagtcctgggtggcatgtgtcctatgtacacaggcatggtgagagtcctgggaggcatgtgtcctatgtacacaggcatggtgacagtcctggatggcatttgtcatgtgtgcaaacatggtgggtggcacatgttgtacacacatagacatcatgacagttctagaggctacatgaatccaaaaccagagtgccaggaacattttccccaaacatgacattctccataacccacaccttctgtcttctctgatgtatagacacactggtaggagtgtttcacagccggcctgaagacccaaccagaaggacagagaggcccaggagaaaatgagaaggggtcctgggaagctatggctgccacaagggggtcctcagactggtgctgagctggctcaaaagaatcacttggggagcttttgaaaaatcctgagttctggaccaagattctaacttattgtgtctagggaggggcttggaaacctgtatttgtaaaaaacatccctgggtgatcctgtaaaacatgtggccaggtttgggaacctcccccttggagtctctcttcttctagtggccaacccccacccccactcggagcaccacctctcggtgagagtagctgggacccctcagactgggttgggttgggctgggctgggcagccagcaggtcaatggcaatgacaagagtgggatggaggaggaagccagacggggtaggtggccttggggtgtgtgggtgagtcagccccatgccagccactggtggtgtcaggtggcagccgcactcttgttgccatgacaactcctcccccggaagacagggaggccgttggacgagtttccgctcagagcggagagcccaggccctgggctgcagggaagagtaggagccaaggcaggcagagagcacaccagggagaatgggcggctgcagaaaccagcagcagcgggtggagggaacctgcttcagggaacaggcagatgagataatgggagtaacaggtggcaggtggaaggaacaggtggagagggagcagaggggaataatagactgggaacaggtgtgggaaatgacagtggaaatcaaagaagacacaacaagggcatgacaggtaagggagaggtaggcggagaaaggagtggcaagagcgagagtgccgaaggatgaagggacatgacccgggggctgaggccagagagggaagctgttttagtcagctcagccagtccaggggccagtgaagcgtctctatgcttggggggaagagctggggaaagttctgaatggcctggagcctattcttgaggctggatgtggggaccagggaattgatagagtgctctgggtctcccacttagaaagaaaagtcagtcttcccataaagttaaagggctcttcatgacgagctgacaaagcctcctccagcatccccccacctcgaccctcctctgacctcacctgccagagccttaatgcgagacctctcaaagaggcgggccgagctgctgtcattgtcccagtccgagtcaggaaggtcccagcggttgttgatgtcactgtactggccctggatttccaagctgtcaaagtctgtgggtgacagcgtgctgctcatggtggtaggcggcttcctgctcctgcaaggagaatgtggccagtgaggggtgtccagggaccaccaagccctccactcaccaccggggccttctgtcttcttgccctacctgtgctccgctctccttgtggccagaggctgcggttggctgctcagtggaaatcagcccccaggggaagaggggaagccacctgggaagcctggggacgggaatacatcagaagcacagaaagtgaagcaggaaggcagcagcagctcagagcaatgcggtggtcaggaaaggctccaacgacttcgggccagagagggacgggtttgcggggtgaagaaaggggtgatgggcttcagtgcttcagacagcagtgtgcagcccagggtaatgcaggcagcacatatggggccccacaggcaataatgactagaaagtggcattctttccttctacaaactgttttgagcccatgatcaacccaagatggcctactataccctgtaggcaagttgagagaaaaagacccagatttgttgggcgcggtggctcacgcctgtaatcacagcactttgggaggccgaggtgggtggatcacctgaggtcagaagttcaagaccagcctgaccaacatggtgaaaccctatctctactaaaaatacaaaaaattagctgggcgtagtggcaggcgcctgtaatcccagctactcaggaggctgaagcaggattattgcttgaacctgggcgcaccttagagcgagactagtagaaaaaaaaaaagacctagattctgctcttgagttaagaaaaagttatgatacgccaggaagactgacacactgtttagcaagtgcccaggagttcaaaggaggacacagtatgcttctctccgctttgtttcctttggtttgccacagagaatgttagtaagtactcaataaatgtcggctgtgacatatccctgccattgacatgcatcacgtcaccataactccctgtggggtgagggcccactgttgtccccatttcatagatgaggaagctgcacaaaagatattaagttggctgggcgcggtgtctcacgcctgtaatcccagcactttgggaggccaaggcgggcggatcacaaggtcaggagatcgagaccatccctggctaacacggtgaaaccccgtctctactaaaaaatacaaaaaattagctgggtgtggtggtgggtgcctgtagtcccagctactcgggaggctgaggcaggagaatggcgtgaacccaggaggcggagcttgcagtgagccgagatctcgccattgcactccagcctgggcggcagaatgagactctgtctcaaaaaaaaaaaaaaaaaaaaaaaagacattaagttggctgggggcattggctcacacctgtaatcccagcacttttaggaggccaaggcgggtggctcacctgaggtcaggagtttgagaccagcctggccaacatggtaaaactccatctctactaaaaatacaaaattagctgggcgtggtagcacacgactgtagtcctagctaccggggaggctgagacaggagaatcacttgaaaccaggaggtggaggctgcagtgagctgagattgcaccactgcactccagcctgcgagagagagtgagattctgcctcaaaaaaaaaaaaaaaaaaaaaagacattaagttactggttcaaggtcacgcagccggaagaaacagtgccgggttttgaaaagttctttctgactctgggggacacgctcttaatcgcagcctcttgaacatagaacatacacaggttcctcaaccgtcttagaggctcatcccagacggatgagcagccgtggctcctgcctagggcccaggctggggaaatgtggaccagcactacttacggctctaacttacgcaaacacactctgtcctcaaaactaaaaaatgaggttcagaatatctgctggggataaaaaaaaaaaaacctctactgtccaaagttcttgtgtaatttagcattcagcagcattcaagagaggaggaggggactgggtctgtaactttaacaaaacccccaattttgcatttctcctagccctacttcctaggaccagggctgtagtctcggtagtctcgggttctggaaggaaggaggtctggagaatag

SEQ ID NO: 915584 - DNA, 4001 bp, Homo sapiens
aagtagctgggattacaggcgcacaccaccatgcccggctaatttttgtatttttagtagagatggggtttcatcatatttgtcaggctggtctcaaactcctgacttcaggtgattctcccgcctaggcctcccaaagtgctgggattacaggcctgagccattgcgcccatctattaaattttaaattacttttttcccctttttgattcttctgttattccaatcatagataatgcatatattatgacatatacacatattttgaaattttctgctttaggattatctgtctgcttttctcccagcagctactggctttcagaataagaaatgacttagttctgattcttccacagaacagtactgggcatcaaagctagtactatctttgacctttactgaaattcaataagatctagaatgaaatacagaccaaattatgcaaagatgaatggttactagacccaatattgattcatctggaaaatttacagatgcttctagaaagtaaatctgttgatctgggtttcaaaggtttgagtctataccttcaacatgcaaagcttatgactcacggcttagaggaatggttattcagagttcttgggataagggatggctgtgtgtgtgtatatatacatatatttataaacataaatatagacctttttcagatcaatattttcaaagggataaaagaatgaactagcctcagaagacaaaaaaaagctgcagaagagaaaaaaacgaatattgcaatatacgaatatctaggaaatgcagagcacttcgtcggagctcaataaattctagctgaattgactttgagagccgttttagttctatacctcactgctcaaaccgcaggcatcaccatgcaacttatcggtttacagctgtgctgtgggtaccatctgaaaatctggaaatgattagcttatgcaaaacagccataacccccagaaaccaggcgctctccaccactttaccatttaagtcttacaccgctcttgcgactgtaagcgaactgacaaacatctactgaccaaatgggacctagattttaaacaaagactgaaatctggaaggctacaagtaaacagaagctgaaactagctcacctattctgttggccaaggatttcgtggaatctgctaaacttctcttcccaaaagatgatacctatcccctgggaggtgataatttaatcacctcggtggctgagtgggtggggccgagtcagagaattctttcaagaaatcgctaaacgtttgacttgaagatcgatgagaagccagccaaaaagctatcaagccaaggaccccaaaccccctaactcccttacatacatatttccttcccaatctctaggctgaagtttatgtggaagccaaaaactaccagcgctagaatccacagcgtgccaggcacagctcactcacggctttcacgcaattctagctacaacacccaaaccgcaaagtccctgttgcaggggtaaataagccggcgaaacccattcacaggaaggctcccgcgtctcgtcccaagctcttttctcccgagttcccaagagtataaacccaagaaaaggaaataaggcgtccgggtctttcctctcccggagccgataggcggctgcccagaagttccatgggccacacacattccgaacttggaagactagggtcccctacattgatgccccagctgctacttaccggcacattgttgacaccttgtcccttggaagctatcatgagaatttctctgaagtccatgttgggccgaggcgggagagactgggccaggcactcggaaaggactgacagcgcacctaaccgaggcgcccagctacagccaactgcactgcctcgggagccccactcccaccccgcctctgcgggaccacttccggcgccttcctatgccgtctgcccgcccccttccctccacggcctatatcctttcagggccgccacagcgctcgcgagtccctgcgtaacttccgcttttaggccgagacacgtacaaacgtgatacgtggctgctggcgtcgacccgaggggcagggactaggcattttagcaaccaagggggtgtggctaagcgagagagcggcttccctggtggcccgggcgcgcggtcttgtcatcttgttgctccttgtgagcgctgggtagagaaagtgagggggtagagggtttacttgccaggcctgggttctctgggtgtcacgggtaggcgcttagatccaaaacggcggcgccacaacagctgaacagacggatctcgagccggggtttgggctacttgtgtctaggcgctcgcgaagctgcgcaggcgcacacagcagcgccgtggtcctgtcttggatgcccattactcatcaaattcggccacatgccgtgcgcttacctcctactcagatgcacgcgtgccggggatgggggcacgcgcttacttcttttgccccgtttagaaagtaagttttatgtggagcagccaacctgtgtttttgctcaggcaatggattaaggaatttcacatacagacccagccttgacataactttggtgtactgatgaacatatgcttcatattcatattcattgggatcctagtcctgacttcttttggagagttatcttggatctgtaaggtcatttcgacttagcaaaaacactgaaaataattaggcaaacctgggtctgcaagtgggaacccgccaggggattgatagcaaacaggtactcgggatcttttcggtgggatggaaatgcctccaaactggattgtggggatggttgcactatacatgtactaaaaatcgtacacttaagacgggtgagaatgatacagtatgtaaatatgtcaagctgttaaaacatgctagacaggccgagcgcggtggctcacgcctgtaatcccagcactttgggaggccgaggcgggcggatcacgaggtcaggagatcgagaccatcccggctaaaacggtgaaaccccgtctctactaaaaatacaaaaaattagccgggcgtagtggcgggcgcctgtagtcccagctacttgggaggctgaggcaggagaatggcgtgaacccgggaggcggagcttgcagtgagccgagatcccgccactgcactccagcctgggcgacagagcgagactccgtctcaaaaaaaaaaaacaaaaaacatgctagacaaagctgctggctcttactctttgatggtttaatgctgcgaacgtaattcaaaatcaaagctgttggaactttaagttattttgcgccttaaaagaatgttattatggaacctgagctacataacaggcagctgcgtttgttcctctgattatagattagcctttctttcctacatcgttttgtgaaaacacagggagaagacagccatgtacaaaccaaggagagagacctcaaggtaaccacaccttgatcatggaattctagccaccagaattgttaagacaataaatgtctgttgtttaggccacctagtctgtggtactttgttattggcagccctagcaaacgaatacactggcatatggtgttttcaattaatgccaaccatcatttctcaaggaagctcttcctgagctatctcagggccccttttataaattcttacagccccccagtatttcccttcatgcaacattttacagtttgtaattacatatttgttcttttttttttttaaactattggctatatctgtgatagacagagctatgaaaatgggcataagcctattttacccatcactatttccatcaccagcacagttccctgctaatgcacataaaagttgcaacaaagattttttgaccaaattaatgaatcgataagtggaaagctcccaagattcaatattgtagtacttagcatacattgagccattactatatgcttagtgcttgacatggattatctgacttgatcatgagtgttgtataaggcatttcctgtta

SEQ ID NO: 915585 - DNA, 4001 bp, Homo sapiens
ctaaaagtcttccaaattgttcaaaggaaatttggaccaaacatcttggagttcataaggcctggggattataggatggtgaccatttgagtgagaagcaggtaagcaatgacaaaaggaaggaccacctcagtccttagcaccgtgttaacacctttcatgtcccagtatatccaaagaactcaaacttgccttccttcttggcccccttttttttgctattctttgctttttccttgggcttttccccccgtgtctcaatcatggacctcacaggtttcttggccttttcagaatcttcaaatttcttcatggtagtgggagcacggatcttactgctctcctctgcttcactaaacaaaaaggagaatggtttatctttctaccccatgcagaaggaaaaataacggtccagagaaaggactctcacacccaagaggacaatgagaactgggtagcaaattaggaatgtctttgaacacatcaatttaccacctttgaaccaccttcagagaggtcatcaaatcatggaaataaattgattttagagaaggcaggtctctcaccgaaggagccgcaggaagtcattttggaaatcaaaagtgccatttaataaacttaaagcactttgctgttggatctctgtgcggtacttgtcccgaaacagccgatgcacgtcatctatcaatttgtctacatatgtcagtgtcaggatcttctgaaaaccaacctgtttaggggaagaaacagccaacagatctgcttacatactagcctagaatggagggacgccaactcaaccctggctttcagagataggttcagctacctggccggtttccctgtcctgagaggcagccaagctccctgcctgggcccagtagctgctgttttcccccatctacctttctagttttttcagttacgtcatcatatacactggctgcaattaatcagagttctcttaaaaatcagggctatgttaacaatgcaatcgtccctctacaacaccccacttaccacaaacaccagctcaaactggttgtccagtttatacttgagtgtgagtgcctcatgggtgaaggagttgttacctccccgttcctggagaaagagtatgtctcagtgttcagactatccccagaaaacccaggtttgggccctgggtttggataacctttgggaaagagccaaacatttcccccaaactcaaatctgtccccaggacaagaggatgttggggcacttctctctggcattccaccagaaataagataaccaagttgggggaaaaagatgagagagagagcaagacacatgggagccaaaagggaagtagtcatgtaaacaatcagattactagcagctatacaccatttagttttgtaaaggtgttttcccatctgttatttcacctaggctcgaaacaacaaaaccaagctgctggggataaatagagggagcggaggagaatcccaaaggcgccggaattcggctagagttgagacaccagaggcgggggccgtcattaagttgcggggtagtctgaaggggacgagaaaacgaagcggagtccgggttacgcgtgagtggtcagtgtgaggtgggcggggagggtgggaggaggcgcggaatagagtcgaaggggaccatggatcgggtcaggaaagaagagcctggagttctgatcccacggggacggtacctgcagcagcacggaacgaatcaacgcgttaacgggtccggtgcatgagtcgctaacgccctggaagcaccagagcacaagcccgcccttggagaaaatggtgaagaagtcgagcatggcggcagcggcagaggagctggggccggcgccgggaattcaggccgcgttcgccgccgcttcctgctgcgccaagcgcgggacacgtcacaccagtggccccggaaatcggctcaaccgtacttccgctcagaacgccgggtgccctccccatctccgcccgggggcgcgcaggactgacgtatcgcaaggccagccaatggcgggtgggagcgggcctgggtggggctccaggagaggtcacggggagacggccacctagagcattgggcggggcagagccctgagggccgctggccaattggcgcgctcgtctgaatggcgtttggcgcggagcagtgacggctgcgataatagcgaggcagcagtgcagctttcagagggtccgggctcagaggggttatgattcggagggttctgccgcacggcatgggccggggcctcttgacccggaggccaggcacgcgcagaggaggcttttctctgggtaaagttgaggacgacagagggtattgtggttctgggttgtccccaacctccgactgtgtgtccttcaggacccgaaaccatggcccacactggcaggacagtgggtcggcttggggaagggggttagcttacctaccagagcttgtaggggctgtgcaggtgtatggctcccaaggcggcccttttcaggtggcaggtctcacatcattctccatttaagcttacagtcagactgattgataatcggtggcacagatgtgcattaagtcctgcccgtgttcaggatgctgtacttagtgctgttgcggtaaaggagtgaagagaagacgggattcagtgaatgttctggaaaatggctagagtgtacctagagagggaaaatttcaatagacagtaggccagttcaagactggatagaggccgggcgcggggcctgtaatcctagcactttgggaggtcgaggcgggtggatcacctgagctcaagagttcgagagcaacctgaccaacatggtgaaacaccgtctctactaaaaatacaaaaattagctaggtgtggtggtgggctcctgtaatcccaggtactcgggaggctgaggcaggagaatcgcttgaacccggaaggcgaaggttgcaatgagccgagatcatgccattgcactccagcctgggcgacttagcgaaactccgtctcaaaaaaaaaaaaaaaaaaaaaaagattagctagaactcaacttaatgctttgcactgctagctagtataacggtagaagtacatggagcaggtgggaactgagatcagccttggaggatgtttactggcttaagaaaggtgtgtgttccagtctctaaataactgagtgcagactaggagaaaaatattgttcttatgcaaggaactggcaaaagccatctagatagacggtgtgagtagtagcatgaaatgtagtgtggacaggtaagctaaggccagaccaaagaaagattccagtgctgctgagaagagtttgagtgaggtatgaaatggcaaaaggattcatttatttaagatacttactgagcacttagaatatgccgggtgttgcgataggctggagattcagtggtgaaggtaaacacagcctcccccctcatggattttagagtatgtaacaatacaaactgcagttgtgtccaagagatcatgtagagtttgacctggtctgggggtcaggaaaggctttcccaagcaaggaattaactaggcaaggaagtggacacagtttaaaagcagagagcatatgtaggttccctgtggtgggaggaaataaggtgccatcaaggaactaaagggcctggagtgtaggggaggataagatgaacagaagccagattgtgcagtatcttacaggctgtgtttaagtctttggactttggttcttagagtaatggaaaactcattggagggttttaagcaagagggtttgtgattaaatttgtgttttgaaaagatatttctagctatattgtaaacatgttcacagcagggggtaggatggaagcggggaatcagtgggaacagttaggatgcttttgcatttgtccagttgagagatgatagtggcttggcctaggatgatggtggcagaggaagaaaggggacagattgaggagttacttggaagccggagcccgcagaacttgattatgga

SEQ ID NO: 915586 - DNA, 4001 bp, Homo sapiens
tagatgtgctcactgcatgctccattatttatctgcaaggcctgggtgactggaagtgcagttgacaggcattttaataaactggacagccatttgttcttcaggacaaggcgtgttttccccaggagcaatcagaagaaaacaggaagcagctcagcactctgcactgcaacaggccaccttaatagctaaccagcatcactcaactgctacgcagccgggcctggtgcacaaaaacacaaaagagattagacctgtgtttgctaaaaccccagtcctttcacatgaaaaatctttatacaaatttgggtcacactaccttttagacctggaggtaaataaaattatccatattaatttacaccaccttttgtaggtttttaaggaatgaaggcaatgttgaagcatgtcttgacagcgttaggctgtgtgtaatggctgcacacgtttccttaaaagtcaggaggccacaaattaggttaccaatctgttcatttcaaaccaaaacagtcatcactatagaaataaaaataaatttttgcctcaaatatccaaacccaataacgtaatcttaggtcgttcacctcctaagttacaataaaatgtgaataacaacaaaacggcacatagaatgaattttgccacctgatgcaaagcttcaaactggcaaaaaggtagaaaagtgtgacacaaccttttcaataggcagcctcttcttccagggacgttgcttccatagactgagtatgtgatccttttcccccaagtcctccatcacgttgcttcctgatgcatcattttcttaagaggacatctgtccttcctcttcaggagacttggggggcctcttggatcgcgaccttgacttggatttcctcttggatacccggggaggactcctggtcatagatgaagacctggaccgcgagcgagacctggagaccgaggaggacttggatcgtcgcgcagagctcgatttggaggttgatgcagagcgagagctagtggaggacccagacttcgagtgagaccggctgctgtgatatcggctgtagcgagagttactgtaaccagatgagctgtagtgagatccgccgtagcgagattccctgtagcgagatctgctgtagggagagcggctgtagcgcgaccggctgtaaggagatcggctgtagggagaccggctatagcgagaacccctatagcgagatcggctgcgggacctggagcagctgggaccccgggatcggctgcggtgtcgccgcctggggctgcggctccgccgcccgtagctgcggctccgccgtccgtagccgccgcctctggacctgccgcgtggctctccctggcggctgcggggcaggtcccggcggccatagcgcgccacctgcacccgcagctcgcgtccgtccagctccgccccgtccatggcggcctcggcgtcttgggcgtcgcgccggtcgtgaaagcggacgaaagcgaagccccggggcgccttggtgtggggctcccgcgggatgtacacgtcgcccacgcgcccgtacttctcgaacacgcgcctcaagctgtcgggagaggtgcggtaggtcaggttgtccaccttgagggtgatcatgccgtccacgtcgggaggggggcggccgcagctcatggctccgagagcagcccgggcccggaaactggcgctgctctgggcgctgacggtgcgacctgcgtttctttctcgcggttgcgccccgcgtggggacgccgggaaaggccgggcggagaggcgggcggcggagctccgcagggagcgccctggagcagcaacttccgagttcccaatttcaggccaaatactccaggacccagaggaaggtttccttttggtagctgaactccaaatgaagccaggccccgaagatcctggccttgtacctgggcaacatcctaacctaatcagcgcccagctaatgtaatcactgggctggatttacattagacgtcccaccctcccatgctcctccctattattctacgttttaaaccaatcttaagaacaaagctaactgattaaaggtcaatttatgggaacaggcaatccagacaaatattaaacaaaagaaacctagggcaacaatattaatatccagtgtattgataggatcaaaggagcacatttcatagttattgaaaagaaaattcactaggaaaacattacagtgatgaacttaacgcacctaaacacataacagtgacacatagccaagactgagagttataaggtaaaactgaaaaatctgcactcatgatggaagtttgttttttccccgtaacaccgttttctcagaaatcaatagtgcagagaacaaaactagtaatgctataataatttgcacaacaaacaacaattttgatcatataacctgcaacaaccaaaaatatatagaaaacagaagaatttcccaatacaagactacaaaataaatgtcaattaaaatttaataggtcaataaattcagcacatctggacctcagtgaaataatattgaaggttaaaaataaaaaacctgaatccaatcatatttacttgaaaattaataaccacatttctaaaactttttttatgttgaagtcaagcaattagtaaaacaaaaccaaaacaaaaaataaaacattaaaataaaaatagaattacaaataaaagggacaatatgtttttttaaaaagatgattaataaaactgaaatctaacacttttaaagaaaaaaacaatctagcaatactgatgaagaaatacagtttctaaatctggaaaggaaatatacagaaagggcctagagcatcttggagtgctggaaaataaggatgtgataaatagaaaacaaacaaaagcattgatggggtaattttagaggggtacaaaaaccaataaaacagctcccaatggccaaatcttgaacaatttaaggaacaaactaaaatactactatatcatattccaaaatataaaataaatattaatctgtgctgttgtaaataaatgattaaataaattaacacattggagaaaagagagaaaactcctctgcaggagaattctaaattaattaaattaattaaaacgttgctgattttgaaaatgttatgtaaccttatatacatagaattgtgctttttatattttaatgtattttgtgttttatttccctcatctatgtgttccatgtagctgtacttgatcctgttaccttgccgtaaggcattcaatggtataaatgtttgtgctgttgatgggcacttgggttgtttccacttttggcctcttacagtgttgctcagaacatgcttggacatgtatactggagctcatgtgtcctcttaggtatgaatggatcccttgtcacagaatacaggcagcccactgtaacctctggcttcagcatcagtgaattcagccaactgtgggtagaaattattcagaaaaaaaaaacaataaaaataaatagaacataatacagtaaacaattatttacatagcattttcatcataatgtaagtaatctagagatgacttaaagtatgttggaaaatacgtataggttacatgctcataccaagccattttatatatggacttgaaaatcctcagaatcctcaggggttactaaggaccaaaccccatccacctgcagaatatcaagggacaactgtatgtgaattcaaactttaccatgcctgattgtttttcaacagtttttatcaatttacacacaggatagctgtgtatgagggtgctcagtgctcttcacttttgcaaacctttggtgaatatcagactttttagttttagccagttaggtgagggcattaagatttgttttacctgtgatttcgtccccacacaacagcctggggtgacacagtgagattttgtcacttaaaacttaaaaaaaaaaaattcatttccctaactgcaaatgagagtgagtaattttttcacgttcattggccatttg

SEQ ID NO: 915587 - DNA, 4001 bp, Homo sapiens
agggaggccgaggcaggcggatcacgaggtcaggagattgagaccaccctggctaacacggtgaaaccgcatctctactaaaaatacaaaaaaaattagccaggcatagtggcgggtgcctgtagtcccagctcctcgggaggctgaggcaggagaatggtgtgaacccgggaggtggaacttgcagtgagccgagatcacgccactgcactccagcctgggcaacagagcgagactccatctcaaaaaaaaaacaaacaaaaaacaaaacatctctgcctgaaacagcagggtcactgggatatgggtaaccccaacactccccaggctgccccctgccctcacaccattgctccccaagcagacacatacacagggctccattctgccctcaggcgtgtctcttccccccaccccccggagctccacatgggccctcaccaggcggatgtcatcctgcggcctcagcagctgtaccatgaggtgcaggtgctgcctctgctcctcctgcttctggggactctgggatccttgcccgaagtctgtctggtccccgtggagctcctcctcactcggggccttctctgttggctcagaactggcctctgctgcatcatcattgtcccctccatcctgcagtcccaggacagccccacggagcaccgcaaagctctgcctggcagggcagtgggcaactgtcatggctcctcattccccttagggtaggggctctcaaagtctagcatgcatcacattcacctgcagcccttgtctacacggattcatgggcccccacgcggtcgataggtctagagtggaggcctgagcatctgcatttctaacccctcggccccttggcaatattgctgagaaccagtcttgggggcttccaagctctcagcccctctactctagctcatctgtggggagagggggctgctccttttcccctcccacctgtttaactcaagtgctgctgggaacatggtcggggacccaggagtcctcaggcccatcatgccctcctgccgttcggcccgtggccaccacctgagccaaagcccagggcagtggatgaggaagccccagctgaccagggggagggtgaaggcaaaggccgccctaccgcgagcccaccagccggccccaccgggaacgctgccccacaaatttggcagtgggcttcgctgcgcgtcctccggggagctttctgtccctgcagctggagcccaggacggccgtggccaggcccggggcagacggaagtgtctgcgtgggggaggtggcgctcaccttcgctggagtcgactccttcgctggaccgcctggtcctgcggagagagcagccccagggcagggtgagggcggggagggctgtcccctcccctctctcaggaattctagagttgggggaggccagaaaaggcgccagatgccaatcgtcttcccaccccagtccacgccccaccgggaggccccgtggagccccggcccaaggccaggtcggctgggtgggcgccgagtgtggcggggggcgcgctcagatcggggcctccgcagcccgggcggcgcgcagggctctggattgtgccccggcgccagtaccagagaccctcgaggcccccagcgccctccagcccgagccccggggccccctcctcatgtccccgttcgagaggagcccgctggcgggcaggacgcgctcccaagccggggcagcaactgcgtgggcggcaccacggccggaccacactcacccagggccccacgggcgtggaggcgccgctgcccgggggcgaacggctcactgtgaccagggccatggagccaggccgcgagcacctgggctggcaccgggcacggccccttccctcaaccccgcggacagtcctggacccgcaggaccaggaaggacggacggcgccacccgggcctggcacctcctcgggggcggcccttaaagggccagacactcgcccagccgggcccgcggagcttctcagggcggccgggccccgcccctccggtctccgctgttcggcccgcccagcccctgggcacaggtcaggggcgaggccgggggcgggcgcaggtgcggagcccggagacccggagggcaagagctgaaggccgggagtttggtccccctcccaggaagcgcccggcccgggccggcccagcgggagcacctgagctgttctgggcctccagcgtcctgtgccctgcagaggcgggtcctagggaggcagagctgaggtggggaggtgggggacaggtctagagaggatcaggcacggcgcgccctcggccaagggcccccaccccaaacatttctccctgctggtcggccttctcgttcccactccgcaggaaccactggaagacaggcttccggggaaaacggcctggggtttacaaataacccaggaagcccatgaggggctctcaggtccacctcggaggcgagcagggcagggcttccagctacgcaggcggaagtgacttgcgcaaacccacccgcagagaacaagccgcagtcagggccagggcctgggcttggctgcaggggtcggcgtcggggctcttcccagctggaggtgaatggtgcctggggacccaggcttttcctccccagcaggcacgtgggccggtttccagaagactaggctgggtggcaggacgaaccgggtccccagcaggtgggacagggcacaggggatctgactttcacaggacgcctgcttggtaaggacacgtgactctcgccagctcctttcagccctgaggggcggagggtggggggtggtctcctcattttacaactgaagaaactgaggctcagataggctaaggggaccatgaccaggattcaagcccaggtctgaggccgccatccacagtgcctctccacagcgccccaccttcagggtccccaccgctccagcccagtgagcagagcagccctgctgcgacagtctctttatttccatctcagtctcccctgcctgctcattcctggggctccaggccccaagctcagcagcagagagtttataaataaataaattacaaaagcgggcagggagtggcctggccagccctcccggggctatggctcagtgctcagtgagtgacagctgcaggatccgctgtaagtcctcctcctcctgctgcccgcgccgctcccgctcctcctgctcccgtgaagacaactccagggccaggcgcagctgctcttcaaagctgggtggaccgggggctgggggtgtcctgggaggggatcctgggcccctgggctctgtggacagctgcaggctttcctggagggcccttccaggcagggcaggggagggaagaacaggccagtgagcgccaaggctggggcagaagccgaggggctggggaccggctttggaggacaaaggcaaagacagggtggcaagcagaggagacaaggcagggccctgcttccccacccctcacaccacctttggtggcagatagcgctgctgacagagggtggccttgcagagggcctggggtcctagcaccttcctgctatccccctccccgccaagccagggctggggggacagggacccagccagccccatgaggggctcaccgctccagctgaagctgttcctcataaaccgtggcctggggaggagggcgggcaccgggccgggtgttggtcagggcttcccagacggtcacctgcagccaccagagcccacagctgtcacttctgccgtgtggctgcagaggccagagcccaccccctgggcaagtcccacctgctccgcctcagtgcccgcttcaagcaggctctgctggatggcgaactgcaggaggtcatcgtcctcgtcccggaggggctcgttgcgctccatgcccagcacgctgtacccgttgggcacttcaaacacggtggggtccacctcgcacgggaaagggttccctaggcaggtggcagaggggccacgctcaacccgcggggc

SEQ ID NO: 915588 - DNA, 4001 bp, Homo sapiens
gcaatggctcacgcctgtaatctcaaccctttgggaggccaaggtgggcgatcccttgagtctgagagctcaagaccagactgggtaatgtggcaaaacgccgtttctaccaaaaattattaaaaatcagctgggcatggtggcatgtgcctgtggtaccagatactcaggaggctgagatggaaggattacttgagcccaggaggcggaggctgcagtaatccgagattgcgccactgcactccagcctgggtgacagagcaaggccctgtccccaaaaaaaaccaaaaacacacatacacacaaagaaatcaagctaagattctgaaccttgataaaagccacaggcagaaactactatctaaatcaagacagaagaaaatcttctggagtcaaggcacacagaaattcacaagacttcaacgctcaaagccaaacactgattgcctgatggcctcacagccctgctctaaggagcccaaactagcaatcacagggttacatgaggaaggaacctcgagtctctagaagattaaaataagaagatgcagtaaaaaggaggcttatagccatgggacatctcaccgattctcggaagccatcatacttgtagacatggccattctttgtaagcagtttaagtccatggcccagagcaacacggcgccagataccttctgttaactccccagcctggatgttgtccactttgcctgtcttgctattcttgaagatgatgccctgacggctcaacctcagtcgaccatcattctgtaagaaaagcaggcccagatgcatggagacagtacacagcatgtcctgggttctacagctctacctaacacacattcctgctgcaagtggactggccagattatcaatgcaggagcaacagctgagggtgccaaggagtctagattctaaaccagactctggtatctagaacccttaacagattctcagtttcctcatttgtaaaacaggaattgggaactgaacagcatatacggtccctataactctgagactatctctcagtattgccttgagttggtggagacactaggtacacattatactgagtcttctttttccaaaataacgttaccaaagcaagctctcattaatggacaaaaactctaccctccttccttctctctacttgtatcacctgtccaagccattctcaccatggaacctttcacctcctgatagacgtcgttgaactccagtgtctctgccatgtcgacccctgcctgtggtggcctgggcagagccccaggctgcacaagggaaaccaagtaaactgggagctgggccccaactcctgagtgggtgtgcggatgctcagcaggttgggaatctgaattcaagaggaagacagataagcatgaaagacagcacctcgctgtgctcacggatggagccaggtagcaactcccagctgcgcctggatgtctcaggatttcctctgcctggaaacctacagacggacgctgcagtgcccgagggtccaggtccaggcctgggtggagaaccgggcccggaataccgctgacacccaacccgacgcccgctctggccgctccggcgggagccatggcaacgagcagcggaaccccagggtctgccaggagcccgcacatcgcacgcgacccaatccagctcagagtgcagggtttccctcgcaccgctcccaccaccccgcggccccagacccacggttcacccccgccccacataatggattcgcccgctccccgcggttgcgaacgcggaatggtccatgtcgagggtcccgtgggggagcggggcccctgccttcctgggaccggggacgaccaccacctacctcctcaggctgcggcctcgcgagggccccggcgcgagaggtgggcgcgctggggggacgcggggggggcgcggggagggggatggggggacaccggggaagcttttcccgcgtgcgcggccccgcgtcccgccaccggaagccgtacacaggccacagagaggatgagctggctagagagacgcgagtcgggcccgcctgcgagacagtcgcatagagcgtcagcgactctggaggacctgagggaagggtggttgccgtgaagcctctctcacccagggggaatccggcctagaaaatgtgtgtagggctctttagaaactacagacacttcttcagtcgagactagatactaaagagaaattgtgtagttttattgtatcagacttagtacaggggtggggtgggggtgtgtattggaatgatgcgtgcccgtttctctgcaaaatagtttctatgtcatggaaaggagtcgatgggacaagaagagaagtatttgaacagttgtgggaggaaacgacctctcccactggctgcggagagtatgcgggtgttggtgtcatcgtgggtgcactgctttctggctgaactgtcaagttcactgtctacacccaaaattttcacatccttaaccgaaaattataggtacctccaagaggctggcaaacggccttatccagttcaagtcctggtgtcagattcaccttggagccagaactgatttgaaaccacatcatcctgtggttgcggaagccaggtctcccccgtataatcccagagtgcattttgcaacatcagagaccagacctggaaaagatgttttagtttttctaccccaacctccttttactgatgggaaaactgagacccaaaggggagtgagttgcccagggtctcagtgcgttggcaacaaggctaggtaggacccagacctccttaacaccaccagtccagttatcttctgtcataatcacagtgactgtatgttcagaatgactattgatatgtgtcctacatgaagacattagtacagaatatgtaagctcaagatttccctgacaatcaatacaccagcttgctaaatcaatcctggggtaagagacaacaggaatgcacccttctcccctgaactcatagctttaacctctgagtagtggctattccagcattatctagcaaaataaattcaactgggtttaataaatagatattgagggcctattactactttagcacacttctcagatttgaggaaacttgaacaaggtgaaaacatccccggccaggcacggtggctcacacctgtaatcctagcacttggggaggccaaggcagggagatcacttgaggtcaggagtttgagaccagactggccaacgtggtgaagccccgtctctattaaaaatacaaaaattagccaggcgtggtggcgggtgcctataatcccagctactcaggaggctgaggcatgagaattgcttgaacccaggaggcagaggttgcagtgagctgagattgtgccactgcactccagcccgggtgacagagcgagactctgtcaaaaaaaaaaaaaaaaagaaagaaagaaaaagaaaaaaaaaaggaagggaaggaaagaaagaaaaaaaaaaaaaacagaaaaaaaaacccagccccaacctttcaggaaaacataatctaacaaatgactttaataaataaagtgacagttaaaaaaaaaagaagttggcacatatacaccgtggaatactatgcagctgtaaaacaggatgagttcatgtcctttgcagggacatggatgaagctggactccatcattctgagcaaattatcacaaggacagaaaaccaaacaccgcatattctcactcataggtgggaattgaacaatgagaacacttggacacagggtggggaacatcacacacaccagggcctgtcgcggggtgggcggagtggggagggatagcattaggagatatacctaatgtaaatgacgggtatatttacagttaacgggtgcaacacaccaacatggcacacgtatacatatgtaacaaacctgcacgttgtgcaggtttaccatagaacttagagtataagaataataataaaaagaaaacaaaacaaaaaagacgtgctaactgcta

SEQ ID NO: 915589 - DNA, 4001 bp, Homo sapiens
gaccacgtcgcgcaaagctgagaaaaggcaacgggacatccactcactcaaggggagatggaaaaatgcggcggaggggggaaaaggctgaagggggcaggcgtggtttcttcacggttctttttgctaccccgtctccccgccgcgccccgccccgcccccacacccaaggaaaatgatctaacagtggagtcaggagactggcaagtccacacttggtgcctaacgtgccacctgacgctggggtcaccacaaactcctgtcggtgtctgagtacctggggtgggcatgagatgggataggctgatagggtcaggatgctcaggggaaggaggggaatctatcaaggggatcggaacacaaaacctcacttccaggtggggaatggacaccagatggcggaagaggctgcagaggtgctgccagagacaaggctagggtccacccctctggctgctacctttgaaaaggctatggcttcttccttagaaaaggggcatcacatagtcctctacctactccctcatcctgactggggaaactgagaagaaacaagctcaactcatctcagggcgtcaaggagagcagagtggagaggtgaagaggccaaaagctggaaaaaggtgagtggagctggggctggcatgcacacttggaaccaggaaaaaaacaaaccacacagaggaacagctgtttttctagagggtttttctcaggggcttctcttagtgctgtagctgctgcaggctgcgcagggcctccgcacatgcgcggataaggccacacagctggatgctagtctccagggaggtgctagagcccagttcagcagaggcccaggtcagcttctgcaagagggctgtctgtgtgcaggccatgacatctgtatttggaggcacagcaggagcaggtggcccctgggctgccttgagtcctgctgcagctccctcacagtgctccggacgaggtactgggggctggggcgcaggtcgagagcccagggggagctctgaggctgaggccagctggtgctcccgagcttgggagagggcagcctgggcattcagagctaaaaagaggagaaagtgggtggaatggtcaggatgcctggcccacctcagccctgagccatctccttttctgctctgctctttctgtgcttgaggtgttttccctgtccctctataaggcaactcatccactttctactttgtatcacatttatgccctagcttcaattctccatcagtactgggcctggttgagctcagactctcgcgcagtggctggcacacaggaggtgcttggtgctcttattgagttaagggtcctctttagagcctaaaggagaaataattttacttctaccccacccagagactccactgtcacctctcagccctactgttctcgggcctctatcaccacttaaccacgcttcccccctaagcatatccggcccctctcccggattattttttactcttaccgggattatctttatccacgtctgagtcgagttcctgacaagccacgcagtagattttccgctgtttgtcttggaggaggatcgtctacggaccaaaaagcacacggggccggaatgagacgccggcaatggggtccagaggggagggccggggaagggctgagtggcctggcccgcggacccatccccggtcactcgcccgagtctcgcctcaccccgcagtccgcacacgtctcgcccagcatgcggtaaccgcgcagcagatagtcgcccatgagccgggagatgcgatcttgccgctcccgtcgcgcctgcagcaccttcgtctccgcctcagtcgggggctcccaggagaagtcgtcgacttctggggaagagaggcatagggactgggggtcttgccggagtgggctgcctcccgtacctcacagccacaaacccctgccgcccaggtcctcaccagctccgttcagggccatgttgccgttgtcaccgccgggctcacaggaagtgacgtcaaagcggagcgccctccgctgcggctccgcccgttccatagctgccgcggatcagggcggacgtgacgccttagcgtggtcctcagacctcgctgtgcccggggtggggcgtgtcggctgctaccgagaacctgctcgggggacgcgtccgtcaaccggaatccaggggacagaagcttccgacgcgcgaggcctcgggaggagcgtctccttggtaactctcctccggtcgcaagacctggaagtggcctcagggggtcgcccttcctgtccgtcgtggatgaaggggaccacttggcttcagaaatccccgctggcctccgcctcccctggggtttccctttcggcgcaggcggggcagcggcgtcatcacaaccatcgccaccccagtaatcacagcgagcggccctttgcgcacgcgtggagccttctcaggcctcagtacttctcacttcgcccggcaaggctggccaggaggggtgcattctccctttccgcgtatttcaagaccactccccttctgcatgctcggtgtcccagtctgtctcctcgctgcctcccgaggcctggaactgaagcaaagttcgccccgaagccgaccgttctttgaagttgaaatcctcaaaaagcctgcagactgaatagcgctgtactgggcacgcgcattgcgcttccagccgcccttgggtgctgcgtgctgggccgggtcgggttggggccttcctacatactcttgcgaccattaggctcttcttgggtgagttgcaagttaaaattaccagggctctctgaacatggaccttggtgctttttttctctctccctcttccgtgttctttttcaaacgcatcttctcccttattagattcagagaagccagacagggcaggcaggggtcctcagatgtgcagtctgcagggcctgaggttgtacaccagggcagtggaaaagcagctaggacttggactttcacagttacatcgacattctcctcttccggatggcacatgccccctcaatctgacctgaagtcccttcctcctggccccctcttccttccacgtagaacccctggaactgtcattcttgctgcctcctgcttacgtggagagccctgtgtccctttcacatctccatctaccagtcaggctcttgggcagcagcgtacctgacttagggcctgtaccacaagtcgtttctatcaggctgaatagagccaccgttttttgtgtgtttgtttggtttggtttgtattttttgtagagatggggtttcgtcatgttgcccaggctggtctccaactcctggactcaagtgatcctcacacctcagcctcccaaagtgctgggattacagcgaagagccacagcacctagcctgaggctgactagaggaactgtctctgaaccatctcttggactccagcctgtatgcacagacccccaggttattaccgtctccagctcccagccctaccctgaattcctcagtgcgccgactatgtcaccatcatggccaatatccactcaactgtctattctgcctcgcacctacaaagagccttacatgagtcctctcacttaatctctccaatttactcctcatgacaaccttacatatccccacataagcaggaaactgaataattattttaaaatacagtgtcgttcttgtactaaaaaccatctggctgcccgatactgtggctcacgcctgtaaccccagcacattgggaggccgaggcgggcagatgtcttgagatcaggagttcaagaccagcctggccaacatagtgaaaccccttctctactaaaaatacaaaaattagccaggtgtggtggcgggcgcccgtaatcccagctactcgggaggctgaaccaggagaattgcttgaaccgggaggcagaagttgcagtgagccgagatcacaccactgcactccagcctgggcaacagagtgagactctatctaaaaaaaaaaaaagccatttggc

SEQ ID NO: 915590 - DNA, 4001 bp, Homo sapiens
gcaacggttgtgggaccacgtcgcgcaaagctgagaaaaggcaacgggacatccactcactcaaggggagatggaaaaatgcggcggaggggggaaaaggctgaagggggcaggcgtggtttcttcacggttctttttgctaccccgtctccccgccgcgccccgccccgcccccacacccaaggaaaatgatctaacagtggagtcaggagactggcaagtccacacttggtgcctaacgtgccacctgacgctggggtcaccacaaactcctgtcggtgtctgagtacctggggtgggcatgagatgggataggctgatagggtcaggatgctcaggggaaggaggggaatctatcaaggggatcggaacacaaaacctcacttccaggtggggaatggacaccagatggcggaagaggctgcagaggtgctgccagagacaaggctagggtccacccctctggctgctacctttgaaaaggctatggcttcttccttagaaaaggggcatcacatagtcctctacctactccctcatcctgactggggaaactgagaagaaacaagctcaactcatctcagggcgtcaaggagagcagagtggagaggtgaagaggccaaaagctggaaaaaggtgagtggagctggggctggcatgcacacttggaaccaggaaaaaaacaaaccacacagaggaacagctgtttttctagagggtttttctcaggggcttctcttagtgctgtagctgctgcaggctgcgcagggcctccgcacatgcgcggataaggccacacagctggatgctagtctccagggaggtgctagagcccagttcagcagaggcccaggtcagcttctgcaagagggctgtctgtgtgcaggccatgacatctgtatttggaggcacagcaggagcaggtggcccctgggctgccttgagtcctgctgcagctccctcacagtgctccggacgaggtactgggggctggggcgcaggtcgagagcccagggggagctctgaggctgaggccagctggtgctcccgagcttgggagagggcagcctgggcattcagagctaaaaagaggagaaagtgggtggaatggtcaggatgcctggcccacctcagccctgagccatctccttttctgctctgctctttctgtgcttgaggtgttttccctgtccctctataaggcaactcatccactttctactttgtatcacatttatgccctagcttcaattctccatcagtactgggcctggttgagctcagactctcgcgcagtggctggcacacaggaggtgcttggtgctcttattgagttaagggtcctctttagagcctaaaggagaaataattttacttctaccccacccagagactccactgtcacctctcagccctactgttctcgggcctctatcaccacttaaccacgcttcccccctaagcatatccggcccctctcccggattattttttactcttaccgggattatctttatccacgtctgagtcgagttcctgacaagccacgcagtagattttccgctgtttgtcttggaggaggatcgtctacggaccaaaaagcacacggggccggaatgagacgccggcaatggggtccagaggggagggccggggaagggctgagtggcctggcccgcggacccatccccggtcactcgcccgagtctcgcctcaccccgcagtccgcacacgtctcgcccagcatgcggtaaccgcgcagcagatagtcgcccatgagccgggagatgcgatcttgccgctcccgtcgcgcctgcagcaccttcgtctccgcctcagtcgggggctcccaggagaagtcgtcgacttctggggaagagaggcatagggactgggggtcttgccggagtgggctgcctcccgtacctcacagccacaaacccctgccgcccaggtcctcaccagctccgttcagggccatgttgccgttgtcaccgccgggctcacaggaagtgacgtcaaagcggagcgccctccgctgcggctccgcccgttccatagctgccgcggatcagggcggacgtgacgccttagcgtggtcctcagacctcgctgtgcccggggtggggcgtgtcggctgctaccgagaacctgctcgggggacgcgtccgtcaaccggaatccaggggacagaagcttccgacgcgcgaggcctcgggaggagcgtctccttggtaactctcctccggtcgcaagacctggaagtggcctcagggggtcgcccttcctgtccgtcgtggatgaaggggaccacttggcttcagaaatccccgctggcctccgcctcccctggggtttccctttcggcgcaggcggggcagcggcgtcatcacaaccatcgccaccccagtaatcacagcgagcggccctttgcgcacgcgtggagccttctcaggcctcagtacttctcacttcgcccggcaaggctggccaggaggggtgcattctccctttccgcgtatttcaagaccactccccttctgcatgctcggtgtcccagtctgtctcctcgctgcctcccgaggcctggaactgaagcaaagttcgccccgaagccgaccgttctttgaagttgaaatcctcaaaaagcctgcagactgaatagcgctgtactgggcacgcgcattgcgcttccagccgcccttgggtgctgcgtgctgggccgggtcgggttggggccttcctacatactcttgcgaccattaggctcttcttgggtgagttgcaagttaaaattaccagggctctctgaacatggaccttggtgctttttttctctctccctcttccgtgttctttttcaaacgcatcttctcccttattagattcagagaagccagacagggcaggcaggggtcctcagatgtgcagtctgcagggcctgaggttgtacaccagggcagtggaaaagcagctaggacttggactttcacagttacatcgacattctcctcttccggatggcacatgccccctcaatctgacctgaagtcccttcctcctggccccctcttccttccacgtagaacccctggaactgtcattcttgctgcctcctgcttacgtggagagccctgtgtccctttcacatctccatctaccagtcaggctcttgggcagcagcgtacctgacttagggcctgtaccacaagtcgtttctatcaggctgaatagagccaccgttttttgtgtgtttgtttggtttggtttgtattttttgtagagatggggtttcgtcatgttgcccaggctggtctccaactcctggactcaagtgatcctcacacctcagcctcccaaagtgctgggattacagcgaagagccacagcacctagcctgaggctgactagaggaactgtctctgaaccatctcttggactccagcctgtatgcacagacccccaggttattaccgtctccagctcccagccctaccctgaattcctcagtgcgccgactatgtcaccatcatggccaatatccactcaactgtctattctgcctcgcacctacaaagagccttacatgagtcctctcacttaatctctccaatttactcctcatgacaaccttacatatccccacataagcaggaaactgaataattattttaaaatacagtgtcgttcttgtactaaaaaccatctggctgcccgatactgtggctcacgcctgtaaccccagcacattgggaggccgaggcgggcagatgtcttgagatcaggagttcaagaccagcctggccaacatagtgaaaccccttctctactaaaaatacaaaaattagccaggtgtggtggcgggcgcccgtaatcccagctactcgggaggctgaaccaggagaattgcttgaaccgggaggcagaagttgcagtgagccgagatcacaccactgcactccagcctgggcaacagagtgagactctatctaaaaaaaaaa

SEQ ID NO: 915591 - DNA, 4001 bp, Homo sapiens
tgagttagttcaataaagctcggcaggagaaaagacaaagagcaagccaagagaatgaaaatggcagagggggaaggaacagcccaagggcgcagagagcaaatgagcttcgcagaggaggaggaaatgagcagggatgggggaaactaaagccagggcttgcaggtgacaagacaagtccgctgaatgtgggatcctgggggtgagtggaaggtgagccccagcctggctgcttgtcaggtggtgagatggctcagagaggaggctggaccacacgaccaggaagaccctgctttccccgtgtgggcaggagagtcctagaaagggaagtcagggagaacaaacttggggtgggggcaccggactgccctgaaataacaaattccaaacagcaggttctctgctgaagaggcagggagtctagaaccccaagtaggcaattagcaaggacacaaacatagcaattacagcaaggaagagaaggtgaatctgcctcacagcagggcacaggcacagccaggggaagggcccaagccttcaggtccactggaagctttcctccttgctgagggtgaaaagtggagaaaatagcagagcccagccccaggtcctgtctgtggtgcaggcagcctccaaagccccagcgtctgattttctgcaagctccctaggtcgggatgctgcttggacaaaaggaattgatctgagacagcaccaaaatcaggcctgacttagggagcaacggcggagactatggagcccaggggcacccggaaggaggggagaaagtgagggttggcagggcagggaggccatcatttgcagaggagcaaaactctctgccacacagcccctgcctctcagcgccgccctgacctggtatgccctggccttccaggaaacctgggggtctgccttggacagagagggtagagacctggctgctggtcccgcccgggcactaccacctaggtgggtccgtcaatgaagtgactagcgacccatccccaactccatacaggaacatgtaatctttttgagatctttcaataggtctttcattgttctttctgccaaagaagagcttcctgtttcggtacttcgcaaaaggctcaagacatgtgtgttcccacatcccttcccatacagccgccttcccaaagggctccatcccctctcgagaagcccaggcaagcccaactctggagttcttagctccagcccgtatggcagccaaagccctggcctcccagttgtcctctgcgaggtcccaaagcgccttttgacggggaaggagagagacgaaagaaactttctgcagaggccaaggatggctgagactccaaaccctcctgaaatttcacttcctcccaaataaccccactccaagcccctggtttcttccagatgttcactaacagcgcgagagtcatggaggggccgagacggagccccttttttcaactcagggaaagaaaggaccgagggcgcaggaaggcccaggggcttcccgcctccccctggcggggcgcagccggtccggtaccaaaggtccggccagccccgcccgcccgcggcccggcacccgctgaacaggaaattccacctgtgcgcccagagctcggccaccgacggacacgccaggggagccggccgagcccagcgccgcgctgcagggtcgggcgggcaggagcttcccagcgccccgggtccccggcccgcgctcacctcgtgccgggagttgtacttgagtcccgcgccgaagtccttcgggccccctccgcccttgcgggcccgatcgctccccatggtccccgaggccgctcgcgggtctcacaggcgtcgtccctgccggcggccggctcccatggcccgcagggcgcggggcgcggggcgcaggcggcgggattccgggcaggcccagcgcgcccgaccggcggcggtgccctcgccctggcgcgctctctctccctcttcctctttctccggctgcagctccgctctcacactccggcccggcccacgcaggtagtttcagggtgtggcctcggcccgcccagcccgccgcgctcgcctgcgcacctgcccggctcacctgcccgcccccgccggccctgggggaggctcctcccctcggctctgggcctgaaggtgagggggcctcactcgggtggtggtcgctaaggccctcaccatcaccacgacggcgttcaccacccctccggccctccaggggccctgccccgggagggcagccctttatccacctccttgatgccaaccatcttttccctcctccctcatgcgcctccggtctctccccttcaccttgctcactttgctacaggactaaatcgcatttatgaaccccccaaaaccaaacagaaaccagaaccgcccctggcccaggctccccgtcggctacgcagcctcctgttctccaggcgggaggcgcttgctggcctgcgcccggctaccctggggaggcccagtgacatgagctgtgccaccagatgccctctgagccatcccaacgcccctcgcccacttgcagcatctgatgcttcctcaaatgccccctttccctggattccggtcctcctttctagtcctaaatgtcatgattcccaaagttctcccttcagtttcatccctttcttctctaagctttttctcttggcagcacgtctcatcttacgacttcagacaggaagacctccctcccagcacagacaccaccaaggagtgccagttctgccttagcggtcgcctggggacgtctccatttatgttctactgtattctgtagccaatgaacattaccaagcacacactaggcgctaagcactgtcctgggtacagggaaacaggagtgaacaaaataaaaatccctgctttgagatcaacaagccccatcttccttccctgacttgcccattttccactgttttctctaattctaatggcagcattctcccaggctcaaatcctggaatcatctttgattctccaccctgcttacatctcatatccaattagttccaaatctgatcaagactctgctgacaagcatagcccttccattcctgcgcattagaagaccgctattcgagtcctcagagccctttgcctggttaagaaagatctcctgcctctgggctgccaccctctgatctctcctacacaaagcagtcaggtaaatctgaaaccacagctcctttatgactttccgtgtctcccggatcaaatccaacctccttagcccagcttcacactctgccctgtcctcccttaacaccgtgcctccaagcattcctgtttggagcccctctctccagccaggcgttctgatcttggcagctttcataaagcttttcatcccctggaagctcttctccttcatactccttccgcatattgggtcgaagacaccgatggggttttttagtgttgttcattgaatgtttttagctctctgccttctgggcacaggccagggtgttactctctcttctctgaagttaggtatggcagtatggctagcggtaaccaagaaaatgtccaatgagaggacacaccacttgtacatagcagcataaggaggcactgcacaatgccctgctctcttctgagaggtttaactctgtgacctgtgaccctaagtggctacaatgacacacactggatatgtagcatgaatgaggagtcagtcagcttttgggatgttaagccaccgagagctgagggttgtttgttattgctgcaaacctcacgcttcctgactgatatgctacctcctccccaggagtttccttccctctcaaccagaactagctctgtttgtacctctctcatggagctcaccaccatttcgttgcattttctgtctgtgtcttaactgcctttgcaccctcaaagcctagcacaatgactaacacaatatattgggtcaatttaattgaaagaagaatgaatctgctgccttccatcacataaagcatt

SEQ ID NO: 915592 - DNA, 4001 bp, Homo sapiens
gaaaggagcagattcttagttctatccagaaaaccggattctaggagtctaacgaggttgggaggctggcgggggcacggcactctcttcctgagaagcagagggccagtcactgcttcccgtagggaaggcagcccagaggcacctcagcctgggccgccagctcacagagaaggcggccctgttgtctctgaacaacaacccatccccaagctaaagacacccactctgcccaaagtccaagctggcaatttccaattcactcttctaactcttccttccatgtgcaccctcacaacctcggttaccatcttggagtctgggggatctggccccaactcctggcaagctccccatgtcttgacagagcccagggcccatggggcagcttaggatcacccacccagcgcaatggggccaggcacaggagcagtctgggagtgggccaggagcagggcagggaacggtcaaggggcattcccagaccagctctcagcaagcaaaacaacctcccgagttcatttctaggccccaaacagcgggcacgtccccggaacccactctagaattatcgggcagctttggagagtaacagcatgggagaaatattaccaatagtgaatatttatacagctctccctccgtgcaggcgcctttcaaagcacttagcatatatcaactcatttaaaatccccctggcagatgccagggccaggacctagaggaggtggagtctgtaggacgggtccggcacagctcaggagacagtgacacgggtgtgtgtctcttgtgagaactcagcctgtaccaggcctgttcccaaagttcaaaaagaatgagtccgcctgagcctggcttccacgcggtacccgcctccggcggtggaaagtacaggcttccccaagaggcctgtggggggtgccagcttgtgggtggccatgaggtcagacagggcacagctgggcacccgaacactgcctacactcccagccttctggcagcagttcccttaagccaggccctcaggacccaggctggggagcagaggaagcagccacagtaggtcaggcctcaagctgcccagacagagcctccccccaggactgggaatggaggggcagtgctggcagacatgttggcagttctgggctggccgggaggtccctgccagccaggtccccgaggaaacacccacagcagacagctgagcccactccccccatcgcatccctcccactgctcaccacccatgcagccctgaggcacagtggcctaggcctgacgacccccataacgtggccctaggaccctgggcacagccggcctcccactgacaactccacctttgggtcctgctcagcgaccttgcgactcctgcacacaggcggaccccgcaaagcctgtcacctccagcacagtcagctcccaagtgctggacctgaccggggtagttgtgggagaaaccatcgctcgaggatgctggaggtgggggccgccgcttcagtccgggcgcagggctgggggattgggggcggaaactttccgcagaactgtcccgcttgctcactccaagggaacggagaggatccggcttcccgcgaaaatctggtccagggaaagggaccccggaaagcagctccgcagggctgtggcagccccaccccgacccgcgctgcgcccacgtgcagggcccgaccccctccgggaggcgcggcgccggctggggtcaggcggccgaggaccccgcggctccccgccccgccccgccccgcgggcccccgcgcaccgccgccgcgtactcaccctcacgggtggagcggggcggggcagcacggttccgcgcgcagctccgatccgctaggcgcaccgaccggcggcgcagcgctggcgcgacggctcgactcggccgggtccctgtcccgggcgcgggtccggcctgggagcgggcgagtccgcctgcaggggaggcggggacccgggcccgggttgggggcggggaaggggctggacacgcttgcgcacacggcggcccgactcccaggagctcccgggaggggtagaaagggcggggtggaggagggggaagggcgggggtgatgccgcgcggtcgcaggcttgggatggtgttcgcgcctccgagacccggacagaggcaagcaggggcgccgtgggtgccagagaggcggaagaggaggcctgatggggtgagcacagggccagggcaggcactgcctgtgaatggcgccagggtgggtatgcccagcgcagccaaggcgctcgctcccgggaacaatgagaatcaagaaagggtgcagtgctctatcccacggggaacggtgtccttccctcactggggaaactggggcagggtcctgttccgggagcctatgcttcccgtgccccatgcacgcaaggcagccagtcagtcccctgggcccagacgtgggcccttcctctgcttcggttggggcctgctgcccctaaactgctctctctgcacccctcacttgcatactctttatcttggcctcagaaagtttctcagtttcctttccgttattgaaggcgccaggcatcctgtctccaggaagaaacccctgggcccctgaccctggttctttggacccaggcatccccccaaataaacctgggaactgcccaggctgaagaacagttcagaagtcaccctacaggacaatccacagccccttaggccagtccctttcacaggtcagcacagtgtttccggagccccacgtatcaacagcccagtgccgggagcgccaggggctccaaggaaactatcagacccattccctgtccccaggaagcttaccatccagcggcacagagaaggctcaccatggactccattcaagaacgaggcaggataggatgtgaataagtgcaaggtgtgagtgactgacagtaagtgcaagggggttcagagaagtggcagctccaagcctgcttctgctgaagctggagggcttatctgtcaagaacccccaactcaggaagctctgctccaagtgagctgagtaaggagagtctgcctccaagttgttcctctgcaggtgactgtgctccatgctaaatcattccttgcacgggcagaagctgtttggcattgcaccagtgtctgattttgtttgaatatggtgcctttggcttaatcagtcagacatgcattcaacaactatttatttatttatttatttatttatttatttattattttgagacagagtctcgctctgtcgccaggctggagtgcactggcgtgatcttggctcactgcaacctctgcctcccgggttcaagtgattctcctgcctcagcctcccgagtagctgggactacaggcgcgtgccaccatgcccagctaatttttgtatttttagtagagacgaggtttcaccatgctggccaggatggtctcgatctcttgaccttatgatccgcccgcctcggcctcccaaagtgttgggattacaggcgtgagccattcaacaactatttattgcatgccatctccaggcctggaattaagctgggtataaagaacacaatgactaagtccctgcctcgggcaagtcgaggaagagggaagagcctccttgttctacagatgggaagactggcccaaagggagtaagcagctgcccttcataactaagtgaatctgacagaactgatccaagcgtcagcccagcctctaaacttggccatttgatgaactagatctaagcacagtttgcagttcttgccgtgaatcacgtaaatgtcactctaccagaaaatggaacttaagaaccagcatttgttcctggagacctgagttccaactcttgtctctgccactaaatagctttagttttcttactggggtggggggaggggaaaggaaataactgcttattcaaagggctattgttggcattaaatcaggcaatggatgcgaatttggtctgaaagcataacctgctatatataagtgt

SEQ ID NO: 915593 - DNA, 4001 bp, Homo sapiens
agctgggagggtctggctggccaaagagaagtcaagagatgcttccagtaagggtgaaggtagtaaggtgaggactgtgcatgggaaggggtgagctgctgttcacccctgcacacaagcagaggcttcctcacaagcaccagctcagccagggccacgctgcagtcactgcagaagacatttctgtagcttctacagccacacagaggcaccagatgccaagtgccagtttcttccatccacgccatgcttcctgatgatctggatcagaagagtcctttggaccacttcctaaaaatacatttcacggcccttccctggagaccagaccaccttggtcagcctgagtatggcctgggacaggcattttcacaaacagcccatgtgagtccgacggttgatcaggaaagggaggcaagcactagtgtttgtgcaccagtggaaactttccatgttttcataggggctggggacagcatctggatgaggcctggtccattttacaaaccattaaccaatgatcctgagccctgtcctatggtggagtcagtgtcctgctccccagcgggctcattcccaggctctgctctgaacccacaaacactgaaggatcagagtcttgagtcagaggagacagccaggcagggaccagggtcagactgcctcaggagagtcagaagcaccatccccaaaccccagaggggatgaagcctagtcctgtccagtaaagaaaagtgatcagtttgtaatcagcaggagtccccagttaaaggtattgtcctagtaactcccccgacagctcttctgaaaggggcgtgccttacctacccctcaccccacagcaatctctgagtcgttccctacacatggccctcctcgccttcatagcttttcccatctgtcatcagcttagttacttgttttctttctgtctgtctccccagttgggatataagctctgtgagggttggaattgggtctgtcctgttcgcagctctagtcccacatgtagcatgctgcttggcacacagtagagtacatcagaaagtactgaatgcatatcaggttggttaccgtggacgatcacacctccctctctgacctgcagtttccttgctgtcaaactgagaagtcagcctattcccactgctcaaaaaaggccagatcagtcccatgggcatcccagagcccagacaagtggattctttggccccttccagacctataaaatcagaatctgcatttaaacacgataccctggcgattcatctatctgtccaagtttgagaagcactggtcaagcctgatattcttgattatggctgaagaagagactcacctgaagtacttaaacaaaaaaaattttttaaatgagtatttgggtcccaacacctagaaattctgggttaattcatctagcccagcactggaattcgctgaagcccgctgggtgattctaaagtgcagccaaggttgagaaccactggtctggatgatctgtgggtgacctgaaagcacacttctcaaacctcgatgtgcacgccgtgactcagagggtgccagatggggtgcagggcaggcggggatttgcattctaaccagctccctaatggggcctgctgcatggctagaactactcttttgagttgcagtgctccgaaccaggatccctccagctctaacatttcaggaccttacgaactgcagcctctctcaccctccctgctccctctctccatcttccttgcatgaccagggtgcgtttcatcttcctttgtattcataggtcacagcattggctgcacaatgcaatgacctgaggagcttaaacatataaagtctaggccccactctccgagatgtttatttaattggttaggggtggggcccaggcatgaatagggaatagtaaaacaaatcagcgccgtacctcctctgtgattctaaaatgcagcctgggcgggaaacactacaaagagctcatttcaccttttgtgaaagacagatacacaggtatcctccagggctgccttccagggaaaaacctttggcgtcagaggtgagcagcgtcagaggtgagcagcgctaaccagtcttgaacaacaagacaattagcccttcttcgacctcttccccagtaaagttctacattgtcttgtcttcattccaaaacagcgtcagtgttgcgctaagcaaactgggcgagtcttggggcttgctgggctatacccaatcaggaatttcacgagccacgccctccccttgtggggctgagggtgaggattgctcagtggccccaggcattccagggcttccggggctggctgctacctcaagacaacatggcgcctttccccagcagctcccccacattgctggtctagctctgagcataaagggcaggagcaaagccacagtagagtacctgggtgggaaagcaggcatcgaatccactcatgtccaaggggaccagcctctcaccaagaggccagctcacccgacctgctgggcaaaggtgcccccgggtaggaagacaatctgctcttcttggtgctctgccaggaaccaagatgtccctggccgaagggagctggtcagttctgccacagaacttacccaagggcagaactgggggacaaggtgaagaaataaggcccagtggaggcagaaaccatgcctcctgctgccccagcattcacagcctaacacacagtgagtactcagcaggtacccgcccaaccaagtggggcagaactagatatgcccccaggggcacagtatgatgcccagcccctcagagcccctggacccataaaagcgatatggcttaatgttccggggaaggggtctgggaagaccagaggggcagaagctcgcggtttacttgctggttctgtgatcacaagcgaccacttactcttactgtcctcagttcttcttcttcttcttttttttttttttttttcagacagtcttgctctatcgcccaggctaaagtgcagtggtgccatcagcttacggcaacctccacctcccaggttcaaatgattctcgtgcctcagcctcctgagtagctgggactacaggcatgtgtcaccatgcccggctaatttttgtatttttagtagagatggggtttctccatgttgcccatgctggtgtccaactcctggcctcaagtgatccacctaccttggcatcccaaagtgctgggattgcaggcatgagccaccacgctcggccatcactgtcctcagttctgtagggaaaacctggagcccctgtctgcctgctgtctacgtctagactctcctacctcccctctttcccccaaatccttccacctagacaccagatccacctcaccttcccagaatagttcccaatcaatgactcctcttttccctgtgtctcccacctctccttctctattctctgacttataaacatgctcaagtctcctcttcctaaaataaacagcaaacctctctctgctctatctcctcctcaagctacccctgcatctccctccttccctcagtgatcaaacttcttcccctctactacaccctcacttcctactctgtcccccgacccctatgccactccctccactcttgtttttattctgaaattgctcttgctgaggccaatgaccttctaattgccaaacttaagaaaggtctattgtcagtcttcactgcgctgctcagaggcctttgatgttgttggccatgcctcctccttggcttctaggtcaaggtcaagattcccttcaggttttcctcctgcctccgggacagtaggctctgctgccggggcccacctttttttttttcttcttcttctttttttttttctgagagggagtctccctctgtcacccaggctggagtgaagtggcacgaacccactggaacctctgccttgtaggttcaagtgattcttgtgcctccctagtagctgggatacaggcacccaccaccatgcctggctaattt

SEQ ID NO: 915594 - DNA, 4001 bp, Homo sapiens
tcgtacttgttgatggcatctcccagtgagctgttccgcagccggtgcccgttccccacgaccacacagcggcggcacctgaggctgccatagaaagaggagtggtctatgtcaccccacactctaacccaggctcgctgccctggatctgcctgggcccatctcaggaccacttcctaggccccctcagcccctggtccccatgaagcaggcatcaccccgtggtcctgcttagggtcatgctgactttacagccctgggctttgtaagaggaggagactgcgcagagcacagaagagggcagaggagtggagggaaggcatgggggggtgtatcaatgagaaacgcctgccccactgttgcaataccctcgagcagcctctgcccactctgcacccagatgcccaggctaggctaccatgagaattggctgggatggtaccagtccatgactgtttcacagagcgggggggtggggagtggggggagcgggcagggggcaggaaataggagaaggtgcccagactggagtcggagtgccgccttacctctggatgttcttggggatggaggagctggtgatggctagcacccggaggagcagatcctctacaaaaagtaccaggcggagggactgatgtgacagatagcattctgaaggctgcctgccctccctccactgctcctcagagcgctggctgccttcttcttcccctgaccctggtacccgagtcaggctcagaacttgggcactggggccgtggacggcagagaataggaagcaacgtggtcagggtgagcccatggttcccacgagccgggtaggaacttaccactccccttggtcccatagggcagctcgtaagcagatggcgtcttgacccagaaataatcctcaagccgcaggaagatgggctgatcccgggagtagctgcacagaggtgaaagccgggtggggatgagaacagaattaatcttgatgccagaagtagggttaggcccatgactaatattataaggccttctcttccctccctggcttcacctaacccatgtccaccaacacagctgctctttccatctactccccacactgtgaaaccctcaatcccagctcgctccatgccctgctctaccctcctcatccttaagtacttacttgccaaagagcttagaggccttgctctctgcctcaccctggaggcacggctccttcttctctgggatgggaaaataaaaactggagagaaaaaaggacaggaggcagaagccccagtcagacccagggacccatgttccaggcagcctaagccttctcccacggcatgaaggtcccaaggtgccggggaggaatcatctcaagttaagttccacttggaacccaagtccttgaggatccaggtcttcctgcccctgcactccctgggtgagggcccagtgagacatcccaggccctacccccacccaccctcatggaaacactccgtaccagcagctgaagggatgaggtcatgtgccggctcttggaaccttcctgccctactaggtcccccgctccatgatgctccatccctaagccctgtccctgacaagagccactggaaggacatggaaggtgaactcacagctcgatgtacctgtcttcccgggagatggaataccacaccatgacgaccaggaccagagccaacatggccaggagcttccagcctgcaggacacatgcagagaggagctagaggcagcaacaggcaggtacaacccccgtccaccttcccacctgcccccttctgagtccctccgacccctaactcaacagaagcagtctctggccctctcctggccctggctgagggcttgaccctgattgtacccactgtccttcaagatgaagagaagggcccctggctccctgtctgtccctccacagcccccagaggtcccaggatcctgctgaagacggcttctgaggcctgtcctccagggtgggggagccctcggatgacactcacgggacttgctgaccatgtttctcagcaggcagcaggattcctggggagagctgtcatcccggctgcctcgggccacctaggaaataagagccacaggtgtccggtcagcttcacaaactctcctgcctagacactggagcaggacacacccactgtctgcccctcccttccaccagaaagcaggaagctgctccctggggcaatcatcctgagggtgagttttctcatccaggatcctcctaactcctccaagggcggcattaaggatccaggtgagccctgccacggaagggaaaaccgagggtccagccagggactcgggactcggtcccaagccaggctggcctactccagcctctctggtgtggttcttctcaccatctccttctgcattttgacccaggaagggccagctccaggaggcagacagctacccccgcccactgttgagacaaaaagttagccaactcactgtgtgagggcttgagtcctcttttacccaacagagggtcacctattctccaccatccaaggcgtctcttggtctggtcactgcctgcctctccatcatcaatccagccaaacaggtttgctcaggtcaggggtggggagtgagggtggggctatgacatggtcctcatgaggcctccttgatcccttctaggccctgaccaaatgcaaacagtgctcacgcctccccacccagccatgggctaagctcagggagggaaggtgtttaaatggggagcacagggagctgggagggtctggctggccaaagagaagtcaagagatgcttccagtaagggtgaaggtagtaaggtgaggactgtgcatgggaaggggtgagctgctgttcacccctgcacacaagcagaggcttcctcacaagcaccagctcagccagggccacgctgcagtcactgcagaagacatttctgtagcttctacagccacacagaggcaccagatgccaagtgccagtttcttccatccacgccatgcttcctgatgatctggatcagaagagtcctttggaccacttcctaaaaatacatttcacggcccttccctggagaccagaccaccttggtcagcctgagtatggcctgggacaggcattttcacaaacagcccatgtgagtccgacggttgatcaggaaagggaggcaagcactagtgtttgtgcaccagtggaaactttccatgttttcataggggctggggacagcatctggatgaggcctggtccattttacaaaccattaaccaatgatcctgagccctgtcctatggtggagtcagtgtcctgctccccagcgggctcattcccaggctctgctctgaacccacaaacactgaaggatcagagtcttgagtcagaggagacagccaggcagggaccagggtcagactgcctcaggagagtcagaagcaccatccccaaaccccagaggggatgaagcctagtcctgtccagtaaagaaaagtgatcagtttgtaatcagcaggagtccccagttaaaggtattgtcctagtaactcccccgacagctcttctgaaaggggcgtgccttacctacccctcaccccacagcaatctctgagtcgttccctacacatggccctcctcgccttcatagcttttcccatctgtcatcagcttagttacttgttttctttctgtctgtctccccagttgggatataagctctgtgagggttggaattgggtctgtcctgttcgcagctctagtcccacatgtagcatgctgcttggcacacagtagagtacatcagaaagtactgaatgcatatcaggttggttaccgtggacgatcacacctccctctctgacctgcagtttccttgctgtcaaactgagaagtcagcctattcccactgctcaaaaaaggccagatcagtcccatgggcatcccagagcccagacaagtggattctttggccccttccagacctataaaatcaga

SEQ ID NO: 915595 - DNA, 4001 bp, Homo sapiens
atggtgcaaacctttgagccattctgagaagaattcccaattccattgggacaaccccaggagcagcctctctgaggagagacccagagaacgtgcccaagtcagacctggggtagcccccaaagcaagggcagatggtggccagtggggagttaggacagaatgacagctcaagatggagcacagaaagggggtttggtctctctgctcctgctggggaagggagccctttccaggattaaaagtccagaaaggagcagattcttagttctatccagaaaaccggattctaggagtctaacgaggttgggaggctggcgggggcacggcactctcttcctgagaagcagagggccagtcactgcttcccgtagggaaggcagcccagaggcacctcagcctgggccgccagctcacagagaaggcggccctgttgtctctgaacaacaacccatccccaagctaaagacacccactctgcccaaagtccaagctggcaatttccaattcactcttctaactcttccttccatgtgcaccctcacaacctcggttaccatcttggagtctgggggatctggccccaactcctggcaagctccccatgtcttgacagagcccagggcccatggggcagcttaggatcacccacccagcgcaatggggccaggcacaggagcagtctgggagtgggccaggagcagggcagggaacggtcaaggggcattcccagaccagctctcagcaagcaaaacaacctcccgagttcatttctaggccccaaacagcgggcacgtccccggaacccactctagaattatcgggcagctttggagagtaacagcatgggagaaatattaccaatagtgaatatttatacagctctccctccgtgcaggcgcctttcaaagcacttagcatatatcaactcatttaaaatccccctggcagatgccagggccaggacctagaggaggtggagtctgtaggacgggtccggcacagctcaggagacagtgacacgggtgtgtgtctcttgtgagaactcagcctgtaccaggcctgttcccaaagttcaaaaagaatgagtccgcctgagcctggcttccacgcggtacccgcctccggcggtggaaagtacaggcttccccaagaggcctgtggggggtgccagcttgtgggtggccatgaggtcagacagggcacagctgggcacccgaacactgcctacactcccagccttctggcagcagttcccttaagccaggccctcaggacccaggctggggagcagaggaagcagccacagtaggtcaggcctcaagctgcccagacagagcctccccccaggactgggaatggaggggcagtgctggcagacatgttggcagttctgggctggccgggaggtccctgccagccaggtccccgaggaaacacccacagcagacagctgagcccactccccccatcgcatccctcccactgctcaccacccatgcagccctgaggcacagtggcctaggcctgacgacccccataacgtggccctaggaccctgggcacagccggcctcccactgacaactccacctttgggtcctgctcagcgaccttgcgactcctgcacacaggcggaccccgcaaagcctgtcacctccagcacagtcagctcccaagtgctggacctgaccggggtagttgtgggagaaaccatcgctcgaggatgctggaggtgggggccgccgcttcagtccgggcgcagggctgggggattgggggcggaaactttccgcagaactgtcccgcttgctcactccaagggaacggagaggatccggcttcccgcgaaaatctggtccagggaaagggaccccggaaagcagctccgcagggctgtggcagccccaccccgacccgcgctgcgcccacgtgcagggcccgaccccctccgggaggcgcggcgccggctggggtcaggcggccgaggaccccgcggctccccgccccgccccgccccgcgggcccccgcgcaccgccgccgcgtactcaccctcacgggtggagcggggcggggcagcacggttccgcgcgcagctccgatccgctaggcgcaccgaccggcggcgcagcgctggcgcgacggctcgactcggccgggtccctgtcccgggcgcgggtccggcctgggagcgggcgagtccgcctgcaggggaggcggggacccgggcccgggttgggggcggggaaggggctggacacgcttgcgcacacggcggcccgactcccaggagctcccgggaggggtagaaagggcggggtggaggagggggaagggcgggggtgatgccgcgcggtcgcaggcttgggatggtgttcgcgcctccgagacccggacagaggcaagcaggggcgccgtgggtgccagagaggcggaagaggaggcctgatggggtgagcacagggccagggcaggcactgcctgtgaatggcgccagggtgggtatgcccagcgcagccaaggcgctcgctcccgggaacaatgagaatcaagaaagggtgcagtgctctatcccacggggaacggtgtccttccctcactggggaaactggggcagggtcctgttccgggagcctatgcttcccgtgccccatgcacgcaaggcagccagtcagtcccctgggcccagacgtgggcccttcctctgcttcggttggggcctgctgcccctaaactgctctctctgcacccctcacttgcatactctttatcttggcctcagaaagtttctcagtttcctttccgttattgaaggcgccaggcatcctgtctccaggaagaaacccctgggcccctgaccctggttctttggacccaggcatccccccaaataaacctgggaactgcccaggctgaagaacagttcagaagtcaccctacaggacaatccacagccccttaggccagtccctttcacaggtcagcacagtgtttccggagccccacgtatcaacagcccagtgccgggagcgccaggggctccaaggaaactatcagacccattccctgtccccaggaagcttaccatccagcggcacagagaaggctcaccatggactccattcaagaacgaggcaggataggatgtgaataagtgcaaggtgtgagtgactgacagtaagtgcaagggggttcagagaagtggcagctccaagcctgcttctgctgaagctggagggcttatctgtcaagaacccccaactcaggaagctctgctccaagtgagctgagtaaggagagtctgcctccaagttgttcctctgcaggtgactgtgctccatgctaaatcattccttgcacgggcagaagctgtttggcattgcaccagtgtctgattttgtttgaatatggtgcctttggcttaatcagtcagacatgcattcaacaactatttatttatttatttatttatttatttatttattattttgagacagagtctcgctctgtcgccaggctggagtgcactggcgtgatcttggctcactgcaacctctgcctcccgggttcaagtgattctcctgcctcagcctcccgagtagctgggactacaggcgcgtgccaccatgcccagctaatttttgtatttttagtagagacgaggtttcaccatgctggccaggatggtctcgatctcttgaccttatgatccgcccgcctcggcctcccaaagtgttgggattacaggcgtgagccattcaacaactatttattgcatgccatctccaggcctggaattaagctgggtataaagaacacaatgactaagtccctgcctcgggcaagtcgaggaagagggaagagcctccttgttctacagatgggaagactggcccaaagggagtaagcagctgcccttcataactaagtgaatctgacagaactgatccaagcgtcagcccagcctctaaacttggccatttgatgaactagatctaagc

SEQ ID NO: 915596 - DNA, 4001 bp, Homo sapiens
cacagaatcctaatggcaacccaattcacacattcaagggctatttttagtccttactgtgacagacaaaatagtaaatactagatgcaccttaaactctaaacactacagatacagtcccttccctcaagaagctcagtctaaagaagttagtactattggaatccccagatatagagatgaggaaaagtgaggctcaaagaagtaatatgtttgcccagaaccacagagcaaaaaagtggcagagagcctgggcaacatagggagaccctgtctctacgaaacatttaaaaaatttgcagggcgtggtggctgaagaagaggatcgcttgagcccaggaggtcgaggctgcagtgagccgagatcgtgccactgcacttcagcctggctgacagggtgataccctcgtttctttattaaacaaaaaagaagaagaaggaagaaggaagaagaggaagaagaggaagaggaaggaggaggaggaggaagaaggagaaggagaaggagaaggagaagaaatggaaaaaaaaagatggcagagccagaattcaaaccagctctcccgagtggatatacaggaccccatgcacgtacaaccactatgttctaaaggaggcacttgataaacccttattgaaggaaatgttttggaataccaataaaatgaaaaaaaaatcatctcaagaataatgtagggtttcactcactgttattcttttttataaggggaaagcaggaaatttgcaaaagttaagtagcatagaaggaggtcgtattggtcggctactactcacctggtacctgataattgctcatcaagccatctgttgagactaggtgaggatggagtttctctcctttttcatgaaccacagaggagacttaaaggaggatttatttgtgttccttaaagtgacccccactgagcgtgtccctcaaagtggaccttcctaagcatcggcgctttgctttgcgctgggtggtgcggctgagtcactaattagcagtgagagcctgggctgtatctcctaccaaataaccagcggagtggagtgacaggtccttacttaaacatggtttaagtaagcattcacagttccttacttaaacatggtgcagtcttcctaaaagatggagtcagaccccaagagaacaggtctccaaaaatatgtgaatccgtacttcccactggaggggagagagagctgcgctgagggattatgagagaccctacaacttctcaggcgccccctgccccgggggccaggaacatctgcagacagccccgcctccgtctcgcctcaatcccgagctgttcccttctccaaaggccaccttggcagccacacagtttggcctaatcacctcctcaaacaagagtagcgacaccccaaaatgtagaccaagcagaaagaggcgcgggaggcacttgccttattccccatgatgtttttgttttgagacgaagtcttcctctgtcgcccaggctggagtgcagtggcgcgatctcgtctcactgcaacctccgcttcccgggttcaagcgatcctcccacctcgaccctcccgagtacctgggactacagatgcgcgccaccactcctcctactgtgtgtgtgtgtggacacgggttgtcgctatgttgcctacctagctggtaccccataaccactcctggctagtgtgtgtgtgtgtgtgtggacacgggttgtcgctatgttgcctacctagctggtaccccataaccactcctggctagtgtgtgtgtgtgtgtgtgtgtgtgtgtctacacgggttctcgctatgttgcctacctagctggtaccccataattttttagctcaacaggagacctgcctttatacccaccaagttaagcagcgcagtagccctctaagggccagccccacgcccagaggctcctctgacagcgtggacagatgccctgggctgctggctcgactcagtcctcagcccccagcccccgacccccgacccccggcccccgacccccgacccccggcccccagcgcccggcgccccgcctccagcgctcagcagttaaccaggcaactcgcgcgcagacgccaaggctgggacgcagaaggcgtgtttggccgcccagccgccccgcctcccccacttctcccgcctctcccgcctctcccgccttccgccaatggcccagctgcgccggcgccgccgggagcgctaggcctggtccctcttcctagaatagcgttgcgcgcatgcgccttgacgagtgagccgggtgagggggctccctaagtagcggaaggggtagatgaaaatggaaggggcgggcgcgctaggcctagtcctggctgggctcccgctggagtgtgcgttgggggcggaccaggagcggtggtctccagggaggtcgaggctggggctcccacccggatttggagcagggtcgccgcggcccagctgacccgccggcgtttgtacgttgtgtgcccactcagggagccatggacaactgtttggcggccgcagcgctgaatggggtggaccgacgttccctgcagcgttcagcaaggctggctctagaagtgctggagagggccaagaggagggcggtggactggcatgccctggagcgtcccaaaggctgcatgggggtccttgcccgggaggcgccccacctagagaaacagccggcagccggcccgcagcgcgttctcccgggagaggtgagggtcgctgtgccgggggccgccccagtccttcgcgccgcggtagcccgctgggagccaggggtgcgcagcgcagaagcagctgaggaaaccttcccttagcggaagctggaaaggatcagaacaatgaatggaaaagtcctttcaaaacgctttacatttgacagattcttgttgggtagctgtagaataacggtagtgttcagccctggttggttacttaaaaaaaaaaaaaaaaattagccgggcgcggtggctcatgcctgcaatcccagcactttgggaggccgaggcgggcggatcacctgaggtcgggagttcgaaagcagcctgaccaacatggagaaatcccgtctctactaaaaatacaaaattagccgggcgtggtggcgcatgtctgtaatcccaggtactagggaggctgaggcaggagaatcgcttgaacccgggaggcggaggtcgcggtgagccgagatcgcgccattgcactccagcctgggcaacaagagcgaaacctccgtctcaaaaaaaaaaaaaaaaaaaaaatcttacagctatcatctgatagtagaggaaagcctgcaagcctgtctcttagatcctggataaattgcatgtctatcttttagagttggaattctttctcaataacatcgttctttctgacataaacttgcagagcctttccaaaagtaaaaaggagactatttccaaaatggcttcattctccagtagggaatcctagagctaacctgtgacgtgccatttattcaaatagagagaagagagacccccaacccttagtgcttccttcagaacaatggctgaattcatggactatacttcaagtcagtgtggggtaagttggtgtgaaccaaaactatgccccatcacctgctgatggaccacatttggatctttctggaatttacggagaatctggacactacctgtttctcctgcccagccttcacggtcagattgtaatcagtcaaggacttaaaccagggggtaaatccaagttagaattcacccaataaatgtttattgaatgcctaaccctgtagctgacaatatagcaatgaaaagtcagaaaaggtcttctgccctcagtgatctttcagtctagtggggggaaaatagcttatttgccgaatttcatagcaaataagttaaatattaggggttttttttaactttttttttttttttttttttgagacagaggcttgctctgtggcacaggctggagtgcagtggtgtgatctcggctcactg

SEQ ID NO: 915597 - DNA, 4001 bp, Homo sapiens
attctgttcagaaagttcaagaagaaaaactgaagaaccaggacagcagctgttccctcatcccacagagaaaccaaaggcatttgcaaagttccctgaggccaagaagtgaatttaagacataacatggctcaagtggaagcacaacccctgatgggtctccgttgcaggaagtgtttgctgcattcatcctcctcataatattactgacaaccccactaccctatcacctataaaactgcctttctgggagggtctcctttccaaggccacacagctcaccatgtaccactcctctaggtcagaacaagttttaccaaaacttaggacaatcagtgtaggagtgcacagcgtggacactgcgtgccctgagatttggtcaaaatgtaaccaaaggaatccacccggcacaactacagtgcctcatgttccccagctcttagcagctgctgctgagagctcactctgggacatctggatgagaaacctgtttgcaggccccccaaccccaagccagccccctcctccacctcttaggaaagtctgtgatcgaccttttgatgtgggaggacagcttgattcttaccaagctgcctggaagagagagagtgcaaaaccccagctcaggcatccctgtgacagtccctctgtcctaataaatgctctagagggacttggaactcaccacaggctcctggctgagcttaattagccttttttttttttttttttccattacaggtcagacatagcagcaccaagagacaaaacagacagtgttcactaggacgaacaagcggctcaaaaggcactggagtttccctgtaagaactacaaacaccacgggagtgatgttaactcagatttttccatataaaagattcttcctgtaaaaatatcctgtgcctttgtgctaaataaaagtaaaatgatgctttttagagtgaagtctaaacacctcagattcagcaagagtgagatcagctagatttgcaaagtcaagaaaattggctgtttccctcctccttaagctaatagaatccaactgttggagcatgacatcattcctgagccccaaaccccgagcagagactacagacactcgcctgactcccagaaaacagccggagagaagggccaggaaaggaggccaaatgatcccagcccggagctgcccttacctgaaagtcccgctgctttcctgcccactccattctcacaccgcagccggctagggagcccagggcccccaaatccactggcttaagctccgatacctgctgcgagcttcccacagctccttcctctgacctttcgtggcgctcctcgcagccaagtgagcagagcactgctagccggccaggccggttgtcatggagaccctgtcctcgctaggcgggcgcgcgcacagcggcgcgctcttggcctagcgcgtgcacaagggcgctctctttttctttctttctcactgtctctctctctctctctctctctctctctctctcagttctgggaggcttccatgaaacagcactgtcttttgatcagctcggtttttgcatgcattccactcctcctacctcccttccagtccaacaggggctctgaactgctcctgggaacttgcttgaacagctcagaggggagaagggagaagacagtgagtggacttgttttcttcccctccagtgtctcattttttataacttggaagaatccctgccaggggggagggagctagctgaagcgcttgaaggggacccagcttcctctgggtcctggagctcgggtaggagggaccctgatgcgctgccttgacttgtttgtgcacttgggatttttccgggcagcagttggggcggaaatgcactcacatcccaggagctcgcctggactggcctctctgcttaccttgctgcctgtccaggttgtggcgatggctttaaccagtgcagggactcatggtactagtggtggcgcctaagcagtctctcatcttcctgaaatggagagcaaagacaactcggtcaggaccaggaagaatcctgggcaagtcgagagtcacaacccagacgacaaacctgatacaaatacagccttgtctctctgccctgctaaggatctgcagctaaggtgcaggcttagtgggagctgctgtcacagtcggtaataatattgctcctgtcagaaaatgagcacagtccctgggacacggcagaccccctaagtttagtcccatccccatccccatcctgtcccttcctctcccccctacccagcatacatttctgctttgtaacattctttttacatgtatcattttgtttgatcctcataaccttttgaaatacactgcacagatatttttatgaccattttttcaagtttatttattattcttcttaaatttcttttagagacaggatcttgctccattgcccaagctggaatgcattggtgcaatcatagctcactacatcatcaaactcctgggctcaaacaaccctcctgcctcagcctctgaagtagctgggactacaggcatgcaccaccacgcctggctacttttttaatttttatttttatagagacagggtctcactatgttgcccaggctggttttgaactcctggcttcacgcaatcctcctgcctcagcctctcaaagtgctgggattacaggcgtgagccagcatactggccttatgaccattttatagatggaaaaactgagactcagagagattaaacatttgatctgcacttatacagttaggcagtcaaagaactaagagatcagccaagttcgccctagtccagcacactttcaactaaagtatattgccacctgatttcaaaaactgtcaactttttgataactggttatgagataacgctgggctcccaagggaaggtggagaatccttgtaagttgtggcgagataggctgactaccatcctttcagcctaaagaccttaagacagcatctctaagatgtaaaacgtcctgatgcacagctcggagaaaaagccctaccctacagctatatgtgaccttgcacttttctaaacgactctcaaaatcttggctcgtctgttcaacatgacaggtctgaaagttaggattggcattattatactaatttaacagattttttttttttaattctacaacagaagtaaaattacttgccccaggtcatggaaccaggaaataaaatctagaaacaatccccaagcctttcaagtctcttgagtacattaagcacagtggttgcaacagcaccaggggtcagaagaccttggcagtgcctgactccaccactaacgggccatgtgccattgggcaagtcccatgacttccccctttccacctacagagcctactgacagggctgggactgagcatcggaagagatgctgtccgtgaaagcactctcaagtcaggaactgaactaagaactttactcctcttgacaactcctcaccaaaaacaaacaaaaaacactgggacagttaataccctccccaggatgaggacactgaggcttaaggaggatattttccaatgctgctcccaaaaacagtgctcccaaaaaaaaggtcctgatgttatttatttatttatttattgacacgaggtcttattatgttgcccaggctggtcttgaactcctgagctcaagcaatcctcccacctcagactcctgagtagctgggattataggtgtgtactaccacacccagcctgatagaatctttaatgcaacatcctatgcagaatctagtgggtttttttcattaatttccagcatatcacaacattctcaaaacaagattctgattgacttgagtttaaaaggtaaatatataccagaagttaaggtaggaaagtgttataaaatccaacaggaaatgacagaatggcacaaatcctaaatggggggcactactgctttagtgaagcaatcagagcttgaaagggagtgaacctaatcaccc
